(19) United States
(12) Patent Application Publication
(10) Pub. No.: US 2025/0017953 A1
(43) Pub. Date: Jan. 16, 2025

(54) LACTATE DEHYDROGENASE A (LDHA) iRNA COMPOSITIONS AND METHODS OF USE THEREOF

(71) Applicants: Alnylam Pharmaceuticals, Inc., Cambridge, MA (US); The UAB Research Foundation, Birmingham, AL (US)

(72) Inventors: David Erbe, Arlington, MA (US); Abigail Liebow, Somerville, MA (US); Kevin Fitzgerald, Brookline, MA (US); Gregory Hinkle, Plymouth, MA (US); Kyle David Wood, Homewood, AL (US); Ross Philip Holmes, Birmingham, AL (US); John Knight, Homewood, AL (US)

(21) Appl. No.: 18/637,500

(22) Filed: Apr. 17, 2024

Related U.S. Application Data
(63) Continuation of application No. 17/106,259, filed on Nov. 30, 2020, now abandoned.
Application No. 17/106,259 is a continuation of application No. 16/716,705, filed on Dec. 17, 2019, now abandoned.
Application No. 16/716,705 is a continuation of application No. PCT/US2018/041977, filed on Jul. 13, 2018.
(60) Provisional application No. 62/576,783, filed on Oct. 25, 2017.
(60) Provisional application No. 62/532,020, filed on Jul. 13, 2017.

(51) Int. Cl. A61K 31/7105; C12N 15/113

(52) U.S. Cl. CPC A61K 31/7105; C12N 15/113; C12N 2310/11; C12N 2310/3125; C12N 2310/313; C12N 2310/321; C12N 2310/3231; C12N 2310/3521; C12N 2310/3523; C12N 2310/3525; C12Y 101/01027

(57) ABSTRACT

The invention relates to double-stranded ribonucleic acid (dsRNA) compositions targeting the LDHA gene, as well as methods of inhibiting expression of LDHA, methods of inhibiting LDHA and HAO1, and methods of treating subjects that would benefit from reduction in expression of LDHA, such as subjects having an oxalate pathway-associated disease, disorder, or condition, using such dsRNA compositions.

### RELATED APPLICATIONS

[0001] This application is a continuation of U.S. patent application Ser. No. 17/106,259, filed on Nov. 30, 2020, which is a continuation of U.S. patent application Ser. No. 16/716,705, filed on Dec. 17, 2019, which is a 35 § U.S.C. 111 (a) continuation application which claims the benefit of priority to PCT/US2018/041977, filed on Jul. 13, 2018, U.S. Provisional Application No. 62/576,783, filed on Oct. 25, 2017, and U.S. Provisional Application No. 62/532,020, filed on Jul. 13, 2017. The entire contents of each of the foregoing applications are incorporated herein by reference.

### SEQUENCE LISTING

[0002] The instant application contains a Sequence Listing which has been submitted electronically in XML format and is hereby incorporated by reference in its entirety. Said XML copy, created on Aug. 23, 2024, is named 121301_07506_SL.xml and is 30,086,917 bytes in size.

### BACKGROUND OF THE INVENTION

[0003] Oxalate (C₂O₄²⁻) is the salt-forming ion of oxalic acid (C₂H₂O₄) that is widely distributed in both plants and animals. It is an unavoidable component of the human diet and a ubiquitous component of plants and plant-derived foods. Oxalate can also be synthesized endogenously via the metabolic pathways that occur in the liver. Dietary and endogenous contributions to urinary oxalate excretion are equal. Glyoxylate is an immediate precursor to oxalate and is derived from the oxidation of glycolate by the enzyme glycolate oxidase (GO), also known, and referred to herein, as hydroxyacid oxidase (HAO1), or by catabolism of hydroxyproline, a component of collagen. Transamination of glyoxylate with alanine by the enzyme alanine/glyoxylate aminotransferase (AGT) results in the formation of pyruvate and glycine. Excess glyoxylate is converted to oxalate by lactate dehydrogenase A (referred to herein as LDHA). The endogenous pathway for oxalate metabolism is illustrated in FIG. 1A.

[0004] Lactate dehydrogenase is a protein found in all tissues. It is composed of four subunits with the two most common subunits being the LDH-M and LDH-H proteins. These proteins are encoded by the LDHA and LDHB genes, respectively. Various combinations of the LDH-M and LDH-H proteins result in five distinct isoforms of LDH. LDHA is the most important gene involved in the liver lactate dehydrogenase isoform. Specifically, within the liver, LDHA is important as the final step in the endogenous production of oxalate, by converting the precursor glyoxylate to oxalate. It also serves an important role in the Cori Cycle and in the anaerobic phase of glycolysis where it converts lactate to pyruvate and vice versa.

[0005] Oxalic acid may form oxalate salts with various cations, such as sodium, potassium, magnesium, and calcium. Although sodium oxalate, potassium oxalate, and magnesium oxalate are water soluble, calcium oxalate (CaOx) is nearly insoluble. Excretion of oxalate occurs primarily by the kidneys via glomerular filtration and tubular secretion.

[0006] Since oxalate binds with calcium in the kidney, urinary CaOx supersaturation may occur, resulting in the formation and deposition of CaOx crystals in renal tissue or collecting system. These CaOx crystals contribute to the formation of diffuse renal calcifications (nephrocalcinosis) and stones (nephrolithiasis). Subjects having diffuse renal calcifications or nonobstructing stones typically have no symptoms. However, obstructing stones can cause severe pain. Moreover, over time, these CaOx crystals cause injury and progressive inflammation to the kidney and, when secondary complications such as obstruction are present, these CaOx crystals may lead to decreased renal function and in severe cases even to end-stage renal failure and the need for dialysis. Furthermore, systemic deposition of CaOx (systemic oxalosis) may occur in extrarenal tissues, including soft tissues (such as thyroid and breast), heart, nerves, joints, skin, and retina, which can lead to early death if left untreated.

[0007] Among the most well-known oxalate pathway-associated diseases, e.g., kidney stone formation diseases, are the primary hyperoxalurias which are inherited diseases characterized by increased endogenous oxalate synthesis with variable clinical phenotypes. Therapies that modulate oxalate synthesis are currently not available and there are only a few treatment options that exist for subjects having a hereditary hyperoxaluria. Ultimately, some subjects with hereditary hyperoxaluria require kidney/liver transplants. Other oxalate pathway-associated diseases, disorders, and conditions include calcium oxalate tissue deposition diseases, disorders, and conditions.

[0008] Currently, the primary treatment for many of these oxalate pathway-associated diseases, disorders, and conditions (e.g., with kidney stone disease) is increased fluid intake and dietary alterations (e.g., decreased protein intake, decreased sodium intake, decreased ascorbic acid intake, moderate calcium intake, phosphate or magnesium supplementation, and pyridoxine treatment). However, subjects often fail to adhere to such life-style changes or experience no significant benefit. Treatment for some of the other oxalate pathway-associated diseases, disorders, and conditions, such as chronic kidney disease, include the use of ACE inhibitors (angiotensin converting enzyme inhibitors) and ARBs (angiotensin II antagonists) which may slow the progression of disease. Nonetheless, subjects having chronic kidney disease progressively lose kidney function and progress to the need for dialysis or a kidney transplant. Most of these oxalate pathway-associated diseases are without treatments, and none currently have oxalate reduction treatments available.

[0009] Further, there are oxalate pathway-associated diseases, disorders, and conditions include lactate dehydrogenase-associated diseases, disorders, and conditions. For example, the role of lactate dehydrogenase is well known in cancer (hepatocellular), and inhibition has been shown to reduce cancer growth. Other lactate dehydrogenase-associated diseases, disorders and conditions include fatty liver (steatosis), nonalcoholic steatohepatitis (NASH), cirrhosis of the liver, accumulation of fat in the liver, inflammation of the liver, hepatocellular necrosis, liver fibrosis, and nonalcoholic fatty liver disease (NAFLD). Given the essential role of LDH in glycolysis, however, treatment options have been limited.

[0010] Accordingly, there is a need in the art for alternative treatments for subjects having an oxalate pathway-associated disease, disorder, and condition.

### SUMMARY OF THE INVENTION

[0011] The present invention is based, at least in part, on the discovery that, by targeting LDHA with the iRNA agents, compositions comprising such agents, and methods disclosed herein, a liver specific and superior LDHA and urinary oxalate lowering effect is achieved.

[0012] Accordingly, the present invention provides iRNA compositions which effect the RNA-induced silencing complex (RISC)-mediated cleavage of RNA transcripts of an LDHA gene. The LDHA gene may be within a cell, e.g., a cell within a subject, such as a human. The present invention also provides methods of using the iRNA compositions of the invention for inhibiting the expression of an LDHA gene for treating a subject who would benefit from inhibiting or reducing the expression of an LDHA gene, e.g., a subject that would benefit from a reduction or inhibition in urinary oxalate production, e.g., a subject suffering or prone to suffering from an oxalate pathway-associated disease disorder, or condition, such as a subject suffering or prone to suffering from an oxalate-associated disease, disorder, or condition, e.g., a kidney stone formation disease, disorder, or condition or a calcium oxalate tissue deposition disease, disorder, or condition; or an LDHA-associated disease, disorder, or condition.

[0013] The present invention also provides iRNA compositions which effect the RNA-induced silencing complex (RISC)-mediated cleavage of RNA transcripts of an LDHA gene and an HAO1 gene. The LDHA gene and the HAO1 gene may be within a cell, e.g., a cell within a subject, such as a human. The present invention also provides methods of using the iRNA compositions of the invention for inhibiting the expression of an LDHA gene and an HAO1 gene for treating a subject who would benefit from inhibiting or reducing the expression of an LDHA gene and an HAO1 gene, e.g., a subject that would benefit from a reduction or inhibition in urinary oxalate production, e.g., a subject suffering or prone to suffering from an an oxalate-associated disease, disorder, or condition, e.g., a kidney stone formation disease, disorder, or condition or a calcium oxalate tissue deposition disease, disorder, or condition; or an LDH-associated disease, disorder, or condition.

[0014] Accordingly, in one aspect, the present invention provides a double stranded ribonucleic acid (dsRNA) agent for inhibiting expression of lactic acid dehydrogenase A (LDHA) in a cell, wherein said dsRNA agent comprises a sense strand and an antisense strand, the antisense strand comprising a region of complementarity which comprises at least 15 contiguous nucleotides differing by no more than 3 nucleotides from any one of the antisense sequences listed in any one of Tables 2-5.

[0015] In one embodiment, the dsRNA agent comprises at least one modified nucleotide.

[0016] In other embodiments, substantially all of the nucleotides of the sense strand comprise a modification; substantially all of the nucleotides of the antisense strand comprise a modification; or substantially all of the nucleotides of the sense strand and substantially all of the nucleotides of the antisense strand comprise a modification.

[0017] In yet other embodiments, all of the nucleotides of the sense strand comprise a modification; all of the nucleotides of the antisense strand comprise a modification; or all of the nucleotides of the sense strand and all of the nucleotides of the antisense strand comprise a modification.

[0018] In one embodiment, at least one of said modified nucleotides is selected from the group consisting of a deoxy-nucleotide, a 3′-terminal deoxy-thymine (dT) nucleotide, a 2′-O-methyl modified nucleotide, a 2′-fluoro modified nucleotide, a 2′-deoxy-modified nucleotide, a locked nucleotide, an unlocked nucleotide, a conformationally restricted nucleotide, a constrained ethyl nucleotide, an abasic nucleotide, a 2′-amino-modified nucleotide, a 2′-O-allyl-modified nucleotide, 2′-C-alkyl-modified nucleotide, 2′-hydroxly-modified nucleotide, a 2′-methoxyethyl modified nucleotide, a 2′-O-alkyl-modified nucleotide, a morpholino nucleotide, a phosphoramidate, a non-natural base comprising nucleotide, a tetrahydropyran modified nucleotide, a 1,5-anhydrohexitol modified nucleotide, a cyclohexenyl modified nucleotide, a nucleotide comprising a phosphorothioate group, a nucleotide comprising a methylphosphonate group, a nucleotide comprising a 5′-phosphate, a nucleotide comprising a 5′-phosphate mimic, a glycol modified nucleotide, and a 2-O—(N-methylacetamide) modified nucleotide, and combinations thereof.

[0019] The region of complementarity may be at least 17 nucleotides in length; 19 to 30 nucleotides in length; 19-25 nucleotides in length; or 21 to 23 nucleotides in length.

[0020] Each strand of the dsRNA agent may be no more than 30 nucleotides in length. Each strand of the dsRNA agent may be independently 19-30 nucleotides in length; independently 19-25 nucleotides in length; or independently 21-23 nucleotides in length.

[0021] At least one strand of the dsRNA agent may comprise a 3′ overhang of at least 1 nucleotide; or at least one strand may comprise a 3′ overhang of at least 2 nucleotides.

[0022] In one embodiment, the dsRNA agent further comprises at least one phosphorothioate or methylphosphonate internucleotide linkage.

[0023] The phosphorothioate or methylphosphonate internucleotide linkage may be at the 3′-terminus of one strand (e.g., the antisense strand; or the sense strand); or the phosphorothioate or methylphosphonate internucleotide linkage may be at the 5′-terminus of one strand (e.g., the antisense strand; or the sense strand); or the phosphorothioate or methylphosphonate internucleotide linkage may be at the both the 5′- and 3′-terminus of one strand.

[0024] The dsRNA agent may further comprise a ligand.

[0025] In one embodiment, the ligand is conjugated to the 3′ end of the sense strand of the dsRNA agent.

[0026] In one embodiment, the ligand is one or more N-acetylgalactosamine (GalNAc) derivatives attached through a monovalent, bivalent, or trivalent branched linker.

[0027] In another embodiment, the ligand is

[chemical structure]

[0028] In one embodiment, the dsRNA agent is conjugated to the ligand as shown in the following schematic

[chemical structure]

[0029] and, wherein X is O or S.

[0030] In one embodiment, the X is O.

[0031] In one embodiment, the region of complementarity consists of one of the antisense sequences listed in any one of Tables 2-5.

[0032] In one embodiment, the sense strand and the antisense strand comprise nucleotide sequences selected from the group consisting of the nucleotide sequences of any one of the agents listed in any one of Tables 2-5.

[0033] In another aspect, the present invention provides a dual targeting RNAi agent, comprising a first double stranded ribonucleic acid (dsRNA) agent that inhibits expression of lactic dehydrogenase A (LDHA) comprising a sense strand and an antisense strand; and a second double stranded ribonucleic acid (dsRNA) agent that inhibits expression of hydroxyacid oxidase 1 (glycolate oxidase) (HAO1) comprising a sense strand and an antisense strand, wherein the first dsRNA agent and the second dsRNA agent are covalently attached.

[0034] In one embodiment, the sense strand of the first dsRNA agent comprises at least 15 contiguous nucleotides differing by no more than 3 nucleotides from the nucleotide sequence of SEQ ID NO:1, and the antisense strand of the first dsRNA agent comprises at least 15 contiguous nucleotides differing by no more than 3 nucleotides from the nucleotide sequence of SEQ ID NO:2.

[0035] In another embodiment, the antisense strand of the first dsRNA agent comprises a region of complementarity which comprises at least 15 contiguous nucleotides differing by no more than 3 nucleotides from any one of the antisense sequences listed in any one of Tables 2-5.

[0036] In one embodiment, the sense strand of the second dsRNA agent comprises at least 15 contiguous nucleotides differing by no more than 3 nucleotides from the nucleotide sequence of SEQ ID NO:21, and said antisense strand of the second dsRNA agent comprises at least 15 contiguous nucleotides differing by no more than 3 nucleotides from the nucleotide sequence of SEQ ID NO:22.

[0037] In another embodiment, the antisense strand of the second dsRNA agent comprises a region of complementarity which comprises at least 15 contiguous nucleotides differing by no more than 3 nucleotides from any one of the antisense sequences listed in any one of Tables 7-14.

[0038] In one embodiment, the first dsRNA agent and the second dsRNA agent each independently comprise at least one modified nucleotide.

[0039] In another embodiment, substantially all of the nucleotides of the sense strand and substantially all of the nucleotides of the antisense strand of the first dsRNA agent and substantially all of the nucleotides of the sense strand and substantially all of the nucleotides of the antisense strand of the second dsRNA agent are modified nucleotides.

[0040] In one embodiment, at least one of the modified nucleotides of the first dsRNA agent and at least one of the modified nucleotides of the second dsRNA agent are each independently selected from the group consisting of a deoxy-nucleotide, a 3′-terminal deoxy-thymine (dT) nucleotide, a 2′-O-methyl modified nucleotide, a 2′-fluoro modified nucleotide, a 2′-deoxy-modified nucleotide, a locked nucleotide, an unlocked nucleotide, a conformationally restricted nucleotide, a constrained ethyl nucleotide, an abasic nucleotide, a 2′-amino-modified nucleotide, a 2′-O-allyl-modified nucleotide, 2′-C-alkyl-modified nucleotide, 2′-hydroxly-modified nucleotide, a 2′-methoxyethyl modified nucleotide, a 2′-O-alkyl-modified nucleotide, a morpholino nucleotide, a phosphoramidate, a non-natural base comprising nucleotide, a tetrahydropyran modified nucleotide, a 1,5-anhydrohexitol modified nucleotide, a cyclohexenyl modified nucleotide, a nucleotide comprising a phosphorothioate group, a nucleotide comprising a methylphosphonate group, a nucleotide comprising a 5′-phosphate, and a nucleotide comprising a 5′-phosphate mimic.

[0041] In another embodiment, at least one of the modified nucleotides of the first dsRNA agent and at least one of the modified nucleotides of the second dsRNA agent are each independently selected from the group consisting of 2′-O-methyl and 2′fluoro modifications.

[0042] The region of complementarity of the first dsRNA agent and/or the region of complementarity of the second dsRNA agent may each independently be 19 to 30 nucleotides in length.

[0043] Each strand of the first dsRNA agent and each strand of the second dsRNA agent may each independently be 19-30 nucleotides in length.

[0044] In one embodiment, at least one strand of the first dsRNA agent and/or at least one strand of the second dsRNA agent each independently comprise a 3′ overhang of at least 1 nucleotide.

[0045] In one embodiment, the first dsRNA agent and/or the second dsRNA agent each independently further comprise at least one phosphorothioate or methylphosphonate internucleotide linkage.

[0046] In one embodiment, the first dsRNA agent and/or the second dsRNA agent each independently further comprise at least one ligand.

[0047] In another embodiment, the at least one ligand is conjugated to the sense strand of the first dsRNA agent and/or the second dsRNA agent.

[0048] In one embodiment, the at least one ligand is conjugated to the 3′-end, 5′-end, or an internal position of one of the sense strands.

[0049] In another embodiment, the at least one ligand is conjugated to the antisense strand of the first dsRNA agent and/or the second dsRNA agent.

[0050] In one embodiment, the at least one ligand is conjugated to the 3′-end, 5′-end, or an internal position of one of the antisense strands.

[0051] In one embodiment, the ligand is an N-acetylgalactosamine (GalNAc) derivative.

[0052] In one embodiment, the ligand is one or more GalNAc derivatives attached through a monovalent, a bivalent, or a trivalent branched linker.

[0053] In one embodiment, the ligand is

[chemical structure]

[0054] In one embodiment, the first dsRNA agent and the second dsRNA agent are each independently conjugated to the ligand as shown in the following schematic

[chemical structure]

[0055] and, wherein X is O or S.

[0056] In one embodiment, the X is O.

[0057] In one embodiment, the first dsRNA agent and the second dsRNA agent are covalently attached via a covalent linker.

[0058] In one embodiment, the covalent linker is selected from the group consisting of a single stranded nucleic acid linker, a double stranded nucleic acid linker, a partially single stranded nucleic acid linker, a partially double stranded nucleic acid linker, a carbohydrate moiety linker, and a peptide linker. In another embodiment, the covalent linker is a cleavable linker or a non-cleavable linker. In one embodiment, the covalent linker attaches the sense strand of the first dsRNA agent to the sense strand of the second dsRNA agent. In another embodiment, the covalent linker attaches the antisense strand of the first dsRNA agent to the antisense strand of the second dsRNA agent.

[0059] In one embodiment, the covalent linker further comprises at least one ligand.

[0060] In one embodiment, contacting a cell with the dual targeting RNAi agent of the invention inhibits expression of the LDHA gene and the HAO1 gene to a level substantially the same as the level of inhibition of expression obtained by the contacting of a cell with both dsRNA agents individually. In another embodiment, contacting a cell with the dual targeting RNAi agent inhibits expression of the LDHA gene and the HAO1 gene to a level higher than the level of inhibition of expression obtained by the contacting of a cell with both dsRNA agents individually.

[0061] In one embodiment, the level of inhibition of LDHA expression is at least about 5%, about 10%, about 15%, about 20%, about 25%, about 30%, about 40%, about 50%, about 60%, about 70%, about 80%, about 90%, about 95%, about 98% or about 100% higher than the level of inhibition of expression obtained by the contacting of a cell with both dsRNA agents individually.

[0062] In one embodiment, the level of inhibition of HAO1 expression is at least about 5%, about 10%, about 15%, about 20%, about 25%, about 30%, about 40%, about 50%, about 60%, about 70%, about 80%, about 90%, about 95%, about 98% or about 100% higher than the level of inhibition of expression obtained by the contacting of a cell with both dsRNA agents individually.

[0063] In one embodiment, contacting a cell with the dual targeting RNAi agent inhibits oxalate and/or glyoxylate protein production to a level lower than the level of protein production obtained by the contacting of a cell with both dsRNA agents individually. In another embodiment, contacting a cell with the dual targeting RNAi agent inhibits oxalate and/or glyoxylate protein production to a level lower than the level of protein production obtained by the contacting of a cell with both dsRNA agents individually.

[0064] The present invention also provides cells containing a dsRNA agent or a dual targeting RNAi agent of the invention; and vectors encoding at least one strand of a dsRNA agent or a dual targeting RNAi agent of the invention.

[0065] Further, the the present invention provides a pharmaceutical composition for inhibiting expression of a lactic acid dehydrogenase A (LDHA) gene comprising a dsRNA agent of the invention; or a pharmaceutical composition for inhibiting expression of a lactic acid dehydrogenase A (LDHA) gene and an hydroxyacid oxidase 1 (glycolate oxidase) (HAO1) gene comprising a dual targeting RNAi agent of the invention.

[0066] In one aspect, the present invention provides a pharmaceutical composition, comprising a first double stranded ribonucleic acid (dsRNA) agent that inhibits expression of lactic acid dehydrogenase A (LDHA) comprising a sense strand and an antisense strand, wherein said sense strand comprises at least 15 contiguous nucleotides differing by no more than 3 nucleotides from the nucleotide sequence of SEQ ID NO:1, and said antisense strand comprises at least 15 contiguous nucleotides differing by no more than 3 nucleotides from the nucleotide sequence of SEQ ID NO:2; and a second double stranded ribonucleic acid (dsRNA) agent that inhibits expression of hydroxyacid oxidase 1 (glycolate oxidase) (HAO1) comprising a sense strand and an antisense strand, wherein said sense strand comprises at least 15 contiguous nucleotides differing by no more than 3 nucleotides from the nucleotide sequence of SEQ ID NO:21, and said antisense strand comprises at least 15 contiguous nucleotides differing by no more than 3 nucleotides from the nucleotide sequence of SEQ ID NO:22.

[0067] In another aspect, the present invention provides a pharmaceutical composition, comprising a first double stranded ribonucleic acid (dsRNA) agent that inhibits expression of lactic acid dehydrogenase A (LDHA) comprising a sense strand and an antisense strand, the antisense strand comprising a region of complementarity which comprises at least 15 contiguous nucleotides differing by no more than 3 nucleotides from any one of the antisense sequences listed in any one of Tables 2-5; and a second double stranded ribonucleic acid (dsRNA) agent that inhibits expression of hydroxyacid oxidase 1 (glycolate oxidase) (HAO1) comprising a sense strand and an antisense strand, the antisense strand comprising a region of complementarity which comprises at least 15 contiguous nucleotides differing by no more than 3 nucleotides from any one of the antisense sequences listed in any one of Tables 7-14.

[0068] The agent may be formulated in an unbuffered solution, such as saline or water; or the agent may be formulated with a buffered solution, such as a solution comprising acetate, citrate, prolamine, carbonate, or phosphate or any combination thereof; or phosphate buffered saline (PBS).

[0069] The present invention provides a method of inhibiting lactic acid dehydrogenase A (LDHA) expression in a cell. The methods include contacting the cell with an agent or a pharmaceutical composition of the invention, thereby inhibiting expression of LDHA in the cell.

[0070] The present invention also provides a method of inhibiting lactic acid dehydrogenase A (LDHA) expression and hydroxyacid oxidase 1 (glycolate oxidase) (HAO1) expression in a cell. The method includes contacting the cell with a dual targeting RNAi agent of the invention or a pharmaceutical composition comprising a dual targeting agent of the invention, thereby inhibiting expression of LDHA and HAO1 in the cell.

[0071] In one embodiment, the cell is within a subject, such as a human.

[0072] In one embodiment, the LDHA expression is inhibited by at least 30%, 40%, 50%, 60%, 70%, 80%, 90%, 95%, or to below the level of detection of LDHA expression.

[0073] In one embodiment, the HAO1 expression is inhibited by at least 30%, 40%, 50%, 60%, 70%, 80%, 90%, 95%, or to below the level of detection of HAO1 expression.

[0074] In one embodiment, the human subject suffers from an oxalate pathway-associated disease, disorder, or condition.

[0075] In one embodiment, the oxalate pathway-associated disease, disorder, or condition is an oxalate-associated disease, disorder, or condition, or a lactate dehydrogenase-associated disease, disorder, or condition.

[0076] In one embodiment, the oxalate-associated disease, disorder, or condition is a kidney stone formation disease, disorder, or condition, or a calcium oxalate tissue deposition disease, disorder, or condition.

[0077] In one embodiment, the kidney stone formation disease, disorder, or condition is a calcium oxalate stone formation disease, disorder, or condition or a non-calcium oxalate stone formation disease, disorder, or condition.

[0078] In one embodiment, the calcium oxalate stone formation disease, disorder, or condition is a hyperoxaluria disease, disorder, or condition or a non-hyperoxaluria disease, disorder, or condition.

[0079] In one embodiment, the hyperoxaluria disease, disorder, or condition is selected from the group consisting of primary hyperoxaluria, enteric hyperoxaluria, dietary hyperoxaluria, and idiopathic hyperoxaluria.

[0080] In one embodiment, the non-hyperoxaluria stone formation disease, disorder, or condition is hypercalciuria and/or hypocitraturia.

[0081] In one embodiment, the non-hyperoxaluria stone formation disease, disorder, or condition is calcium oxalate or non-calcium oxalate kidney stone formation disease.

[0082] In one embodiment, the calcium oxalate tissue deposition disease, disorder, or condition is selected from the group consisting of systemic calcium oxalate tissue deposition disease, disorder, or condition or tissue specific calcium oxalate tissue deposition disease, disorder, or condition.

[0083] In one embodiment, the lactate dehydrogenase-associated disease, disorder, or condition is selected from the group consisting of cancer, fatty liver (steatosis), nonalcoholic steatohepatitis (NASH), cirrhosis of the liver, accumulation of fat in the liver, inflammation of the liver, hepatocellular necrosis, liver fibrosis, and nonalcoholic fatty liver disease (NAFLD).

[0084] In one embodiment, the cell is a liver cell.

[0085] In one aspect, the present invention provides a method of inhibiting the expression of LDHA in a subject. The method includes administering to the subject a therapeutically effective amount of the agent or a pharmaceutical composition of the invention, thereby inhibiting the expression of LDHA in the subject.

[0086] In another aspect, the present invention provides a method of inhibiting lactic acid dehydrogenase A (LDHA) expression and hydroxyacid oxidase 1 (glycolate oxidase) (HAO1) expression in a subject. The methods include administering to the subject a therapeutically effective amount of dual targeting RNAi agent of the invention, or a pharmaceutical composition comprising a dual targeting RNAi agent of the invention, thereby inhibiting expression of LDHA and HAO1 in the subject.

[0087] In one aspect, the present invention provides a method of treating a subject having a disorder that would benefit from a reduction in LDHA expression. The method includes administering to the subject a therapeutically effective amount of the agent or a pharmaceutical composition of the invention, thereby treating said subject.

[0088] In another aspect, the present invention provides a method of preventing at least one symptom in a subject having a disease or disorder that would benefit from reduction in expression of an LDHA gene. The methods include administering to the subject a prophylactically effective amount of an agent or a pharmaceutical composition of the invention, thereby preventing at least one symptom in the subject.

[0089] In one embodiment, the disorder is an oxalate pathway-associated disease, disorder, or condition.

[0090] In one aspect, the present invention provides a method of treating a subject having an oxalate pathway-associated disease, disorder, or condition. The method includes administering to the subject a therapeutically effective amount of an agent or a pharmaceutical composition of the invention, thereby treating the subject.

[0091] In another aspect, the present invention provides a method of preventing at least one symptom in a subject having an oxalate pathway-associated disease, disorder, or condition. The methods includes administering to the subject a prophylactically effective amount of the agent or a pharmaceutical composition of the invention, thereby preventing at least one symptom in the subject.

[0092] In one embodiment, the administration of the dsRNA agent or the pharmaceutical composition to the subject causes a decrease in one or urinary oxalate, tissue oxalate, plasma oxalate, a decrease in LDHA enzymatic activity, a decrease in LDHA protein accumulation, and/or a decrease in HAO1 protein accumulation.

[0093] In one embodiment, the oxalate pathway-associated disease, disorder, or condition is an oxalate-associated disease, disorder, or condition, or a lactate dehydrogenase-associated disease, disorder, or condition.

[0094] In one embodiment, the oxalate-associated disease, disorder, or condition is a kidney stone formation disease, disorder, or condition, or a calcium oxalate tissue deposition disease, disorder, or condition.

[0095] In one embodiment, the kidney stone formation disease, disorder, or condition is a calcium oxalate stone formation disease, disorder, or condition or a non-calcium oxalate stone formation disease, disorder, or condition.

[0096] In one embodiment, the calcium oxalate stone formation disease, disorder, or condition is a hyperoxaluria disease, disorder, or condition or a non-hyperoxaluria disease, disorder, or condition.

[0097] In one embodiment, the hyperoxaluria disease, disorder, or condition is selected from the group consisting of primary hyperoxaluria, enteric hyperoxaluria, dietary hyperoxaluria, and idiopathic hyperoxaluria.

[0098] In one embodiment, the non-hyperoxaluria stone formation disease, disorder, or condition is hypercalciuria and/or hypocitraturia.

[0099] In one embodiment, the non-hyperoxaluria stone formation disease, disorder, or condition is calcium oxalate or non-calcium oxalate kidney stone formation disease.

[0100] In one embodiment, the calcium oxalate tissue deposition disease, disorder, or condition is selected from the group consisting of systemic calcium oxalate tissue deposition disease, disorder, or condition or tissue specific calcium oxalate tissue deposition disease, disorder, or condition.

[0101] In one embodiment, the lactate dehydrogenase-associated disease, disorder, or condition is selected from the group consisting of cancer, fatty liver (steatosis), nonalcoholic steatohepatitis (NASH), cirrhosis of the liver, accumulation of fat in the liver, inflammation of the liver, hepatocellular necrosis, liver fibrosis, and nonalcoholic fatty liver disease (NAFLD).

[0102] In one embodiment, the disease, disorder or condition is primary hyperoxaluria 2 (PH2).

[0103] In one embodiment, the method further comprises altering the diet of the subject (e.g., decreasing protein intake, decreasing sodium intake, decreasing ascorbic acid intake, moderating calcium intake, supplementing phosphate, supplementing magnesium, and pyridoxine treatment; and a combination of any of the foregoing).

[0104] In one embodiment, the subject further receives a kidney transplant.

[0105] In one embodiment, the subject is human.

[0106] In one embodiment, the methods further include administering an additional therapeutic to the subject.

[0107] In one embodiment, the RNAi agent is administered to the subject at a dose of about 0.01 mg/kg to about 10 mg/kg or about 0.5 mg/kg to about 50 mg/kg.

[0108] In one embodiment, the agent is administered to the subject subcutaneously.

[0109] In one embodiment, the agent does not substantially inhibit expression and/or activity of lactate dehydrogenase B (LDHB).

### BRIEF DESCRIPTION OF THE DRAWINGS

[0110] FIG. 1A is a schematic of the endogenous pathways for oxalate synthesis.

[0111] FIG. 1B is a schematic of the metabolic pathways associated with LDHA.

[0112] FIG. 2 is a graph showing the level of Ldha mRNA remaining in wild-type C57BL/6J mice at 10 days post-dose of a single 0.1 mg/kg, 0.3 mg/kg, 1.0 mg/kg, 3.0 mg/kg, or 10 mg/kg dose of AD-84788.

[0113] FIG. 3 is a graph showing hepatic LDHA activity in adult male Agxt knockout mice 4 weeks after subcutaneous administration of a single 0.3 mg/kg, 1 mg/kg, 3 mg/kg, or 10 mg/kg dose of AD-84788. Agxt knockout mice administered 0 mg/kg of AD-84788 served as untreated controls.

[0114] FIG. 4 is a schematic of the study protocol described in Example 3 and referred to in FIGS. 6-17B.

[0115] FIG. 5 is a graph showing the amount of urinary oxalate (mg per g of creatinine) excreted by Agxt knockout mice over a twenty-four hour period at weeks 0, 1, 2, 3, 4, 6, 8, 9, and 10 following subcutaneous administration of a single 0.3 mg/kg, 1 mg/kg, 3 mg/kg, or 10 mg/kg dose of AD-84788. Agxt knockout mice administered 0 mg/kg of AD-84788 served as untreated controls.

[0116] FIG. 6 is a graph showing the amount of oxalate (mg per g of creatinine) excreted in the urine of Agxt knockout mice, wild-type mice, and Grhpr (glyoxylate reductase/hydroxypyruvate reductase) knockout mice 4 weeks after a single 10 mg/kg dose of AD-84788.

[0117] FIG. 7 is a graph showing the amount of oxalate (mg per g of creatinine) excreted in the urine of Agxt deficient mice administered the dsRNA agent AD-84788 at Day 0 pre-dose (baseline, i.e., at days −6, −5, −4, and −3); at days 7-10 after a single 10 mg/kg dose of AD-84788; and at days 28-31 following the last administration of four 10/mg/kg doses of AD-84788 on days 0, 11, 18, and 25 (see, FIG. 4).

[0118] FIG. 8A is a graph showing the enzymatic activity of LdhA in wild-type liver homogenates of untreated control mice and mice administered four 10 mg/kg doses of AD-84788 (see, FIG. 4) using lactic acid as a substrate. Absorbance increases as NAD is reduced to NADH via LDH enzymatic activity. The initial linear range was selected, and absorbances at 1 and 6 minutes were utilized in specific activity calculations as Δ_{abs} across a Δₜᵢₘₑ of 5 minutes.

[0119] FIG. 8B is a graph showing the mean specific activity of LdhA in wild-type liver homogenates of untreated control mice and mice administered four 10 mg/kg doses of AD-84788 (see, FIG. 4) using lactic acid as a substrate. Specific activity is expressed as μmol NADH formed/min/g protein. Calculations were performed for all animals individually, and a t-test was conducted comparing all specific activity data from both treatment groups. Mean specific activity of both treatment groups is presented. (p<0.001).

[0120] FIG. 9A is a graph showing the enzymatic activity of LdhA in wild-type liver homogenates of untreated control mice and mice administered four 10 mg/kg doses of AD-84788 (see, FIG. 4) using glyoxylate as a substrate. Absorbance increases as NAD is reduced to NADH via LDH enzymatic activity. The initial linear range was selected, and absorbances at 0 and 4 minutes were utilized in specific activity calculations as Δ_{abs} across a Δₜᵢₘₑ of 4 minutes.

[0121] FIG. 9B is a graph showing the mean specific activity of LdhA in wild-type liver homogenates of untreated control mice and mice administered four 10 mg/kg doses of AD-84788 (see, FIG. 4) using glyoxylate as a substrate. Specific activity is expressed as μmol NADH formed/min/g protein. Calculations were performed for all animals individually, and a t-test was conducted comparing all specific activity data from both treatment groups. Mean specific activity of both treatment groups is presented. (p<0.001).

[0122] FIG. 10A is a graph showing the enzymatic activity of LdhA in Agxt deficient liver homogenates of untreated control mice and mice administered four 10 mg/kg doses of AD-84788 (see, FIG. 4) using lactic acid as a substrate. Absorbance increases as NAD is reduced to NADH via LDH enzymatic activity. The initial linear range was selected, and absorbances at 0 and 4 minutes were utilized in specific activity calculations as Δ_{abs} across a Δₜᵢₘₑ of 4 minutes. SD is too small to be visualized in the mean treated group.

[0123] FIG. 10B is a graph showing the mean specific activity of LdhA in Agxt deficient liver homogenates of untreated control mice and mice administered four 10 mg/kg doses of AD-84788 (see, FIG. 4) using lactic acid as a substrate. Specific activity is expressed as μmol NADH formed/min/g protein. Calculations were performed for all animals individually, and a t-test was conducted comparing all specific activity data from both treatment groups. Mean specific activity of both treatment groups is presented. (p<0.001).

[0124] FIG. 11A is a graph showing the enzymatic activity of LdhA in Agxt deficient liver homogenates of untreated control mice and mice administered four 10 mg/kg doses of AD-84788 (see, FIG. 4) using glyoxylate as a substrate. Absorbance increases as NAD is reduced to NADH via LDH enzymatic activity. The initial linear range was selected, and absorbances at 0 and 4 minutes were utilized in specific activity calculations as Δ_{abs} across a Δₜᵢₘₑ of 4 minutes.

[0125] FIG. 11B is a graph showing the mean specific activity of LdhA in Agxt deficient liver homogenates of untreated control mice and mice administered four 10 mg/kg doses of AD-84788 (see, FIG. 4) using glyoxylate as a substrate. Specific activity is expressed as μmol NADH formed/min/g protein. Calculations were performed for all animals individually, and a t-test was conducted comparing all specific activity data from both treatment groups. Mean specific activity of both treatment groups is presented. (p<0.001).

[0126] FIG. 12A is a graph showing the enzymatic activity of LdhA in wild-type heart homogenates of untreated control mice and mice administered four 10 mg/kg doses of AD-84788 (see, FIG. 4) using lactic acid as a substrate. Absorbance for both the control group and the treatment group increases as NAD is reduced to NADH via LDH enzymatic activity. The initial linear range was selected, and absorbances at 0 and 4 minutes were utilized in specific activity calculations as Δ_{abs} across a Δₜᵢₘₑ of 4 minutes.

[0127] FIG. 12B is a graph showing the mean specific activity of LdhA in wild-type heart homogenates of untreated control mice and mice administered four 10 mg/kg doses of AD-84788 (see, FIG. 4) using lactic acid as a substrate. Specific activity is expressed as μmol NADH formed/min/g protein. Calculations were performed for all animals individually, and a t-test was conducted comparing all specific activity data from both treatment groups. Mean specific activity of both treatment groups is presented. There is no significant difference.

[0128] FIG. 12C is a graph showing the enzymatic activity of LdhA in wild-type thigh muscle homogenates of untreated control mice and mice administered four 10 mg/kg doses of AD-84788 (see, FIG. 4) using lactic acid as a substrate. Absorbance for both the control group and the treatment group increases as NAD is reduced to NADH via LDH enzymatic activity. The initial linear range was selected, and absorbances at 0 and 4 minutes were utilized in specific activity calculations as Δ_{abs} across a Δₜᵢₘₑ of 4 minutes.

[0129] FIG. 12D is a graph showing the mean specific activity of LdhA in wild-type thigh muscle homogenates of untreated control mice and mice administered four 10 mg/kg doses of AD-84788 (see, FIG. 4) using lactic acid as a substrate. Specific activity is expressed as μmol NADH formed/min/g protein. Calculations were performed for all animals individually, and a t-test was conducted comparing all specific activity data from both treatment groups. Mean specific activity of both treatment groups is presented. There is no significant difference.

[0130] FIG. 13A is a graph showing the mean amount of lactate in wild-type liver homogenates of wild-type mice prior to the administration of four 10 mg/kg doses of AD-84788 (baseline) and the mean amount of lactate in wild-type liver homogenates of wild-type mice four weeks after the administration of four 10 mg/kg doses of AD-84788 (see, FIG. 4).

[0131] FIG. 13B is a graph showing the mean amount of pyruvate in wild-type liver homogenates of wild-type mice prior to the administration of four 10 mg/kg doses of AD-84788 (baseline) and the mean amount of pyruvate in wild-type liver homogenates of wild-type mice four weeks after the administration of four 10 mg/kg doses of AD-84788 (see, FIG. 4).

[0132] FIG. 14A is a graph showing the mean amount of lactate in Agxt deficient liver homogenates of Agxt deficient mice prior to the administration of four 10 mg/kg doses of AD-84788 (baseline) and the mean amount of lactate in Agxt deficient liver homogenates of Agxt deficient mice four weeks after the administration of four 10 mg/kg doses of AD-84788 (see, FIG. 4).

[0133] FIG. 14B is a graph showing the mean amount of pyruvate in Agxt deficient liver homogenates of Agxt deficient mice prior to the administration of four 10 mg/kg doses of AD-84788 (baseline) and the mean amount of pyruvate in Agxt deficient liver homogenates of Agxt deficient mice four weeks after the administration of four 10 mg/kg doses of AD-84788 (see, FIG. 4)

[0134] FIG. 15A is a graph showing the mean amount of glyoxylate in wild-type liver homogenates of wild-type mice prior to the administration of four 10 mg/kg doses of AD-84788 (baseline) and the mean amount of glyoxylate in wild-type liver homogenates of wild-type mice four weeks after the administration of four 10 mg/kg doses of AD-84788 (see, FIG. 4).

[0135] FIG. 15B is a graph showing the mean amount of glyoxylate in Agxt deficient liver homogenates of Agxt deficient mice prior to the administration of four 10 mg/kg doses of AD-84788 (baseline) and the mean amount of glyoxylate in Agxt deficient liver homogenates of Agxt deficient mice four weeks after the administration of four 10 mg/kg doses of AD-84788 (see, FIG. 4).

[0136] FIG. 16A is a graph showing the mean body weights of wild-type mice prior to the administration of four 10 mg/kg doses of AD-84788 (baseline) and the mean body weights of wild-type mice four weeks after the administration of four 10 mg/kg doses of AD-84788 (see, FIG. 4).

[0137] FIG. 16B is a graph showing the mean body weights of Agxt deficient mice prior to the administration of four 10 mg/kg doses of AD-84788 (baseline) and the mean body weights of Agxt deficient mice four weeks after the administration of four 10 mg/kg doses of AD-84788 (see, FIG. 4).

[0138] FIG. 17A is is a graph showing the mean plasma lactate levels of wild-type mice prior to the administration of four 10 mg/kg doses of AD-84788 (baseline) and the mean plasma lactate levels of wild-type mice four weeks after the administration of four 10 mg/kg doses of AD-84788 (see, FIG. 4).

[0139] FIG. 17B is is a graph showing the mean plasma lactate levels of Agxt deficient mice prior to the administration of four 10 mg/kg doses of AD-84788 (baseline) and the mean plasma lactate levels of Agxt deficient mice four weeks after the administration of four 10 mg/kg doses of AD-84788 (see, FIG. 4).

[0140] FIGS. 18A-18O depict exemplary dual targeting agents of the invention.

[0141] FIG. 18A depicts an exemplary dual targeting agent of the invention comprising a first dsRNA agent targeting LDHA and a second dsRNA agent targeting HAO1, wherein the first dsRNA agent comprises a first sense strand(S) and a first antisense strand (AS), wherein the second dsRNA agent comprises a second sense strand(S) and a second antisense strand, wherein the 3′end of the first sense strand is covalently attached to the 5′ end of the second sense strand with a nucleotide linker comprising 2′OMe modified nucleotides (uuu), wherein the 3′ end of the second sense strand comprises a GalNAc ligand, and wherein the two 5′-most nucleotides of the first sense strand each independently comprise a phosphorothioate linkage.

[0142] FIG. 18B depicts an exemplary dual targeting agent of the invention comprising a first dsRNA agent targeting LDHA and a second dsRNA agent targeting HAO1, wherein the first dsRNA agent comprises a first sense strand(S) and a first antisense strand (AS), wherein the second dsRNA agent comprises a second sense strand(S) and a second antisense strand (AS), wherein the 3′end of the first sense strand is covalently attached to the 5′ end of the second sense strand with a nucleotide linker comprising 2′Fluoro modified nucleotides (GfAfAf), wherein the 3′ end of the second sense strand comprises a GalNAc ligand, and wherein the two 5′-most nucleotides of the first sense strand, the 3′-most nucleotide of the first sense strand, and the 5′-most nucleotide of the second sense strand each independently comprise a phosphorothioate linkage.

[0143] FIG. 18C depicts an exemplary dual targeting agent of the invention comprising a first dsRNA agent targeting LDHA and a second dsRNA agent targeting HAO1, wherein the first dsRNA agent comprises a first sense strand(S) and a first antisense strand (AS), wherein the second dsRNA agent comprises a second sense strand(S) and a second antisense strand (AS), wherein the 3′end of the first sense strand is covalently attached to the 5′ end of the second sense strand with a nucleotide linker comprising 2′Fluoro modified nucleotides (GfAfUf), wherein the 3′ end of the second sense strand comprises a GalNAc ligand, and wherein the two 5′-most nucleotides of the first sense strand, the 3′-most nucleotide of the first sense strand, and the 5′-most nucleotide of the second sense strand each independently comprise a phosphorothioate linkage.

[0144] FIG. 18D depicts an exemplary dual targeting agent of the invention comprising a first dsRNA agent targeting LDHA and a second dsRNA agent targeting HAO1, wherein the first dsRNA agent comprises a first sense strand(S) and a first antisense strand (AS), wherein the second dsRNA agent comprises a second sense strand(S) and a second antisense strand (AS), wherein the 3′end of the first sense strand is covalently attached to the 5′ end of the second sense strand with a nucleotide linker comprising deoxynucleotides (dgdada), wherein the 3′ end of the second sense strand comprises a GalNAc ligand, and wherein the two S′-most nucleotides of the first sense strand, the 3′-most nucleotide of the first sense strand, and the 5′-most nucleotide of the second sense strand each independently comprise a phosphorothioate linkage.

[0145] FIG. 18E depicts an exemplary dual targeting agent of the invention comprising a first dsRNA agent targeting LDHA and a second dsRNA agent targeting HAO1, wherein the first dsRNA agent comprises a first sense strand(S) and a first antisense strand (AS), wherein the second dsRNA agent comprises a second sense strand(S) and a second antisense strand (AS), wherein the 3′end of the first sense strand is covalently attached to the S′ end of the second sense strand with a nucleotide linker comprising deoxynucleotides (dgda), wherein the 3′ end of the second sense strand comprises a GalNAc ligand, and wherein the two 5′-most nucleotides of the first sense strand, the 3′-most nucleotide of the first sense strand, and the 5′-most nucleotide of the second sense strand each independently comprise a phosphorothioate linkage.

[0146] FIG. 18F depicts an exemplary dual targeting agent of the invention comprising a first dsRNA agent targeting LDHA and a second dsRNA agent targeting HAO1, wherein the first dsRNA agent comprises a first sense strand(S) and a first antisense strand (AS), wherein the second dsRNA agent comprises a second sense strand(S) and a second antisense strand (AS), and the 3′end of the first sense strand is directly attached (no linker) to the 5′ end of the second sense strand, wherein the two 5′-most nucleotides of the first sense strand and the two 3′-most nucleotides of the second sense strand each independently comprise a phosphorothioate linkage, and wherein the 3′ end of the first sense strand comprises a GalNAc ligand.

[0147] FIG. 18G depicts an exemplary dual targeting agent of the invention comprising a first dsRNA agent targeting LDHA and a second dsRNA agent targeting HAO1, wherein the first dsRNA agent comprises a first sense strand(S) and a first antisense strand (AS), wherein the second dsRNA agent comprises a second sense strand(S) and a second antisense strand (AS), wherein the 5′end of the first antisense strand is covalently attached to the 3′ end of the second antisense strand with a nucleotide linker comprising 2′OMe modified nucleotides (acu), wherein the 3′ end of the second sense strand comprises a GalNAc ligand, and wherein the two 3′-most nucleotides of the first antisense strand and the two 5′-most nucleotides of the second antisense strand each independently comprise a phosphorothioate linkage.

[0148] FIG. 18H depicts an exemplary dual targeting agent of the invention comprising a first dsRNA agent targeting LDHA and a second dsRNA agent targeting HAO1, wherein the first dsRNA agent comprises a first sense strand(S) and a first antisense strand (AS), wherein the second dsRNA agent comprises a second sense strand(S) and a second antisense strand (AS), wherein the 5′end of the first antisense strand is covalently attached to the 3′ end of the second antisense strand with a nucleotide linker comprising 2′Flouro modified nucleotides (AfAfGf), wherein the 3′ end of the second sense strand comprises a GalNAc ligand, and wherein the two 3′-most nucleotides of the first antisense strand, the 5′ nucleotide of the first antisense strand, the 3′ nucleotide of the second antisense strand, and the two 5′-most nucleotides of the second antisense strand each independently comprise a phosphorothioate linkage.

[0149] FIG. 18I depicts an exemplary dual targeting agent of the invention comprising a first dsRNA agent targeting LDHA and a second dsRNA agent targeting HAO1, wherein the first dsRNA agent comprises a first sense strand(S) and a first antisense strand (AS), wherein the second dsRNA agent comprises a second sense strand(S) and a second antisense strand (AS), wherein the S′end of the first antisense strand is directly attached (no linker) to the 3′ end of the second antisense strand, wherein the 3′ end of the second sense strand comprises a GalNAc ligand, and wherein the two 3′-most nucleotides of the first antisense strand and the two 5′-most nucleotides of the second antisense strand each independently comprise a phosphorothioate linkage.

[0150] FIG. 18J depicts an exemplary dual targeting agent of the invention comprising a first dsRNA agent targeting LDHA and a second dsRNA agent targeting HAO1, wherein the first dsRNA agent comprises a first sense strand(S) and a first antisense strand (AS), wherein the second dsRNA agent comprises a second sense strand(S) and a second antisense strand (AS), wherein the 3′end of the first sense strand is covalently attached to the 5′ end of the second sense strand with a nucleotide linker comprising 2′OMe modified nucleotides (uuu), wherein the 5′ end of the first sense strand and the 3′ end of the second sense strand each independently comprise a GalNAc ligand, and wherein the S′ nucleotide of the first sense strand comprises a phosphorothioate linkage.

[0151] FIG. 18K depicts an exemplary dual targeting agent of the invention comprising a first dsRNA agent targeting LDHA and a second dsRNA agent targeting HAO1, wherein the first dsRNA agent comprises a first sense strand(S) and a first antisense strand (AS), wherein the second dsRNA agent comprises a second sense strand(S) and a second antisense strand (AS), wherein the 3′end of the first sense strand is covalently attached to the 5′ end of the second sense strand with a nucleotide linker comprising 2′Fluoro modified nucleotides (GfAfAf), wherein the 5′ end of the first sense strand and the 3′ end of the second sense strand each independently comprise a GalNAc ligand, and wherein the 5′ nucleotide of the first sense strand, the 3′ nucleotide of the first sense strand, and the 5′ nucleotide of the second sense strand each independently comprise a phosphorothioate linkage.

[0152] FIG. 18L depicts an exemplary dual targeting agent of the invention comprising a first dsRNA agent targeting LDHA and a second dsRNA agent targeting HAO1, wherein the first dsRNA agent comprises a first sense strand(S) and a first antisense strand (AS), wherein the second dsRNA agent comprises a second sense strand(S) and a second antisense strand (AS), wherein the 3′end of the first sense strand is directly attached (no linker) to the S′ end of the second sense strand, wherein the 3′ end of the first sense strand and the 3′ end of the second sense strand each independently comprise a GalNAc ligand, and wherein the two 5′-most nucleotides of the first sense strand each independently comprise a phosphorothioate linkage.

[0153] FIG. 18M depicts an exemplary dual targeting agent of the invention comprising a first dsRNA agent targeting LDHA and a second dsRNA agent targeting HAO1, wherein the first dsRNA agent comprises a first sense strand(S) and a first antisense strand (AS), wherein the second dsRNA agent comprises a second sense strand(S) and a second antisense strand (AS), wherein the 5′end of the first antisense strand is covalently attached to the 3′ end of the second antisense strand with a nucleotide linker comprising 2′-O-Me modified nucleotides (acu), wherein the 3′ end of the first antisense strand and the 3′ end of the second sense strand each independently comprise a GalNAc ligand, and wherein the two most 5′ nucleotides of the second antisense strand each independently comprise a phosphorothioate linkage.

[0154] FIG. 18N depicts an exemplary dual targeting agent of the invention comprising a first dsRNA agent targeting LDHA and a second dsRNA agent targeting HAO1, wherein the first dsRNA agent comprises a first sense strand(S) and a first antisense strand (AS), wherein the second dsRNA agent comprises a second sense strand(S) and a second antisense strand (AS), wherein the S′end of the first antisense strand is covalently attached to the 3′ end of the second antisense strand with a nucleotide linker comprising 2′Fluoro modified nucleotides (AfAfGf), wherein the 3′ end of the first antisense strand and the 3′ end of the second sense strand each independently comprise a GalNAc ligand, and wherein the 5′ nucleotide of the first antisense strand, the 3′ nucleotide of the second antisense strand, and the two 5′-most nucleotides of the second antisense strand each independently comprise a phosphorothioate linkage.

[0155] FIG. 18O depicts an exemplary dual targeting agent of the invention comprising a first dsRNA agent targeting LDHA and a second dsRNA agent targeting HAO1, wherein the first dsRNA agent comprises a first sense strand(S) and a first antisense strand (AS), wherein the second dsRNA agent comprises a second sense strand(S) and a second antisense strand (AS), wherein the 5′end of the first antisense strand is directly attached (no linker) to the 3′ end of the second antisense strand, wherein the 3′ end of the first antisense strand and the 3′ end of the second sense strand each independently comprise a GalNAc ligand, and wherein the two most 5′ nucleotides of the second antisense strand each independently comprise a phosphorothioate linkage.

### DETAILED DESCRIPTION OF THE INVENTION

[0156] The present invention provides iRNA compositions, which effect the RNA-induced silencing complex (RISC)-mediated cleavage of RNA transcripts of an LDHA gene. The LDHA gene may be within a cell, e.g., a cell within a subject, such as a human. The present invention also provides methods of using the iRNA compositions of the invention for inhibiting the expression of an LDHA gene, and for treating a subject who would benefit from inhibiting or reducing the expression of an LDHA gene, e.g., a subject that would benefit from a reduction or inhibition in urinary oxalate production, e.g., a subject suffering or prone to suffering from an oxalate pathway-associated disease disorder, or condition, such as a subject suffering or prone to suffering from an oxalate-associated disease, disorder, or condition, e.g., a kidney stone formation disease, disorder, or condition or a calcium oxalate tissue deposition disease, disorder, or condition; or an LDH-associated disease, disorder, or condition.

[0157] The present invention also provides methods of using the iRNA compositions of the invention for inhibiting the expression of an LDHA gene and an HAO1 gene for treating a subject who would benefit from inhibiting or reducing the expression of an LDHA gene and an HAO1 gene, e.g., a subject that would benefit from a reduction or inhibition in urinary oxalate production, e.g., a subject suffering or prone to suffering from an oxalate pathway-associated disease disorder, or condition, such as a subject suffering or prone to suffering from an oxalate-associated disease, disorder, or condition, e.g., a kidney stone formation disease, disorder, or condition or a calcium oxalate tissue deposition disease, disorder, or condition; or an LDH-associated disease, disorder, or condition.

[0158] The iRNAs of the invention targeting LDHA may include an RNA strand (the antisense strand) having a region which is about 30 nucleotides or less in length, e.g., 15-30, 15-29, 15-28, 15-27, 15-26, 15-25, 15-24, 15-23, 15-22, 15-21, 15-20, 15-19, 15-18, 15-17, 18-30, 18-29, 18-28, 18-27, 18-26, 18-25, 18-24, 18-23, 18-22, 18-21, 18-20, 19-30, 19-29, 19-28, 19-27, 19-26, 19-25, 19-24, 19-23, 19-22, 19-21, 19-20, 20-30, 20-29, 20-28, 20-27, 20-26, 20-25, 20-24, 20-23, 20-22, 20-21, 21-30, 21-29, 21-28, 21-27, 21-26, 21-25, 21-24, 21-23, or 21-22 nucleotides in length, which region is substantially complementary to at least part of an mRNA transcript of an LDHA gene.

[0159] The iRNAs of the invention targeting HAO1 may include an RNA strand (the antisense strand) having a region which is about 30 nucleotides or less in length, e.g., 15-30, 15-29, 15-28, 15-27, 15-26, 15-25, 15-24, 15-23, 15-22, 15-21, 15-20, 15-19, 15-18, 15-17, 18-30, 18-29, 18-28, 18-27, 18-26, 18-25, 18-24, 18-23, 18-22, 18-21, 18-20, 19-30, 19-29, 19-28, 19-27, 19-26, 19-25, 19-24, 19-23, 19-22, 19-21, 19-20, 20-30, 20-29, 20-28, 20-27, 20-26, 20-25, 20-24, 20-23, 20-22, 20-21, 21-30, 21-29, 21-28, 21-27, 21-26, 21-25, 21-24, 21-23, or 21-22 nucleotides in length, which region is substantially complementary to at least part of an mRNA transcript of an HAO1 gene.

[0160] When the RNAi agent is a dual targeting RNAi agent, as described herein, the agent targeting LDHA may include an antisense strand comprising a region of complementarity to LDHA which is the same length or a different length from the region of complementarity of the antisense strand of the agent targeting HAO1.

[0161] In some embodiments, one or both of the strands of the double stranded RNAi agents of the invention is up to 66 nucleotides in length, e.g., 36-66, 26-36, 25-36, 31-60, 22-43, 27-53 nucleotides in length, with a region of at least 19 contiguous nucleotides that is substantially complementary to at least a part of an mRNA transcript of an LDHA gene. In some embodiments, such iRNA agents having longer length antisense strands may include a second RNA strand (the sense strand) of 20-60 nucleotides in length wherein the sense and antisense strands form a duplex of 18-30 contiguous nucleotides.

[0162] In other embodiments, one or both of the strands of the double stranded RNAi agents of the invention is up to 66 nucleotides in length, e.g., 36-66, 26-36, 25-36, 31-60, 22-43, 27-53 nucleotides in length, with a region of at least 19 contiguous nucleotides that is substantially complementary to at least a part of an mRNA transcript of an HAO1 gene. In some embodiments, such iRNA agents having longer length antisense strands may include a second RNA strand (the sense strand) of 20-60 nucleotides in length wherein the sense and antisense strands form a duplex of 18-30 contiguous nucleotides.

[0163] In embodiments in which a first dsRNA agent targeting LDHA and a second dsRNA agent targeting HAO1 are covalently attached, the duplex lengths of the first agent and the second agent may be the same or different.

[0164] The use of these iRNA agents described herein enables the targeted degradation of mRNAs of an LDHA gene in mammals or the targeted degradation of an LDHA gene and an HAO1 gene in mammals.

[0165] Very low dosages of the iRNAs, in particular, can specifically and efficiently mediate RNA interference (RNAi), resulting in significant inhibition of expression of an LDHA gene or an LDHA gene and an HAO1 gene. Using cell-based and in vivo assays, the present inventors have demonstrated that iRNAs targeting LDHA can mediate RNAi, resulting in significant inhibition of expression of an LDHA gene and significant inhibition of oxalate production.

[0166] Thus, methods and compositions including these iRNAs are useful for treating a subject who would benefit by a reduction or inhibition in LDHA expression or LDHA expression and HAO1 expression, e.g., a subject suffering or prone to suffering from an oxalate pathway-associated disease, disorder, or condition.

[0167] The following detailed description discloses how to make and use compositions containing iRNAs to inhibit the expression of an LDHA gene, an HAO1 gene, and both an LDHA gene and an HAO1 gene, as well as compositions and methods for treating subjects having diseases and disorders that would benefit from inhibition and/or reduction of the expression of these genes.

### I. Definitions

[0168] In order that the present invention may be more readily understood, certain terms are first defined. In addition, it should be noted that whenever a value or range of values of a parameter are recited, it is intended that values and ranges intermediate to the recited values are also intended to be part of this invention.

[0169] The articles “a” and “an” are used herein to refer to one or to more than one (i.e., to at least one) of the grammatical object of the article. By way of example, “an element” means one element or more than one element, e.g., a plurality of elements.

[0170] The term “including” is used herein to mean, and is used interchangeably with, the phrase “including but not limited to”. The term “or” is used herein to mean, and is used interchangeably with, the term “and/or,” unless context clearly indicates otherwise.

[0171] The term “LDHA” (used interchangeable herein with the term “Ldha”), also known as Cell Proliferation-Inducing Gene 19 Protein, Renal Carcinoma Antigen NY-REN-59, LDH Muscle Subunit, EC 1.1.1.27 4 61, LDH-A, LDH-M,Epididymis Secretory Sperm Binding Protein Li 133P, L-Lactate Dehydrogenase A Chain, Proliferation-Inducing Gene 19, Lactate Dehydrogenase M, HEL-S-133P, EC 1.1.1, GSD11, PIG19, and LDHM, refers to the well known gene encoding a lactate dehydrogenase A from any vertebrate or mammalian source, including, but not limited to, human, bovine, chicken, rodent, mouse, rat, porcine, ovine, primate, monkey, and guinea pig, unless specified otherwise.

[0172] The term also refers to fragments and variants of native LDHA that maintain at least one in vivo or in vitro activity of a native LDHA. The term encompasses full-length unprocessed precursor forms of LDHA as well as mature forms resulting from post-translational cleavage of the signal peptide and forms resulting from proteolytic processing.

[0173] The sequence of a human LDHA mRNA transcript can be found at, for example, GenBank Accession No. GI: 207028493 (NM_001135239.1; SEQ ID NO:1), GenBank Accession No. GI: 260099722 (NM_001165414.1; SEQ ID NO:3), GenBank Accession No. GI: 260099724 (NM_001165415.1; SEQ ID NO:5), GenBank Accession No. GI: 260099726 (NM_001165416.1; SEQ ID NO:7), GenBank Accession No. GI: 207028465 (NM_005566.3; SEQ ID NO:9); the sequence of a mouse LDHA mRNA transcript can be found at, for example, GenBank Accession No. GI: 257743038 (NM_001136069.2; SEQ ID NO:11), GenBank Accession No. GI: 257743036 (NM_010699.2; SEQ ID NO: 13); the sequence of a rat LDHA mRNA transcript can be found at, for example, GenBank Accession No. GI: 8393705 (NM_017025.1; SEQ ID NO: 15); and the sequence of a monkey LDHA mRNA transcript can be found at, for example, GenBank Accession No. GI: 402766306 (NM_001257735.2; SEQ ID NO: 17), GenBank Accession No. GI: 545687102 (NM_001283551.1; SEQ ID NO:19).

[0174] Additional examples of LDHA mRNA sequences are readily available using publicly available databases, e.g., GenBank, UniProt, and OMIM.

[0175] The term “LDHA” as used herein also refers to a particular polypeptide expressed in a cell by naturally occurring DNA sequence variations of the LDHA gene, such as a single nucleotide polymorphism in the LDHA gene. Numerous SNPs within the LDHA gene have been identified and may be found at, for example, NCBI dbSNP (see, e.g., www.ncbi.nlm.nih.gov/snp).

[0176] As used herein, the term “HAO1” refers to the well known gene encoding the enzyme hydroxyacid oxidase 1 from any vertebrate or mammalian source, including, but not limited to, human, bovine, chicken, rodent, mouse, rat, porcine, ovine, primate, monkey, and guinea pig, unless specified otherwise. Other gene names include GO, GOX, GOX1, HAO, and HAOX1. The protein is also known as glycolate oxidase and(S)-2-hydroxy-acid oxidase.

[0177] The term also refers to fragments and variants of native HAO1 that maintain at least one in vivo or in vitro activity of a native HAO1. The term encompasses full-length unprocessed precursor forms of HAO1 as well as mature forms resulting from post-translational cleavage of the signal peptide and forms resulting from proteolytic processing. The sequence of a human HAO1 mRNA transcript can be found at, for example, GenBank Accession No. GI: 11184232 (NM_017545.2; SEQ ID NO:21); the sequence of a monkey HAO1 mRNA transcript can be found at, for example, GenBank Accession No. GI: 544464345 (XM_005568381.1; SEQ I DNO: 23); the sequence of a mouse HAO1 mRNA transcript can be found at, for example, GenBank Accession No. GI: 133893166 (NM_010403.2; SEQ ID NO:25); and the sequence of a rat HAO1 mRNA transcript can be found at, for example, GenBank Accession No. GI: 166157785 (NM_001107780.2; SEQ ID NO:27).

[0178] The term “HAO1,” as used herein, also refers to naturally occurring DNA sequence variations of the HAO1 gene, such as a single nucleotide polymorphism (SNP) in the HAO1 gene. Exemplary SNPs may be found in the NCBI dbSNP Short Genetic Variations database available at www nebi.nlm.nih.gov/projects/SNP

[0179] As used herein, “target sequence” refers to a contiguous portion of the nucleotide sequence of an mRNA molecule formed during the transcription of an LDHA gene or an HAO1 gene, including mRNA that is a product of RNA processing of a primary transcription product.

[0180] In one embodiment, the target portion of the sequence will be at least long enough to serve as a substrate for iRNA-directed cleavage at or near that portion of the nucleotide sequence of an mRNA molecule formed during the transcription of an LDHA gene. In another embodiment, the target portion of the sequence will be at least long enough to serve as a substrate for iRNA-directed cleavage at or near that portion of the nucleotide sequence of an mRNA molecule formed during the transcription of an HAO1 gene.

[0181] The target sequence of an LDHA gene may be from about 9-36 nucleotides in length, e.g., about 15-30 nucleotides in length. For example, the target sequence can be from about 15-30 nucleotides, 15-29, 15-28, 15-27, 15-26, 15-25, 15-24, 15-23, 15-22, 15-21, 15-20, 15-19, 15-18, 15-17, 18-30, 18-29, 18-28, 18-27, 18-26, 18-25, 18-24, 18-23, 18-22, 18-21, 18-20, 19-30, 19-29, 19-28, 19-27, 19-26, 19-25, 19-24, 19-23, 19-22, 19-21, 19-20, 20-30, 20-29, 20-28, 20-27, 20-26, 20-25, 20-24, 20-23, 20-22, 20-21, 21-30, 21-29, 21-28, 21-27, 21-26, 21-25, 21-24, 21-23, or 21-22 nucleotides in length. Ranges and lengths intermediate to the above recited ranges and lengths are also contemplated to be part of the invention.

[0182] The target sequence of an HAO1 gene may be from about 9-36 nucleotides in length, e.g., about 15-30 nucleotides in length. For example, the target sequence can be from about 15-30 nucleotides, 15-29, 15-28, 15-27, 15-26, 15-25, 15-24, 15-23, 15-22, 15-21, 15-20, 15-19, 15-18, 15-17, 18-30, 18-29, 18-28, 18-27, 18-26, 18-25, 18-24, 18-23, 18-22, 18-21, 18-20, 19-30, 19-29, 19-28, 19-27, 19-26, 19-25, 19-24, 19-23, 19-22, 19-21, 19-20, 20-30, 20-29, 20-28, 20-27, 20-26, 20-25, 20-24, 20-23, 20-22, 20-21, 21-30, 21-29, 21-28, 21-27, 21-26, 21-25, 21-24, 21-23, or 21-22 nucleotides in length. Ranges and lengths intermediate to the above recited ranges and lengths are also contemplated to be part of the invention.

[0183] In aspects in which a first dsRNA agent targeting LDHA and a second dsRNA agent targeting HAO1 are covalently attached (i.e., a dual targeting RNAi agent), the length of the LDHA target sequence may be the same as the HAO1 target sequence or different.

[0184] As used herein, the term “strand comprising a sequence” refers to an oligonucleotide comprising a chain of nucleotides that is described by the sequence referred to using the standard nucleotide nomenclature.

[0185] “G,” “C,” “A,” “T” and “U” each generally stand for a nucleotide that contains guanine, cytosine, adenine, thymidine and uracil as a base, respectively. However, it will be understood that the term “ribonucleotide” or “nucleotide” can also refer to a modified nucleotide, as further detailed below, or a surrogate replacement moiety (see, e.g., Table 1). The skilled person is well aware that guanine, cytosine, adenine, and uracil can be replaced by other moieties without substantially altering the base pairing properties of an oligonucleotide comprising a nucleotide bearing such replacement moiety. For example, without limitation, a nucleotide comprising inosine as its base can base pair with nucleotides containing adenine, cytosine, or uracil. Hence, nucleotides containing uracil, guanine, or adenine can be replaced in the nucleotide sequences of dsRNA featured in the invention by a nucleotide containing, for example, inosine. In another example, adenine and cytosine anywhere in the oligonucleotide can be replaced with guanine and uracil, respectively to form G-U Wobble base pairing with the target mRNA. Sequences containing such replacement moieties are suitable for the compositions and methods featured in the invention.

[0186] The terms “IRNA”, “RNAi agent,” “iRNA agent,”, “RNA interference agent” as used interchangeably herein, refer to an agent that contains RNA as that term is defined herein, and which mediates the targeted cleavage of an RNA transcript via an RNA-induced silencing complex (RISC) pathway. iRNA directs the sequence-specific degradation of mRNA through a process known as RNA interference (RNAi). The iRNA modulates, e.g., inhibits, the expression of LDHA and/or HAO1 gene in a cell, e.g., a cell within a subject, such as a mammalian subject.

[0187] In one embodiment, an RNAi agent of the invention includes a single stranded RNA that interacts with a target RNA sequence, e.g., an LDHA target mRNA sequence and/or an HAO1 target mRNA sequence, to direct the cleavage of the target RNA. Without wishing to be bound by theory it is believed that long double stranded RNA introduced into cells is broken down into siRNA by a Type III endonuclease known as Dicer (Sharp et al. (2001) Genes Dev. 15:485). Dicer, a ribonuclease-III-like enzyme, processes the dsRNA into 19-23 base pair short interfering RNAs with characteristic two base 3′ overhangs (Bernstein, et al., (2001) Nature 409:363). The siRNAs are then incorporated into an RNA-induced silencing complex (RISC) where one or more helicases unwind the siRNA duplex, enabling the complementary antisense strand to guide target recognition (Nykanen, et al., (2001) Cell 107:309). Upon binding to the appropriate target mRNA, one or more endonucleases within the RISC cleave the target to induce silencing (Elbashir, et al., (2001) Genes Dev. 15:188). Thus, in one aspect the invention relates to a single stranded RNA (sssiRNA) generated within a cell and which promotes the formation of a RISC complex to effect silencing of the target gene, i.e., an LDHA gene and/or an HAO1 gene. Accordingly, the term “siRNA” is also used herein to refer to an RNAi as described above.

[0188] In another embodiment, the RNAi agent may be a single-stranded RNAi agent that is introduced into a cell or organism to inhibit a target mRNA. Single-stranded RNAi agents (ssRNAi) bind to the RISC endonuclease, Argonaute 2, which then cleaves the target mRNA. The single-stranded siRNAs are generally 15-30 nucleotides and are chemically modified. The design and testing of single-stranded RNAi agents are described in U.S. Pat. No. 8,101,348 and in Lima et al., (2012) Cell 150:883-894, the entire contents of each of which are hereby incorporated herein by reference. Any of the antisense nucleotide sequences described herein may be used as a single-stranded siRNA as described herein or as chemically modified by the methods described in Lima et al., (2012) Cell 150; 883-894.

[0189] In another embodiment, an “iRNA” for use in the compositions and methods of the invention is a double-stranded RNA and is referred to herein as a “double stranded RNAi agent,” “double-stranded RNA (dsRNA) molecule,” “dsRNA agent,” or “dsRNA”. The term “dsRNA”, refers to a complex of ribonucleic acid molecules, having a duplex structure comprising two anti-parallel and substantially complementary nucleic acid strands, referred to as having “sense” and “antisense” orientations with respect to a target RNA, i.e., an LDHA gene and/or an HAO1 gene. In some embodiments of the invention, a double-stranded RNA (dsRNA) triggers the degradation of a target RNA, e.g., an mRNA, through a post-transcriptional gene-silencing mechanism referred to herein as RNA interference or RNAi.

[0190] In yet another embodiment, an “iRNA” for use in the compositions and methods of the invention is a “dual targeting RNAi agent.” The term “dual targeting RNAi agent” refers to a molecule comprising a first dsRNA agent comprising a complex of ribonucleic acid molecules, having a duplex structure comprising two anti-parallel and substantially complementary nucleic acid strands, referred to as having “sense” and “antisense” orientations with respect to a first target RNA, i.e., an LDHA gene, covalently attached to a molecule comprising a second dsRNA agent comprising a complex of ribonucleic acid molecules, having a duplex structure comprising two anti-parallel and substantially complementary nucleic acid strands, referred to as having “sense” and “antisense” orientations with respect to a second target RNA, i.e., an HAO1 gene. In some embodiments of the invention, a dual targeting RNAi agent triggers the degradation of the first and the second target RNAs, e.g., mRNAs, through a post-transcriptional gene-silencing mechanism referred to herein as RNA interference or RNAi.

[0191] In general, the majority of nucleotides of each strand of a dsRNA molecule are ribonucleotides, but as described in detail herein, each or both strands can also include one or more non-ribonucleotides, e.g., a deoxyribonucleotide and/or a modified nucleotide. In addition, as used in this specification, an “RNAi agent” may include ribonucleotides with chemical modifications; an RNAi agent may include substantial modifications at multiple nucleotides. As used herein, the term “modified nucleotide” refers to a nucleotide having, independently, a modified sugar moiety, a modified internucleotide linkage, and/or a modified nucleobase. Thus, the term modified nucleotide encompasses substitutions, additions or removal of, e.g., a functional group or atom, to internucleoside linkages, sugar moieties, or nucleobases. The modifications suitable for use in the agents of the invention include all types of modifications disclosed herein or known in the art. Any such modifications, as used in a siRNA type molecule, are encompassed by “RNAi agent” for the purposes of this specification and claims.

[0192] The duplex region may be of any length that permits specific degradation of a desired target RNA through a RISC pathway, and may range from about 9 to 36 base pairs in length, e.g., about 15-30 base pairs in length, for example, about 9, 10, 11, 12, 13, 14, 15, 16, 17, 18, 19, 20, 21, 22, 23, 24, 25, 26, 27, 28, 29, 30, 31, 32, 33, 34, 35, or 36 base pairs in length, such as about 15-30, 15-29, 15-28, 15-27, 15-26, 15-25, 15-24, 15-23, 15-22, 15-21, 15-20, 15-19, 15-18, 15-17, 18-30, 18-29, 18-28, 18-27, 18-26, 18-25, 18-24, 18-23, 18-22, 18-21, 18-20, 19-30, 19-29, 19-28, 19-27, 19-26, 19-25, 19-24, 19-23, 19-22, 19-21, 19-20, 20-30, 20-29, 20-28, 20-27, 20-26, 20-25, 20-24, 20-23, 20-22, 20-21, 21-30, 21-29, 21-28, 21-27, 21-26, 21-25, 21-24, 21-23, or 21-22 base pairs in length. Ranges and lengths intermediate to the above recited ranges and lengths are also contemplated to be part of the invention.

[0193] In embodiments in which a first dsRNA agent targeting LDHA and a second dsRNA agent targeting HAO1 are covalently attached (i.e., a dual targeting RNAi agent), the length of the duplex region of the first agent and the second agent may be the same or different.

[0194] The two strands forming the duplex structure may be different portions of one larger RNA molecule, or they may be separate RNA molecules. Where the two strands are part of one larger molecule, and therefore are connected by an uninterrupted chain of nucleotides between the 3′-end of one strand and the 5′-end of the respective other strand forming the duplex structure, the connecting RNA chain is referred to as a “hairpin loop.” A hairpin loop can comprise at least one unpaired nucleotide. In some embodiments, the hairpin loop can comprise at least 2, at least 3, at least 4, at least 5, at least 6, at least 7, at least 8, at least 9, at least 10, at least 20, at least 23 or more unpaired nucleotides.

[0195] In embodiments in which a first dsRNA agent targeting LDHA and a second dsRNA agent targeting HAO1 are covalently attached (i.e., a dual targeting RNAi agent), the first dsRNA agent may comprise a harpin loop, the second dsRNA agent may comprise a hairpin loop, or both the first and the second dsRNA agents may independently comprise a hairpin loop. In addition, in embodiments in which a first dsRNA agent targeting LDHA and a second dsRNA agent targeting HAO1 are covalently attached (i.e., a dual targeting RNAi agent), the first dsRNA agent may comprise unpaired nucleotides, the second dsRNA agent may comprise unpaired nucleotides, or both the first and the second dsRNA agents may independently comprise unpaired nucleotides. When both the first and the second dsRNA agents independently comprise unpaired nucleotides, the first dsRNA agent and the second dsRNA agent may comprise the same or a different number of unpaired nucleotides.

[0196] Where the two substantially complementary strands of a dsRNA are comprised by separate RNA molecules, those molecules need not, but can be covalently connected. Where the two strands are connected covalently by means other than an uninterrupted chain of nucleotides between the 3′-end of one strand and the 5′-end of the respective other strand forming the duplex structure, the connecting structure is referred to as a “linker.” The RNA strands may have the same or a different number of nucleotides. The maximum number of base pairs is the number of nucleotides in the shortest strand of the dsRNA minus any overhangs that are present in the duplex. In addition to the duplex structure, an RNAi may comprise one or more nucleotide overhangs.

[0197] In one embodiment, an RNAi agent of the invention is a dsRNA, each strand of which comprises 19-23 nucleotides, that interacts with a target RNA sequence, e.g., an LDHA target mRNA sequence, to direct the cleavage of the target RNA. In another embodiment, an RNAi agent of the invention is a dsRNA, each strand of which comprises 19-23 nucleotides, that interacts with a target RNA sequence, e.g., an HAO1 target mRNA sequence, to direct the cleavage of the target RNA. In yet other embodiments an RNAi agent of the invention comprises a first dsRNA agent, each strand of which comprises 19-23 nucleotides, that interacts with a target RNA sequence, e.g., an LDHA target mRNA sequence, to direct the cleavage of the target RNA, and a second dsRNA agent, each strand of which independently comprises 19-23 nucleotides, that interacts with a target RNA sequence, e.g., an HAO1 target mRNA sequence, to direct the cleavage of the target RNA, wherein the first and second dsRNA agents are covalently attached.

[0198] In embodiments in which a first dsRNA agent targeting LDHA and a second dsRNA agent targeting HAO1 are covalently attached (i.e., a dual targeting RNAi agent), the two strands of the first dsRNA agent may be connected covalently by means other than an uninterrupted chain of nucleotides between the 3′-end of one strand and the 5′-end of the respective other strand forming the duplex structure, the two strands of the second dsRNA agent may be connected covalently by means other than an uninterrupted chain of nucleotides between the 3′-end of one strand and the 5′-end of the respective other strand forming the duplex structure, or the two strands of the first dsRNA agent and the two strands of the second dsRNA agent may independently be connected covalently by means other than an uninterrupted chain of nucleotides between the 3′-end of one strand and the 5′-end of the respective other strand forming the duplex structure.

[0199] As used herein, the term “nucleotide overhang” refers to at least one unpaired nucleotide that protrudes from the duplex structure of an iRNA, e.g., a dsRNA. For example, when a 3′-end of one strand of a dsRNA extends beyond the 5′-end of the other strand, or vice versa, there is a nucleotide overhang. A dsRNA can comprise an overhang of at least one nucleotide; alternatively the overhang can comprise at least two nucleotides, at least three nucleotides, at least four nucleotides, at least five nucleotides or more. A nucleotide overhang can comprise or consist of a nucleotide/nucleoside analog, including a deoxynucleotide/nucleoside. The overhang(s) can be on the sense strand, the antisense strand or any combination thereof. Furthermore, the nucleotide(s) of an overhang can be present on the 5′-end, 3′-end or both ends of either an antisense or sense strand of a dsRNA.

[0200] In embodiments in which a first dsRNA agent targeting LDHA and a second dsRNA agent targeting HAO1 are covalently attached (i.e., a dual targeting RNAi agent), the first agent may comprise a nucleotide overhang, the second agent may comprise a nucleotide overhang, or both the first and the second agent may independently comprise a nucleotide overhang, e.g., the 5′ end of the sense strand of the first agent may comprise an overhang, the 3′ end of the sense strand of the first agent may comprise an overhang, the 5′ end of the antisense strand of the first agent may comprise an overhang, the 3′ end of the antisense strand of the first agent may comprise an overhang, the 5′ end and the 3′ end of the sense stand of the first agent may comprise an overhang, the 5′ end and the 3′ end of the antisense stand of the first agent may comprise an overhang, the 5′ end of the sense strand of the second agent may comprise an overhang, the 3′ end of the sense strand of the second agent may comprise an overhang, the 5′ end of the antisense strand of the second agent may comprise an overhang, the 3′ end of the antisense strand of the second agent may comprise an overhang, the 5′ end and the 3′ end of the sense stand of the second agent may comprise an overhang, the 5′ end and the 3′ end of the antisense stand of the second agent may comprise an overhang, or any combination of the foregoing.

[0201] In embodiments in which a first dsRNA agent targeting LDHA and a second dsRNA agent targeting HAO1 are covalently attached (i.e., a dual targeting RNAi agent), the length of an overhang of the first agent and the second agent may be the same or different.

[0202] In one embodiment, the antisense strand of a dsRNA has a 1-10 nucleotide, e.g., a 1, 2, 3, 4, 5, 6, 7, 8, 9, or 10 nucleotide, overhang at the 3′-end and/or the 5′-end. In one embodiment, the sense strand of a dsRNA has a 1-10 nucleotide, e.g., a 1, 2, 3, 4, 5, 6, 7, 8, 9, or 10 nucleotide, overhang at the 3′-end and/or the 5′-end. In another embodiment, one or more of the nucleotides in the overhang is replaced with a nucleoside thiophosphate.

[0203] In certain embodiments, the overhang on the sense strand or the antisense strand, or both, can include extended lengths longer than 10 nucleotides, e.g., 10-30 nucleotides, 10-25 nucleotides, 10-20 nucleotides or 10-15 nucleotides in length. In certain embodiments, an extended overhang is on the sense strand of the duplex. In certain embodiments, an extended overhang is present on the 3′end of the sense strand of the duplex. In certain embodiments, an extended overhang is present on the 5′end of the sense strand of the duplex. In certain embodiments, an extended overhang is on the antisense strand of the duplex. In certain embodiments, an extended overhang is present on the 3′end of the antisense strand of the duplex. In certain embodiments, an extended overhang is present on the 5′end of the antisense strand of the duplex. In certain embodiments, one or more of the nucleotides in the extended overhang is replaced with a nucleoside thiophosphate.

[0204] In embodiments in which a first dsRNA agent targeting LDHA and a second dsRNA agent targeting HAO1 are covalently attached (i.e., a dual targeting RNAi agent), and one and/or both strands of both the first and the second dsRNA agent independently comprise an overhang, e.g., an extended overhang, the length of the overhang may be the same or different, and/or, in some embodiments, one or more of the nucleotides in the overhang in the first dsRNA agent and one or more nucleotides in the overhang of the second dsRNA agent may be independently replaced with a nucleoside thiophosphate.

[0205] The terms “blunt” or “blunt ended” as used herein in reference to a dsRNA mean that there are no unpaired nucleotides or nucleotide analogs at a given terminal end of a dsRNA, i.e., no nucleotide overhang. One or both ends of a dsRNA can be blunt. Where both ends of a dsRNA are blunt, the dsRNA is said to be blunt ended. To be clear, a “blunt ended” dsRNA is a dsRNA that is blunt at both ends, i.e., no nucleotide overhang at either end of the molecule. Most often such a molecule will be double-stranded over its entire length.

[0206] In embodiments in which a first dsRNA agent targeting LDHA and a second dsRNA agent targeting HAO1 are covalently attached (i.e., a dual targeting RNAi agent), one or both of the dsRNA agents may independently comprise a blunt end.

[0207] The term “antisense strand” or “guide strand” refers to the strand of an iRNA, e.g., a dsRNA, which includes a region that is substantially complementary to a target sequence, e.g., an LDHA mRNA or an HAO1 mRNA.

[0208] As used herein, the term “region of complementarity” refers to the region on the antisense strand that is substantially complementary to a sequence, for example a target sequence, e.g., an LDHA nucleotide sequence or an HAO1 nucleotide sequence, as defined herein. Where the region of complementarity is not fully complementary to the target sequence, the mismatches can be in the internal or terminal regions of the molecule. Generally, the most tolerated mismatches are in the terminal regions, e.g., within 5, 4, 3, or 2 nucleotides of the 5′- and/or 3′-terminus of the iRNA.

[0209] In embodiments in which a first dsRNA agent targeting LDHA and a second dsRNA agent targeting HAO1 are covalently attached (i.e., a dual targeting RNAi agent), one or both of the dsRNA agents may independently comprise a mismatch.

[0210] The term “sense strand” or “passenger strand” as used herein, refers to the strand of an iRNA that includes a region that is substantially complementary to a region of the antisense strand as that term is defined herein.

[0211] As used herein, the term “cleavage region” refers to a region that is located immediately adjacent to the cleavage site. The cleavage site is the site on the target at which cleavage occurs. In some embodiments, the cleavage region comprises three bases on either end of, and immediately adjacent to, the cleavage site. In some embodiments, the cleavage region comprises two bases on either end of, and immediately adjacent to, the cleavage site. In some embodiments, the cleavage site specifically occurs at the site bound by nucleotides 10 and 11 of the antisense strand, and the cleavage region comprises nucleotides 11, 12 and 13.

[0212] As used herein, and unless otherwise indicated, the term “complementary,” when used to describe a first nucleotide sequence in relation to a second nucleotide sequence, refers to the ability of an oligonucleotide or polynucleotide comprising the first nucleotide sequence to hybridize and form a duplex structure under certain conditions with an oligonucleotide or polynucleotide comprising the second nucleotide sequence, as will be understood by the skilled person. Such conditions can, for example, be stringent conditions, where stringent conditions can include: 400 mM NaCl, 40 mM PIPES pH 6.4, 1 mM EDTA, 50° C. or 70° C. for 12-16 hours followed by washing (see, e.g., “Molecular Cloning: A Laboratory Manual, Sambrook, et al. (1989) Cold Spring Harbor Laboratory Press). Other conditions, such as physiologically relevant conditions as can be encountered inside an organism, can apply. The skilled person will be able to determine the set of conditions most appropriate for a test of complementarity of two sequences in accordance with the ultimate application of the hybridized nucleotides.

[0213] Complementary sequences within an iRNA, e.g., within a dsRNA as described herein, include base-pairing of the oligonucleotide or polynucleotide comprising a first nucleotide sequence to an oligonucleotide or polynucleotide comprising a second nucleotide sequence over the entire length of one or both nucleotide sequences. Such sequences can be referred to as “fully complementary” with respect to each other herein. However, where a first sequence is referred to as “substantially complementary” with respect to a second sequence herein, the two sequences can be fully complementary, or they can form one or more, but generally not more than 5, 4, 3 or 2 mismatched base pairs upon hybridization for a duplex up to 30 base pairs, while retaining the ability to hybridize under the conditions most relevant to their ultimate application, e.g., inhibition of gene expression via a RISC pathway. However, where two oligonucleotides are designed to form, upon hybridization, one or more single stranded overhangs, such overhangs shall not be regarded as mismatches with regard to the determination of complementarity. For example, a dsRNA comprising one oligonucleotide 21 nucleotides in length and another oligonucleotide 23 nucleotides in length, wherein the longer oligonucleotide comprises a sequence of 21 nucleotides that is fully complementary to the shorter oligonucleotide, can yet be referred to as “fully complementary” for the purposes described herein.

[0214] “Complementary” sequences, as used herein, can also include, or be formed entirely from, non-Watson-Crick base pairs and/or base pairs formed from non-natural and modified nucleotides, in so far as the above requirements with respect to their ability to hybridize are fulfilled. Such non-Watson-Crick base pairs include, but are not limited to, G: U Wobble or Hoogstein base pairing.

[0215] The terms “complementary,” “fully complementary” and “substantially complementary” herein can be used with respect to the base matching between the sense strand and the antisense strand of a dsRNA, or between the antisense strand of an iRNA agent and a target sequence, as will be understood from the context of their use.

[0216] As used herein, a polynucleotide that is “substantially complementary to at least part of” a messenger RNA (mRNA) refers to a polynucleotide that is substantially complementary to a contiguous portion of the mRNA of interest (e.g., an mRNA encoding LDHA or an mRNA encoding HAO1). For example, a polynucleotide is complementary to at least a part of an LDHA mRNA if the sequence is substantially complementary to a non-interrupted portion of an mRNA encoding LDHA.

[0217] Accordingly, in some embodiments, the antisense strand polynucleotides disclosed herein are fully complementary to the target LDHA sequence. In other embodiments, the antisense strand polynucleotides disclosed herein are substantially complementary to the target LDHA sequence and comprise a contiguous nucleotide sequence which is at least about 80% complementary over its entire length to the equivalent region of the nucleotide sequence of SEQ ID NO: 1, or a fragment of SEQ ID NO: 1, such as about 85%, about 86%, about 87%, about 88%, about 89%, about 90%, about % 91%, about 92%, about 93%, about 94%, about 95%, about 96%, about 97%, about 98%, or about 99% complementary.

[0218] In one embodiment, an RNAi agent of the invention includes a sense strand that is substantially complementary to an antisense polynucleotide which, in turn, is complementary to a target LDHA sequence, and wherein the sense strand polynucleotide comprises a contiguous nucleotide sequence which is at least about 80% complementary over its entire length to the equivalent region of the nucleotide sequence of SEQ ID NO:2, or a fragment of any one of SEQ ID NO: 2, such as about 85%, about 86%, about 87%, about 88%, about 89%, about 90%, about % 91%, about 92%, about 93%, about 94%, about 95%, about 96%, about 97%, about 98%, or about 99% complementary.

[0219] In some embodiments, an iRNA of the invention includes an antisense strand that is substantially complementary to the target LDHA sequence and comprises a contiguous nucleotide sequence which is at least about 80% complementary over its entire length to the equivalent region of the nucleotide sequence of any one of the sense strands in any one of Tables 2-5, or a fragment of any one of the sense strands in any one of Tables 2-5, such as about about 85%, 86%, 87%, 88%, 89%, 90%, 91%, 92%, 93%, 94%, 95%, 96%, 97%, 98%, or 99% complementary, or 100% complementary.

[0220] Accordingly, in some embodiments, the antisense strand polynucleotides disclosed herein are fully complementary to the target HAO1 sequence. In other embodiments, the antisense strand polynucleotides disclosed herein are substantially complementary to the target HAO1 sequence and comprise a contiguous nucleotide sequence which is at least about 80% complementary over its entire length to the equivalent region of the nucleotide sequence of SEQ ID NO: 21, or a fragment of SEQ ID NO:21, such as about 85%, about 86%, about 87%, about 88%, about 89%, about 90%, about % 91%, about 92%, about 93%, about 94%, about 95%, about 96%, about 97%, about 98%, or about 99% complementary.

[0221] In one embodiment, an RNAi agent of the invention includes a sense strand that is substantially complementary to an antisense polynucleotide which, in turn, is complementary to a target HAO1 sequence, and wherein the sense strand polynucleotide comprises a contiguous nucleotide sequence which is at least about 80% complementary over its entire length to the equivalent region of the nucleotide sequence of SEQ ID NO:22, or a fragment of any one of SEQ ID NO: 22, such as about 85%, about 86%, about 87%, about 88%, about 89%, about 90%, about % 91%, about 92%, about 93%, about 94%, about 95%, about 96%, about 97%, about 98%, or about 99% complementary.

[0222] In some embodiments, an iRNA of the invention includes an antisense strand that is substantially complementary to the target HAO1 sequence and comprises a contiguous nucleotide sequence which is at least about 80% complementary over its entire length to the equivalent region of the nucleotide sequence of any one of the sense strands in any one of Tables 7-14, or a fragment of any one of the sense strands in any one of Tables 7-14, such as about about 85%, 86%, 87%, 88%, 89%, 90%, 91%, 92%, 93%, 94%, 95%, 96%, 97%, 98%, or 99% complementary, or 100% complementary.

[0223] The term “inhibiting,” as used herein, is used interchangeably with “reducing,” “silencing,” “downregulating,” “suppressing” and other similar terms, and includes any level of inhibition.

[0224] The phrase “inhibiting expression of an LDHA gene,” as used herein, includes inhibition of expression of any LDHA gene (such as, e.g., a mouse LDHA gene, a rat LDHA gene, a monkey LDHA gene, or a human LDHA gene) as well as variants or mutants of an LDHA gene that encode an LDHA protein.

[0225] “Inhibiting expression of an LDHA gene” includes any level of inhibition of an LDHA gene, e.g., at least partial suppression of the expression of an LDHA gene, such as an inhibition by at least about 20%. In certain embodiments, inhibition is by at least about 25%, at least about 30%, at least about 35%, at least about 40%, at least about 45%, at least about 50%, at least about 55%, at least about 60%, at least about 65%, at least about 70%, at least about 75%, at least about 80%, at least about 85%, at least about 90%, at least about 91%, at least about 92%, at least about 93%, at least about 94%, at least about 95%, at least about 96%, at least about 97%, at least about 98%, or at least about 99%.

[0226] The phrase “inhibiting expression of an HAO1 gene,” as used herein, includes inhibition of expression of any HAO1 gene (such as, e.g., a mouse HAO1 gene, a rat HAO1 gene, a monkey HAO1 gene, or a human HAO1 gene) as well as variants or mutants of an HAO1 gene that encode an HAO1 protein.

[0227] “Inhibiting expression of an HAO1 gene” includes any level of inhibition of an HAO1 gene, e.g., at least partial suppression of the expression of an HAO1 gene, such as an inhibition by at least about 20%. In certain embodiments, inhibition is by at least about 25%, at least about 30%, at least about 35%, at least about 40%, at least about 45%, at least about 50%, at least about 55%, at least about 60%, at least about 65%, at least about 70%, at least about 75%, at least about 80%, at least about 85%, at least about 90%, at least about 91%, at least about 92%, at least about 93%, at least about 94%, at least about 95%, at least about 96%, at least about 97%, at least about 98%, or at least about 99%.

[0228] In embodiments in which a first dsRNA agent targeting LDHA and a second dsRNA agent targeting HAO1 are covalently attached, the inhibition of expression of LDHA may be the same or different than the inhibition of HAO1 expression.

[0229] The expression of an LDHA gene and/or an HAO1 gene may be assessed based on the level of any variable associated with LDHA gene expression and/or HAO1 gene expression, e.g., LDHA and/or HAO1 mRNA level or LDHA and/or HAO1 protein level. The expression of an LDHA gene and/or an HAO1 gene may also be assessed indirectly based on the levels of oxalate or glycolate in a urine, a plasma, or a tissue sample, or the enzymatic activity of LDHA in a tissue sample, such as a liver sample, a skeletal muscle sample, and/or a heart sample. Inhibition may be assessed by a decrease in an absolute or relative level of one or more of these variables compared with a control level. The control level may be any type of control level that is utilized in the art, e.g., a pre-dose baseline level, or a level determined from a similar subject, cell, or sample that is untreated or treated with a control (such as, e.g., buffer only control or inactive agent control).

[0230] In one embodiment, at least partial suppression of the expression of an LDHA gene, is assessed by a reduction of the amount of LDHA mRNA which can be isolated from, or detected, in a first cell or group of cells in which an LDHA gene is transcribed and which has or have been treated such that the expression of an LDHA gene is inhibited, as compared to a second cell or group of cells substantially identical to the first cell or group of cells but which has or have not been so treated (control cells).

[0231] In one embodiment, at least partial suppression of the expression of an HAO1 gene, is assessed by a reduction of the amount of HAO1 mRNA which can be isolated from or detected in a first cell or group of cells in which an HAO1 gene is transcribed and which has or have been treated such that the expression of an HAO1 gene is inhibited, as compared to a second cell or group of cells substantially identical to the first cell or group of cells but which has or have not been so treated (control cells).

[0232] In one embodiment, at least partial suppression of the expression of an LDHA gene and an HAO1 gene, is assessed by a reduction of the amount of LDHA mRNA and HAO1 mRNA which can be isolated from or detected in a first cell or group of cells in which an LDHA gene and an HAO1 gene are transcribed and which has or have been treated such that the expression of an LDHA gene and an HAO1 gene is inhibited, as compared to a second cell or group of cells substantially identical to the first cell or group of cells but which has or have not been so treated (control cells).

[0233] The degree of inhibition may be expressed in terms of:

$$\frac{( mRNAin controlcells ) - ( m R NAin treatedcells )}{( mRNAin controlcells )} \cdot 100 \%$$

[0234] The phrase “contacting a cell with an RNAi agent,” such as a dsRNA, as used herein, includes contacting a cell by any possible means. Contacting a cell with an RNAi agent includes contacting a cell in vitro with the iRNA or contacting a cell in vivo with the iRNA. The contacting may be done directly or indirectly. Thus, for example, the RNAi agent may be put into physical contact with the cell by the individual performing the method, or alternatively, the RNAi agent may be put into a situation that will permit or cause it to subsequently come into contact with the cell.

[0235] In the methods of the invention in which a first dsRNA agent targeting LDHA and a second dsRNA agent targeting HAO1 are covalently attached (i.e., a dual targeting RNAi agent), contacting a cell may include contacting the cell with the first agent at the same time or at a different time than contacting the cell with the second agent.

[0236] Contacting a cell in vitro may be done, for example, by incubating the cell with the RNAi agent. Contacting a cell in vivo may be done, for example, by injecting the RNAi agent into or near the tissue where the cell is located, or by injecting the RNAi agent into another area, e.g., the bloodstream or the subcutaneous space, such that the agent will subsequently reach the tissue where the cell to be contacted is located. For example, the RNAi agent may contain and/or be coupled to a ligand, e.g., GalNAc3, that directs the RNAi agent to a site of interest, e.g., the liver. Combinations of in vitro and in vivo methods of contacting are also possible. For example, a cell may also be contacted in vitro with an RNAi agent and subsequently transplanted into a subject.

[0237] In one embodiment, contacting a cell with an iRNA includes “introducing” or “delivering the iRNA into the cell” by facilitating or effecting uptake or absorption into the cell. Absorption or uptake of an iRNA can occur through unaided diffusive or active cellular processes, or by auxiliary agents or devices. Introducing an iRNA into a cell may be in vitro and/or in vivo. For example, for in vivo introduction, iRNA can be injected into a tissue site or administered systemically. In vivo delivery can also be done by a beta-glucan delivery system, such as those described in U.S. Pat. Nos. 5,032,401 and 5,607,677, and U.S. Publication No. 2005/0281781, the entire contents of which are hereby incorporated herein by reference. In vitro introduction into a cell includes methods known in the art such as electroporation and lipofection. Further approaches are described herein below and/or are known in the art.

[0238] The term “lipid nanoparticle” or “LNP” is a vesicle comprising a lipid layer encapsulating a pharmaceutically active molecule, such as a nucleic acid molecule, e.g., an iRNA or a plasmid from which an iRNA is transcribed. LNPs are described in, for example, U.S. Pat. Nos. 6,858,225, 6,815,432, 8,158,601, and 8,058,069, the entire contents of which are hereby incorporated herein by reference.

[0239] As used herein, a “subject” is an animal, such as a mammal, including a primate (such as a human, a non-human primate, e.g., a monkey, and a chimpanzee), a non-primate (such as a cow, a pig, a camel, a llama, a horse, a goat, a rabbit, a sheep, a hamster, a guinea pig, a cat, a dog, a rat, a mouse, a horse, and a whale), or a bird (e.g., a duck or a goose).

[0240] In an embodiment, the subject is a human, such as a human being treated or assessed for a disease, disorder or condition that would benefit from reduction in LDHA expression; a human at risk for a disease, disorder or condition that would benefit from reduction in LDHA expression; a human having a disease, disorder or condition that would benefit from reduction in LDHA expression; and/or human being treated for a disease, disorder or condition that would benefit from reduction in LDHA expression as described herein.

[0241] It is to be understood that a human being treated or assessed for a disease, disorder or condition that would benefit from reduction in LDHA expression includes a a human being treated or assessed for a disease, disorder or condition that would benefit from reduction in LDHA and HAO1 expression; that a human at risk for a disease, disorder or condition that would benefit from reduction in LDHA expression includes a human at risk for a disease, disorder or condition that would benefit from reduction in LDHA and HAO1 expression; that a human having a disease, disorder or condition that would benefit from reduction in LDHA expression includes a human at risk for a disease, disorder or condition that would benefit from reduction in LDHA and HAO1 expression; and that a human being treated for a disease, disorder or condition that would benefit from reduction in LDHA expression includes a human being treated for a disease, disorder or condition that would benefit from reduction in LDHA and HAO1 expression as described herein.

[0242] As used herein, the terms “treating” or “treatment” refer to a beneficial or desired result, such as lowering urinary excretion levels of oxalate in a subject. The terms “treating” or “treatment” also include, but are not limited to, alleviation or amelioration of one or more symptoms of an oxalate pathway-associated disease disorder, or condition, such as, e.g., slowing the course of the disease; reducing the severity of later-developing disease; reduction in edema of the extremities, face, larynx, upper respiratory tract, abdomen, trunk, and/or genitals, prodrome, laryngeal swelling, nonpruritic rash, nausea, vomiting, and/or abdominal pain; decreasing progression of liver disease to cirrhosis or hepatocellular carcinoma; stabilizing current stone burden; decreasing recurrence of stones formed; and/or preventing further oxalate tissue deposition. “Treatment” can also mean prolonging survival as compared to expected survival in the absence of treatment.

[0243] The term “lower” in the context of a disease marker or symptom refers to a statistically significant decrease in such level. The decrease can be, for example, at least 10%, at least 15%, at least 20%, at least 25%, at least 30%, at least 35%, at least 40%, at least 45%, at least 50%, at least 55%, at least 60%, at least 65%, at least 70%, at least 75%, at least 80%, at least 85%, at least 90%, at least 95%, or more and is preferably down to a level accepted as within the range of normal for an individual without such disorder.

[0244] As used herein, “prevention” or “preventing,” when used in reference to a disease, disorder or condition thereof, that would benefit from a reduction in expression of an LDHA gene, refers to a reduction in the likelihood that a subject will develop a symptom associated with such disease, disorder, or condition, e.g., stone formation. The likelihood of, e.g., stone formation, is reduced, for example, when an individual having one or more risk factors for stone formation either fails to develop stones or develops stones with less severity relative to a population having the same risk factors and not receiving treatment as described herein. The failure to develop a disease, disorder or condition, or the reduction in the development of a symptom associated with such a disease, disorder or condition (e.g., by at least about 10% on a clinically accepted scale for that disease or disorder), or the exhibition of delayed symptoms delayed (e.g., by days, weeks, months or years) is considered effective prevention.

[0245] There are numerous disorders that would benefit from reduction in expression of an LDHA gene, such as an oxalate pathway-associated disease disorder, or condition.

[0246] As used herein, the term “oxalate pathway-associated disease, disorder, or condition” refers to a disease, disorder or condition thereof, in which lactate dehydrogenase knockdown is known or predicted to be therapeutic or otherwise advantageous, e.g., associated with or caused by a disturbance in lactate dehydrogenase production and/or urinary oxalate production.

[0247] In one embodiment, an “oxalate pathway-associated disease, disorder, or condition” is a “lactate dehydrogenase-associated disease, disorder, or condition.” As used herein, a “lactate dehydrogenase-associated disease, disorder, or condition” includes any disease, disorder or condition that would benefit from a decrease in lactate dehydrogenase gene expression, replication, or protein activity. Exemplary lactate dehydrogenase-associated disease, disorders, and conditions include, for example, fatty liver (steatosis), nonalcoholic steatohepatitis (NASH), cirrhosis of the liver, accumulation of fat in the liver, inflammation of the liver, hepatocellular necrosis, liver fibrosis, obesity, nonalcoholic fatty liver disease (NAFLD), and cancer, e.g., hepatocellular carcinoma.

[0248] In another embodiment, an “oxalate pathway-associated disease, disorder, or condition” is “an oxalate-associated disease, disorder, or condition.” As used herein, “an oxalate-associated disease, disorder, or condition” includes any disease, disorder or condition that would benefit from a decrease in lactate dehydrogenase gene expression, replication, or protein activity. The term “oxalate-associated disease, disorder, or condition” refers to inherited disorders, or induced or acquired disorders. Exemplary “oxalate-associated diseases, disorders, or conditions” include “kidney stone formation diseases, disorders, and conditions” and “calcium oxalate tissue deposition diseases, disorders, and conditions.”

[0249] Exemplary kidney stone formation diseases, disorders, and conditions include “calcium oxalate stone formation diseases, disorders, and conditions” and “non-calcium oxalate stone formation diseases, disorders, and conditions.”

[0250] Non-limiting examples of “calcium oxalate stone formation diseases, disorders, and conditions” include a hyperoxaluria (e.g., a primary hyperoxaluria, such as primary hyperoxaluria 1 (PH1), primary hyperoxaluria 2 (PH2), primary hyperoxaluria 3 (PH3) and nonPH1/PH2/PH3; enteric hyperoxaluria; dietary hyperoxaluria; and idiopathic hyperoxaluria) and a non-hyperoxaluria disorder (e.g., a hypercalciuria, such as primary hyperparathyroid, Dent's disease, absorptive hypercalciuria, and renal hypercalciuria; and hypocitraturia).

[0251] Non-limiting examples of “non-calcium oxalate stone formation diseases, disorders, and conditions” include subjects having kidney stones that are comprised of less than about 50%, less than about 45%, less than about 40%, less than about 35%, less than about 30%, less than about 25% less than about 20%, less than about 15%, or less than about 10% oxalate, and more than about 50% non-oxalate, e.g. calcium phosphate, uric acid, struvite, cystinuria, or other component.

[0252] Exemplary “calcium oxalate tissue deposition diseases, disorders, and conditions” include systemic calcium oxalate tissue deposition diseases, disorders, and conditions, such as calcium oxalate tissue deposition due to end-stage renal disease, sarcoidosis, or arthritis; and tissue specific calcium oxalate deposition diseases, disorders, and conditions, e.g., in the kidney (e.g., due to nephrocalcinosis, or medullary sponge kidney), in the thyroid, in the breast, in the bone, in the heart, in the vasculature, or in any soft tissue due to an organ transplant, such as a kidney transplant.

[0253] “Therapeutically effective amount,” as used herein, is intended to include the amount of an RNAi agent that, when administered to a subject having an oxalate pathway-associated disease, disorder, or condition, is sufficient to effect treatment of the disease (e.g., by diminishing, ameliorating or maintaining the existing disease or one or more symptoms of disease). The “therapeutically effective amount” may vary depending on the RNAi agent, how the agent is administered, the disease and its severity and the history, age, weight, family history, genetic makeup, the types of preceding or concomitant treatments, if any, and other individual characteristics of the subject to be treated.

[0254] “Prophylactically effective amount,” as used herein, is intended to include the amount of an iRNA that, when administered to a subject having an oxalate pathway-associated disease, disorder, or condition, is sufficient to prevent or ameliorate the disease or one or more symptoms of the disease. Ameliorating the disease includes slowing the course of the disease or reducing the severity of later-developing disease. The “prophylactically effective amount” may vary depending on the iRNA, how the agent is administered, the degree of risk of disease, and the history, age, weight, family history, genetic makeup, the types of preceding or concomitant treatments, if any, and other individual characteristics of the patient to be treated.

[0255] A “therapeutically-effective amount” or “prophylacticaly effective amount” also includes an amount of an RNAi agent that produces some desired local or systemic effect at a reasonable benefit/risk ratio applicable to any treatment. iRNA employed in the methods of the present invention may be administered in a sufficient amount to produce a reasonable benefit/risk ratio applicable to such treatment.

[0256] In the methods of the invention which include administering to a subject a pharmaceutical composition comprising a first dsRNA agent targeting LDHA and a second dsRNA agent targeting HAO1, the therapeutically effective amount of the first dsRNA agent may be the same or different than the therapeutically effective amount of the second dsRNA agent. Similarly, in the methods of the invention which include administering to a subject a pharmaceutical composition comprising a first dsRNA agent targeting LDHA and a second dsRNA agent targeting HAO1, the prophylacticly effective amount of the first dsRNA agent may be the same or different than the prophylacticaly effective amount of the second dsRNA agent.

[0257] The phrase “pharmaceutically acceptable” is employed herein to refer to those compounds, materials, compositions, and/or dosage forms which are, within the scope of sound medical judgment, suitable for use in contact with the tissues of human subjects and animal subjects without excessive toxicity, irritation, allergic response, or other problem or complication, commensurate with a reasonable benefit/risk ratio.

[0258] The phrase “pharmaceutically-acceptable carrier” as used herein means a pharmaceutically-acceptable material, composition or vehicle, such as a liquid or solid filler, diluent, excipient, manufacturing aid (e.g., lubricant, talc magnesium, calcium or zinc stearate, or steric acid), or solvent encapsulating material, involved in carrying or transporting the subject compound from one organ, or portion of the body, to another organ, or portion of the body. Each carrier must be “acceptable” in the sense of being compatible with the other ingredients of the formulation and not injurious to the subject being treated. Some examples of materials which can serve as pharmaceutically-acceptable carriers include: (1) sugars, such as lactose, glucose and sucrose; (2) starches, such as corn starch and potato starch; (3) cellulose, and its derivatives, such as sodium carboxymethyl cellulose, ethyl cellulose and cellulose acetate; (4) powdered tragacanth; (5) malt; (6) gelatin; (7) lubricating agents, such as magnesium state, sodium lauryl sulfate and talc; (8) excipients, such as cocoa butter and suppository waxes; (9) oils, such as peanut oil, cottonseed oil, safflower oil, sesame oil, olive oil, corn oil and soybean oil; (10) glycols, such as propylene glycol; (11) polyols, such as glycerin, sorbitol, mannitol and polyethylene glycol; (12) esters, such as ethyl oleate and ethyl laurate; (13) agar; (14) buffering agents, such as magnesium hydroxide and aluminum hydroxide; (15) alginic acid; (16) pyrogen-free water; (17) isotonic saline; (18) Ringer's solution; (19) ethyl alcohol; (20) pH buffered solutions; (21) polyesters, polycarbonates and/or polyanhydrides; (22) bulking agents, such as polypeptides and amino acids (23) serum component, such as serum albumin, HDL and LDL; and (22) other non-toxic compatible substances employed in pharmaceutical formulations.

[0259] The term “sample,” as used herein, includes a collection of similar fluids, cells, or tissues isolated from a subject, as well as fluids, cells, or tissues present within a subject. Examples of biological fluids include blood, serum and serosal fluids, plasma, cerebrospinal fluid, ocular fluids, lymph, urine, saliva, and the like. Tissue samples may include samples from tissues, organs or localized regions. For example, samples may be derived from particular organs, parts of organs, or fluids or cells within those organs. In certain embodiments, samples may be derived from the liver (e.g., whole liver or certain segments of liver or certain types of cells in the liver, such as, e.g., hepatocytes). In some embodiments, a “sample derived from a subject” refers to blood or plasma drawn from the subject.

### II. iRNAs of the Invention

[0260] Described herein are iRNAs which inhibit the expression of a target gene. In one embodiment, the iRNAs inhibit the expression of an LDHA gene. In one embodiment, the iRNA agent includes double stranded ribonucleic acid (dsRNA) molecules for inhibiting the expression of an LDHA gene in a cell, such as a liver cell, such as a liver cell within a subject, e.g., a mammal, such as a human having an oxalate pathway-associated disease, disorder, or condition, e.g., a stone formation disease, disorder, or condition. In another embodiment, the iRNAs inhibit the expression of an HAO1 gene. In one embodiment, the iRNA agent includes double stranded ribonucleic acid (dsRNA) molecules for inhibiting the expression of an HAO1 gene in a cell, such as a liver cell, such as a liver cell within a subject, e.g., a mammal, such as a human having a an oxalate pathway-associated disease, disorder, or condition, e.g., an oxalate-associated disease, disorder, or condition, e.g., a kidney stone formation disease, disorder, or condition or a calcium oxalate tissue deposition disease, disorder, or condition; or an LDH-associated disease, disorder, or condition.

[0261] Also provided herein are iRNAs which inhibit the expression of two target genes, referred to as dual targeting RNAi agents. In one embodiment, the dual targeting RNAi agent includes a first double stranded ribonucleic acid (dsRNA) agent for inhibiting the expression of an LDHA gene in a cell (such as a liver cell, e.g., a liver cell within a subject) covalently attached to a second double stranded ribonucleic acid (dsRNA) agent for inhibiting the expression of an HAO1 gene in a cell (such as a liver cell, e.g., a liver cell within a subject), such as a cell within a subject, e.g., a mammal, such as a human having an oxalate pathway-associated disease, disorder, or condition, e.g., an oxalate-associated disease, disorder, or condition, e.g., a kidney stone formation disease, disorder, or condition or a calcium oxalate tissue deposition disease, disorder, or condition; or an LDH-associated disease, disorder, or condition.

[0262] The dsRNA includes an antisense strand having a region of complementarity which is complementary to at least a part of an mRNA formed in the expression of an LDHA gene or an HAO1 gene, The region of complementarity is about 30 nucleotides or less in length (e.g., about 30, 29, 28, 27, 26, 25, 24, 23, 22, 21, 20, 19, or 18 nucleotides or less in length). Upon contact with a cell expressing the target gene, the iRNA inhibits the expression of the target gene (e.g., a human, a primate, a non-primate, or a bird target gene) by at least about 10% as assayed by, for example, a PCR or branched DNA (bDNA)-based method, or by a protein-based method, such as by immunofluorescence analysis, using, for example, Western Blotting or flowcytometric techniques.

[0263] A dsRNA includes two RNA strands that are complementary and hybridize to form a duplex structure under conditions in which the dsRNA will be used. One strand of a dsRNA (the antisense strand) includes a region of complementarity that is substantially complementary, and generally fully complementary, to a target sequence. The target sequence can be derived from the sequence of an mRNA formed during the expression of an LDHA gene or an HAO1 gene. The other strand (the sense strand) includes a region that is complementary to the antisense strand, such that the two strands hybridize and form a duplex structure when combined under suitable conditions. As described elsewhere herein and as known in the art, the complementary sequences of a dsRNA can also be contained as self-complementary regions of a single nucleic acid molecule, as opposed to being on separate oligonucleotides.

[0264] Generally, the duplex structure is between 15 and 30 base pairs in length, e.g., between, 15-29, 15-28, 15-27, 15-26, 15-25, 15-24, 15-23, 15-22, 15-21, 15-20, 15-19, 15-18, 15-17, 18-30, 18-29, 18-28, 18-27, 18-26, 18-25, 18-24, 18-23, 18-22, 18-21, 18-20, 19-30, 19-29, 19-28, 19-27, 19-26, 19-25, 19-24, 19-23, 19-22, 19-21, 19-20, 20-30, 20-29, 20-28, 20-27, 20-26, 20-25, 20-24, 20-23, 20-22, 20-21, 21-30, 21-29, 21-28, 21-27, 21-26, 21-25, 21-24, 21-23, or 21-22 base pairs in length. Ranges and lengths intermediate to the above recited ranges and lengths are also contemplated to be part of the invention.

[0265] Similarly, the region of complementarity to the target sequence is between 15 and 30 nucleotides in length, e.g., between 15-29, 15-28, 15-27, 15-26, 15-25, 15-24, 15-23, 15-22, 15-21, 15-20, 15-19, 15-18, 15-17, 18-30, 18-29, 18-28, 18-27, 18-26, 18-25, 18-24, 18-23, 18-22, 18-21, 18-20, 19-30, 19-29, 19-28, 19-27, 19-26, 19-25, 19-24, 19-23, 19-22, 19-21, 19-20, 20-30, 20-29, 20-28, 20-27, 20-26, 20-25, 20-24, 20-23, 20-22, 20-21, 21-30, 21-29, 21-28, 21-27, 21-26, 21-25, 21-24, 21-23, or 21-22 nucleotides in length. Ranges and lengths intermediate to the above recited ranges and lengths are also contemplated to be part of the invention.

[0266] In some embodiments, the dsRNA is between about 15 and about 23 nucleotides in length, or between about 25 and about 30 nucleotides in length. In general, the dsRNA is long enough to serve as a substrate for the Dicer enzyme. For example, it is well known in the art that dsRNAs longer than about 21-23 nucleotides can serve as substrates for Dicer. As the ordinarily skilled person will also recognize, the region of an RNA targeted for cleavage will most often be part of a larger RNA molecule, often an mRNA molecule. Where relevant, a “part” of an mRNA target is a contiguous sequence of an mRNA target of sufficient length to allow it to be a substrate for RNAi-directed cleavage (i.e., cleavage through a RISC pathway).

[0267] One of skill in the art will also recognize that the duplex region is a primary functional portion of a dsRNA, e.g., a duplex region of about 9 to 36 base pairs, e.g., about 10-36, 11-36, 12-36, 13-36, 14-36, 15-36, 9-35, 10-35, 11-35, 12-35, 13-35, 14-35, 15-35, 9-34, 10-34, 11-34, 12-34, 13-34, 14-34, 15-34, 9-33, 10-33, 11-33, 12-33, 13-33, 14-33, 15-33, 9-32, 10-32, 11-32, 12-32, 13-32, 14-32, 15-32, 9-31, 10-31, 11-31, 12-31, 13-32, 14-31, 15-31, 15-30, 15-29, 15-28, 15-27, 15-26, 15-25, 15-24, 15-23, 15-22, 15-21, 15-20, 15-19, 15-18, 15-17, 18-30, 18-29, 18-28, 18-27, 18-26, 18-25, 18-24, 18-23, 18-22, 18-21, 18-20, 19-30, 19-29, 19-28, 19-27, 19-26, 19-25, 19-24, 19-23, 19-22, 19-21, 19-20, 20-30, 20-29, 20-28, 20-27, 20-26, 20-25, 20-24, 20-23, 20-22, 20-21, 21-30, 21-29, 21-28, 21-27, 21-26, 21-25, 21-24, 21-23, or 21-22 base pairs. Thus, in one embodiment, to the extent that it becomes processed to a functional duplex, of e.g., 15-30 base pairs, that targets a desired RNA for cleavage, an RNA molecule or complex of RNA molecules having a duplex region greater than 30 base pairs is a dsRNA. Thus, an ordinarily skilled artisan will recognize that in one embodiment, a miRNA is a dsRNA. In another embodiment, a dsRNA is not a naturally occurring miRNA. In another embodiment, an iRNA agent useful to target LDHA expression or LDHA and HAO1 expression is not generated in the target cell by cleavage of a larger dsRNA.

[0268] A dsRNA as described herein can further include one or more single-stranded nucleotide overhangs e.g., 1, 2, 3, or 4 nucleotides. dsRNAs having at least one nucleotide overhang can have unexpectedly superior inhibitory properties relative to their blunt-ended counterparts. A nucleotide overhang can comprise or consist of a nucleotide/nucleoside analog, including a deoxynucleotide/nucleoside. The overhang(s) can be on the sense strand, the antisense strand or any combination thereof. Furthermore, the nucleotide(s) of an overhang can be present on the 5′-end, 3′-end or both ends of either an antisense or sense strand of a dsRNA.

[0269] A dsRNA can be synthesized by standard methods known in the art as further discussed below, e.g., by use of an automated DNA synthesizer, such as are commercially available from, for example, Biosearch, Applied Biosystems, Inc.

[0270] iRNA compounds of the invention may be prepared using a two-step procedure. First, the individual strands of the double-stranded RNA molecule are prepared separately. Then, the component strands are annealed. The individual strands of the siRNA compound can be prepared using solution-phase or solid-phase organic synthesis or both. Organic synthesis offers the advantage that the oligonucleotide strands comprising unnatural or modified nucleotides can be easily prepared. Single-stranded oligonucleotides of the invention can be prepared using solution-phase or solid-phase organic synthesis or both.

[0271] In one aspect, a dsRNA of the invention includes at least two nucleotide sequences, a sense sequence and an anti-sense sequence. The sense strand sequence is selected from the group of sequences provided in any one of Tables 2-5 and the corresponding nucleotide sequence of the antisense strand of the sense strand is selected from the group of sequences of any one of Tables 2-5. In this aspect, one of the two sequences is complementary to the other of the two sequences, with one of the sequences being substantially complementary to a sequence of an mRNA generated in the expression of an LDHA gene. As such, in this aspect, a dsRNA will include two oligonucleotides, where one oligonucleotide is described as the sense strand (passenger strand) in any one of Tables 2-5 and the second oligonucleotide is described as the corresponding antisense strand (guide strand) of the sense strand in any one of Tables 2-5. In one embodiment, the substantially complementary sequences of the dsRNA are contained on separate oligonucleotides. In another embodiment, the substantially complementary sequences of the dsRNA are contained on a single oligonucleotide.

[0272] In another aspect, a dsRNA of the invention targets an HAO1 gene and includes at least two nucleotide sequences, a sense sequence and an anti-sense sequence. The sense strand sequence is selected from the group of sequences provided in any one of Tables 7-14 and the corresponding nucleotide sequence of the antisense strand of the sense strand is selected from the group of sequences of any one of Tables 7-14. In this aspect, one of the two sequences is complementary to the other of the two sequences, with one of the sequences being substantially complementary to a sequence of an mRNA generated in the expression of an HAO1 gene. As such, in this aspect, a dsRNA will include two oligonucleotides, where one oligonucleotide is described as the sense strand (passenger strand) in any one of Tables 7-14 and the second oligonucleotide is described as the corresponding antisense strand (guide strand) of the sense strand in any one of Tables 7-14. In one embodiment, the substantially complementary sequences of the dsRNA are contained on separate oligonucleotides. In another embodiment, the substantially complementary sequences of the dsRNA are contained on a single oligonucleotide.

[0273] It will be understood that, although the sequences in Tables 2-5 and 7-14 are described as modified, unmodified, unconjugated. and/or conjugated sequences, the RNA of the iRNA of the invention e.g., a dsRNA of the invention, may comprise any one of the sequences set forth in any one of Table 2-5 and 7-14 that is un-modified, un-conjugated, and/or modified and/or conjugated differently than described therein.

[0274] The skilled person is well aware that dsRNAs having a duplex structure of between about 20 and 23 base pairs, e.g., 21, base pairs have been hailed as particularly effective in inducing RNA interference (Elbashir et al., (2001) EMBO J., 20:6877-6888). However, others have found that shorter or longer RNA duplex structures can also be effective (Chu and Rana (2007) RNA 14:1714-1719; Kim et al. (2005) Nat Biotech 23:222-226). In the embodiments described above, by virtue of the nature of the oligonucleotide sequences provided herein, dsRNAs described herein can include at least one strand of a length of minimally 21 nucleotides. It can be reasonably expected that shorter duplexes minus only a few nucleotides on one or both ends can be similarly effective as compared to the dsRNAs described above. Hence, dsRNAs having a sequence of at least 15, 16, 17, 18, 19, 20, or more contiguous nucleotides derived from one of the sequences provided herein, and differing in their ability to inhibit the expression of an LDHA gene or an HAO1 gene by not more than about 5, 10, 15, 20, 25, or 30% inhibition from a dsRNA comprising the full sequence, are contemplated to be within the scope of the present invention.

[0275] In addition, the RNAs described in any one of Tables 2-5 identify a site(s) in an LDHA transcript that is susceptible to RISC-mediated cleavage and those RNAs described in any one of Tables 7-14 identify a site(s) in an HAO1 transcript that is susceptible to RISC-mediated cleavage. As such, the present invention further features iRNAs that target within this site(s). As used herein, an iRNA is said to target within a particular site of an RNA transcript if the iRNA promotes cleavage of the transcript anywhere within that particular site. Such an iRNA will generally include at least about 15 contiguous nucleotides from one of the sequences provided herein coupled to additional nucleotide sequences taken from the region contiguous to the selected sequence in the gene.

[0276] While a target sequence is generally about 15-30 nucleotides in length, there is wide variation in the suitability of particular sequences in this range for directing cleavage of any given target RNA. Various software packages and the guidelines set out herein provide guidance for the identification of optimal target sequences for any given gene target, but an empirical approach can also be taken in which a “window” or “mask” of a given size (as a non-limiting example, 21 nucleotides) is literally or figuratively (including, e.g., in silico) placed on the target RNA sequence to identify sequences in the size range that can serve as target sequences. By moving the sequence “window” progressively one nucleotide upstream or downstream of an initial target sequence location, the next potential target sequence can be identified, until the complete set of possible sequences is identified for any given target size selected. This process, coupled with systematic synthesis and testing of the identified sequences (using assays as described herein or as known in the art) to identify those sequences that perform optimally can identify those RNA sequences that, when targeted with an iRNA agent, mediate the best inhibition of target gene expression. Thus, while the sequences identified herein represent effective target sequences, it is contemplated that further optimization of inhibition efficiency can be achieved by progressively “walking the window” one nucleotide upstream or downstream of the given sequences to identify sequences with equal or better inhibition characteristics.

[0277] Further, it is contemplated that for any sequence identified herein, further optimization could be achieved by systematically either adding or removing nucleotides to generate longer or shorter sequences and testing those sequences generated by walking a window of the longer or shorter size up or down the target RNA from that point. Again, coupling this approach to generating new candidate targets with testing for effectiveness of iRNAs based on those target sequences in an inhibition assay as known in the art and/or as described herein can lead to further improvements in the efficiency of inhibition. Further still, such optimized sequences can be adjusted by, e.g., the introduction of modified nucleotides as described herein or as known in the art, addition or changes in overhang, or other modifications as known in the art and/or discussed herein to further optimize the molecule (e.g., increasing serum stability or circulating half-life, increasing thermal stability, enhancing transmembrane delivery, targeting to a particular location or cell type, increasing interaction with silencing pathway enzymes, increasing release from endosomes) as an expression inhibitor.

[0278] An iRNA agent as described herein can contain one or more mismatches to the target sequence. In one embodiment, an iRNA as described herein contains no more than 3 mismatches. If the antisense strand of the iRNA contains mismatches to a target sequence, it is preferable that the area of mismatch is not located in the center of the region of complementarity. If the antisense strand of the iRNA contains mismatches to the target sequence, it is preferable that the mismatch be restricted to be within the last 5 nucleotides from either the 5′- or 3′-end of the region of complementarity. For example, for a 23 nucleotide iRNA agent the strand which is complementary to a region of an LDHA gene or an HAO1 gene, generally does not contain any mismatch within the central 13 nucleotides. The methods described herein or methods known in the art can be used to determine whether an iRNA containing a mismatch to a target sequence is effective in inhibiting the expression of an LDHA gene and/or an HAO1 gene. Consideration of the efficacy of iRNAs with mismatches in inhibiting expression of an LDHA gene and/or an HAO1 gene is important, especially if the particular region of complementarity in an LDHA gene and/or HAO1 gene is known to have polymorphic sequence variation within the population.

[0279] The dual targeting RNAi agents of the invention, which include two dsRNA agents, are covalently attached via, e.g., a covalent linker. Covalent linkers are well known in the art and include, e.g., nucleic acid linkers, peptide linkers, carbohydrate linkers, and the like. The covalent linker can include RNA and/or DNA and/or a peptide. The linker can be single stranded, double stranded, partially single strands, or partially double stranded. Modified nucleotides or a mixture of nucleotides can also be present in a nucleic acid linker.

[0280] Suitable linkers for use in the dual targeting agent of the invention include those described in U.S. Pat. No. 9,187,746, the entire contents of which are incorporated herein by reference.

[0281] In some embodiments the linker includes a disulfide bond. The linker can be cleavable or non-cleavable.

[0282] The linker can be, e.g., dTsdTuu=(5′-2′deoxythymidyl-3′-thiophosphate-5′-2′deoxythymidyl-3′-phosphate-5′-uridyl-3′-phosphate-5′-uridyl-3′-phosphate); rUsrU (a thiophosphate linker: 5′-uridyl-3′-thiophosphate-5′-uridyl-3′-phosphate); an rUrU linker; dTsdTaa (aadTsdT, 5′-2′deoxythymidyl-3′-thiophosphate-5′-2′deoxythymidyl-3′-phosphate-5′-adenyl-3′-phosphate-5′-adenyl-3′-phosphate); dTsdT (5′-2′deoxythymidyl-3′-thiophosphate-5′-2′ deoxythymidyl-3′-phosphate); dTsdTuu=uudTsdT=5′-2′deoxythymidyl-3′-thiophosphate-5′-2′deoxythymidyl-3′-phosphate-5′-uridyl-3′-phosphate-5′-uridyl-3′-phosphate.

[0283] The linker can be a polyRNA, such as poly(5′-adenyl-3′-phosphate-AAAAAAAA) or poly(5′-cytidyl-3′-phosphate-5′-uridyl-3′-phosphate-CUCUCUCU)), e.g., Xn single stranded poly RNA linker wherein n is an integer from 2-50 inclusive, preferable 4-15 inclusive, most preferably 7-8 inclusive. Modified nucleotides or a mixture of nucleotides can also be present in said polyRNA linker. The covalent linker can be a polyDNA, such as poly(5′-2′deoxythymidyl-3′-phosphate-TTTTTTTT), e.g., wherein n is an integer from 2-50 inclusive, preferable 4-15 inclusive, most preferably 7-8 inclusive. Modified nucleotides or a mixture of nucleotides can also be present in said polyDNA linker, a single stranded polyDNA linker wherein n is an integer from 2-50 inclusive, preferable 4-inclusive, most preferably 7-8 inclusive. Modified nucleotides or a mixture of nucleotides can also be present in said polyDNA linker.

[0284] The linker can include a disulfide bond, optionally a bis-hexyl-disulfide linker. In one embodiment, the disulfide linker is

[chemical structure]

[0285] The linker can include a peptide bond, e.g., include amino acids. In one embodiment, the covalent linker is a 1-10 amino acid long linker, preferably comprising 4-5 amino acids, optionally X-Gly-Phe-Gly-Y wherein X and Y represent any amino acid.

[0286] The linker can include HEG, a hexaethylenglycol linker.

[0287] The covalent linker can attach the sense strand of the first dsRNA agent to the sense strand of the second dsRNA agent; the antisense strand of the first dsRNA agent to the antisense strand of the second dsRNA agent; the sense strand of the first dsRNA agent to the antisense strand of the second dsRNA agent; or the antisense strand of the first dsRNA agent to the sense strand of the second dsRNA agent.

[0288] In some embodiments, the covalent linker further comprises at least one ligand, described below.

### III. Modified iRNAs of the Invention

[0289] In one embodiment, the RNA of the iRNA of the invention e.g., a dsRNA, is un-modified, and does not comprise, e.g., chemical modifications and/or conjugations known in the art and described herein. In another embodiment, the RNA of an iRNA of the invention, e.g., a dsRNA, is chemically modified to enhance stability or other beneficial characteristics. In certain embodiments of the invention, substantially all of the nucleotides of an iRNA of the invention are modified. In other embodiments of the invention, all of the nucleotides of an iRNA of the invention are modified. iRNAs of the invention in which “substantially all of the nucleotides are modified” are largely but not wholly modified and can include not more than 5, 4, 3, 2, or 1 unmodified nucleotides.

[0290] In embodiments in which a first dsRNA agent targeting LDHA and a second dsRNA agent targeting HAO1 are covalently attached (i.e., a dual targeting RNAi agent), substantially all of the nucleotides of the first agent and substantially all of the nucleotides of the second agent may be independently modified; all of the nucleotides of the first agent may be modified and all of the nucleotides of the second agent may be independently modified; substantially all of the nucleotides of the first agent and all of the nucleotides of the second agent may be independently modified; or all of the nucleotides of the first agent may be modified and substantially all of the nucleotides of the second agent may be independently modified.

[0291] In some aspects of the invention, substantially all of the nucleotides of an iRNA of the invention are modified and the iRNA agents comprise no more than 10 nucleotides comprising 2′-fluoro modifications (e.g., no more than 9 2′-fluoro modifications, no more than 8 2′-fluoro modifications, no more than 7 2′-fluoro modifications, no more than 6 2′-fluoro modifications, no more than 5 2′-fluoro modifications, no more than 4 2′-fluoro modifications, no more than 5 2′-fluoro modifications, no more than 4 2′-fluoro modifications, no more than 3 2′-fluoro modifications, or no more than 2 2′-fluoro modifications). For example, in some embodiments, the sense strand comprises no more than 4 nucleotides comprising 2′-fluoro modifications (e.g., no more than 3 2′-fluoro modifications, or no more than 2 2′-fluoro modifications). In other embodiments, the antisense strand comprises no more than 6 nucleotides comprising 2′-fluoro modifications (e.g., no more than 5 2′-fluoro modifications, no more than 4 2′-fluoro modifications, no more than 4 2′-fluoro modifications, or no more than 2 2′-fluoro modifications).

[0292] In embodiments in which a first dsRNA agent targeting LDHA and a second dsRNA agent targeting HAO1 are covalently attached (i.e., a dual targeting RNAi agent), substantially all of the nucleotides of the first agent and/or substantially all of the nucleotides of the second agent may be independently modified and the first and second agents may independently comprise no more than 10 nucleotides comprising 2′-fluoro modifications.

[0293] In other aspects of the invention, all of the nucleotides of an iRNA of the invention are modified and the iRNA agents comprise no more than 10 nucleotides comprising 2′-fluoro modifications (e.g., no more than 9 2′-fluoro modifications, no more than 8 2′-fluoro modifications, no more than 7 2′-fluoro modifications, no more than 6 2′-fluoro modifications, no more than 5 2′-fluoro modifications, no more than 4 2′-fluoro modifications, no more than 5 2′-fluoro modifications, no more than 4 2′-fluoro modifications, no more than 3 2′-fluoro modifications, or no more than 2 2′-fluoro modifications).

[0294] In embodiments in which a first dsRNA agent targeting LDHA and a second dsRNA agent targeting HAO1 are covalently attached (i.e., a dual targeting RNAi agent), all of the nucleotides of the first agent and/or all of the nucleotides of the second agent may be independently modified and the first and second agents may independently comprise no more than 10 nucleotides comprising 2′-fluoro modifications.

[0295] In one embodiment, the double stranded RNAi agent of the invention further comprises a 5′-phosphate or a 5′-phosphate mimic at the 5′ nucleotide of the antisense strand. In another embodiment, the double stranded RNAi agent further comprises a 5′-phosphate mimic at the 5′ nucleotide of the antisense strand. In a specific embodiment, the 5′-phosphate mimic is a 5′-vinyl phosphate (5′-VP).

[0296] In embodiments in which a first dsRNA agent targeting LDHA and a second dsRNA agent targeting HAO1 are covalently attached (i.e., a dual targeting RNAi agent), the first agent may further comprise a 5′-phosphate or a 5′-phosphate mimic at the 5′ nucleotide of the antisense strand; the second agent may further comprise a 5′-phosphate or a 5′-phosphate mimic at the 5′ nucleotide of the antisense strand; or the first agent and the second agent may further independently comprise a 5′-phosphate or a 5′-phosphate mimic at the 5′ nucleotide of the antisense strand.

[0297] The nucleic acids featured in the invention can be synthesized and/or modified by methods well established in the art, such as those described in “Current protocols in nucleic acid chemistry,” Beaucage, S. L. et al. (Edrs.), John Wiley & Sons, Inc., New York, NY, USA, which is hereby incorporated herein by reference. Modifications include, for example, end modifications, e.g., 5′-end modifications (phosphorylation, conjugation, inverted linkages) or 3′-end modifications (conjugation, DNA nucleotides, inverted linkages, etc.); base modifications, e.g., replacement with stabilizing bases, destabilizing bases, or bases that base pair with an expanded repertoire of partners, removal of bases (abasic nucleotides), or conjugated bases; sugar modifications (e.g., at the 2′-position or 4′-position) or replacement of the sugar; and/or backbone modifications, including modification or replacement of the phosphodiester linkages. Specific examples of iRNA compounds useful in the embodiments described herein include, but are not limited to RNAs containing modified backbones or no natural internucleoside linkages. RNAs having modified backbones include, among others, those that do not have a phosphorus atom in the backbone. For the purposes of this specification, and as sometimes referenced in the art, modified RNAs that do not have a phosphorus atom in their internucleoside backbone can also be considered to be oligonucleosides. In some embodiments, a modified iRNA will have a phosphorus atom in its internucleoside backbone.

[0298] Modified RNA backbones include, for example, phosphorothioates, chiral phosphorothioates, phosphorodithioates, phosphotriesters, aminoalkylphosphotriesters, methyl and other alkyl phosphonates including 3′-alkylene phosphonates and chiral phosphonates, phosphinates, phosphoramidates including 3′-amino phosphoramidate and aminoalkylphosphoramidates, thionophosphoramidates, thionoalkylphosphonates, thionoalkylphosphotriesters, and boranophosphates having normal 3′-5′ linkages, 2′-5′-linked analogs of these, and those having inverted polarity wherein the adjacent pairs of nucleoside units are linked 3′-5′ to 5′-3′ or 2′-5′ to 5′-2′. Various salts, mixed salts and free acid forms are also included.

[0299] Representative U.S. patents that teach the preparation of the above phosphorus-containing linkages include, but are not limited to, U.S. Pat. Nos. 3,687,808; 4,469,863; 4,476,301; 5,023,243; 5,177,195; 5,188,897; 5,264,423; 5,276,019; 5,278,302; 5,286,717; 5,321,131; 5,399,676; 5,405,939; 5,453,496; 5,455,233; 5,466,677; 5,476,925; 5,519,126; 5,536,821; 5,541,316; 5,550,111; 5,563,253; 5,571,799; 5,587,361; 5,625,050; 6,028,188; 6,124,445; 6,160,109; 6,169,170; 6,172,209; 6,239,265; 6,277,603; 6,326, 199; 6,346,614; 6,444,423; 6,531,590; 6,534,639; 6,608,035; 6,683,167; 6,858,715; 6,867,294; 6,878,805; 7,015,315; 7,041,816; 7,273,933; 7,321,029; and U.S. Pat. No. RE39464, the entire contents of each of which are hereby incorporated herein by reference.

[0300] Modified RNA backbones that do not include a phosphorus atom therein have backbones that are formed by short chain alkyl or cycloalkyl internucleoside linkages, mixed heteroatoms and alkyl or cycloalkyl internucleoside linkages, or one or more short chain heteroatomic or heterocyclic internucleoside linkages. These include those having morpholino linkages (formed in part from the sugar portion of a nucleoside); siloxane backbones; sulfide, sulfoxide and sulfone backbones; formacetyl and thioformacetyl backbones; methylene formacetyl and thioformacetyl backbones; alkene containing backbones; sulfamate backbones; methyleneimino and methylenehydrazino backbones; sulfonate and sulfonamide backbones; amide backbones; and others having mixed N, O, S and CH2 component parts.

[0301] Representative U.S. patents that teach the preparation of the above oligonucleosides include, but are not limited to, U.S. Pat. Nos. 5,034,506; 5,166,315; 5,185,444; 5,214,134; 5,216,141; 5,235,033; 5,64,562; 5,264,564; 5,405,938; 5,434,257; 5,466,677; 5,470,967; 5,489,677; 5,541,307; 5,561,225; 5,596,086; 5,602,240; 5,608,046; 5,610,289; 5,618,704; 5,623,070; 5,663,312; 5,633,360; 5,677,437; and, 5,677,439, the entire contents of each of which are hereby incorporated herein by reference.

[0302] In other embodiments, suitable RNA mimetics are contemplated for use in iRNAs, in which both the sugar and the internucleoside linkage, i.e., the backbone, of the nucleotide units are replaced with novel groups. The base units are maintained for hybridization with an appropriate nucleic acid target compound. One such oligomeric compound, an RNA mimetic that has been shown to have excellent hybridization properties, is referred to as a peptide nucleic acid (PNA). In PNA compounds, the sugar backbone of an RNA is replaced with an amide containing backbone, in particular an aminoethylglycine backbone. The nucleobases are retained and are bound directly or indirectly to aza nitrogen atoms of the amide portion of the backbone. Representative U.S. patents that teach the preparation of PNA compounds include, but are not limited to, U.S. Pat. Nos. 5,539,082; 5,714,331; and 5,719,262, the entire contents of each of which are hereby incorporated herein by reference. Additional PNA compounds suitable for use in the iRNAs of the invention are described in, for example, in Nielsen et al., Science, 1991, 254, 1497-1500.

[0303] Some embodiments featured in the invention include RNAs with phosphorothioate backbones and oligonucleosides with heteroatom backbones, and in particular —CH₂—NH—CH₂—, —CH₂—N(CH₃)—O—CH₂— [known as a methylene (methylimino) or MMI backbone], —CH₂—O—N(CH₃)—CH₂—, —CH₂—N(CH₃)—N(CH₃)—CH₂— and —N(CH₃)—CH₂—CH₂— [wherein the native phosphodiester backbone is represented as —O—P—O—CH₂—] of the above-referenced U.S. Pat. No. 5,489,677, and the amide backbones of the above-referenced U.S. Pat. No. 5,602,240. In some embodiments, the RNAs featured herein have morpholino backbone structures of the above-referenced U.S. Pat. No. 5,034,506.

[0304] Modified RNAs can also contain one or more substituted sugar moieties. The iRNAs, e.g., dsRNAs, featured herein can include one of the following at the 2′-position: OH; F; O-, S-, or N-alkyl; O-, S-, or N-alkenyl; O-, S- or N-alkynyl; or O-alkyl-O-alkyl, wherein the alkyl, alkenyl and alkynyl can be substituted or unsubstituted C₁ to C₁₀ alkyl or C₂ to C₁₀ alkenyl and alkynyl. Exemplary suitable modifications include O[(CH₂)ₙO]ₘCH₃, O(CH₂)·ₙOCH₃, O(CH₂)ₙNH₂, O(CH₂)ₙCH₃, O(CH₂)ₙONH₂, and O(CH₂)ₙON[(CH₂)ₙCH₃)]₂, where n and m are from 1 to about 10. In other embodiments, dsRNAs include one of the following at the 2′ position: C₁ to C₁₀ lower alkyl, substituted lower alkyl, alkaryl, aralkyl, O-alkaryl or O-aralkyl, SH, SCH₃, OCN, Cl, Br, CN, CF₃, OCF₃, SOCH₃, SO₂CH₃, ONO₂, NO₂, N₃, NH₂, heterocycloalkyl, heterocycloalkaryl, aminoalkylamino, polyalkylamino, substituted silyl, an RNA cleaving group, a reporter group, an intercalator, a group for improving the pharmacokinetic properties of an iRNA, or a group for improving the pharmacodynamic properties of an iRNA, and other substituents having similar properties. In some embodiments, the modification includes a 2′-methoxyethoxy (2′-O—CH₂CH₂OCH₃, also known as 2′-O-(2-methoxyethyl) or 2′-MOE) (Martin et al., Helv. Chim. Acta, 1995, 78:486-504) i.e., an alkoxy-alkoxy group. Another exemplary modification is 2′-dimethylaminooxyethoxy, i.e., a O(CH₂)₂ON(CH₃)₂ group, also known as 2′-DMAOE, as described in examples herein below, and 2′-dimethylaminoethoxyethoxy (also known in the art as 2′-O-dimethylaminoethoxyethyl or 2′-DMAEOE), i.e., 2′-O—CH₂—O—CH₂—N(CH₂)₂. Further exemplary modifications include: 5′-Me-2′-F nucleotides, 5′-Me-2′-OMe nucleotides, 5′-Me-2′-deoxynucleotides, (both R and S isomers in these three families); 2′-alkoxyalkyl; and 2′-NMA (N-methylacetamide).

[0305] Other modifications include 2′-methoxy (2′-OCH₃), 2′-aminopropoxy (2′-OCH₂CH₂CH₂NH₂) and 2′-fluoro (2′-F). Similar modifications can also be made at other positions on the RNA of an iRNA, particularly the 3′ position of the sugar on the 3′ terminal nucleotide or in 2′-5′ linked dsRNAs and the 5′ position of 5′ terminal nucleotide. iRNAs can also have sugar mimetics such as cyclobutyl moieties in place of the pentofuranosyl sugar.

[0306] Representative U.S. patents that teach the preparation of such modified sugar structures include, but are not limited to, U.S. Pat. Nos. 4,981,957; 5,118,800; 5,319,080; 5,359,044; 5,393,878; 5,446,137; 5,466,786; 5,514,785; 5,519,134; 5,567,811; 5,576,427; 5,591,722; 5,597,909; 5,610,300; 5,627,053; 5,639,873; 5,646,265; 5,658,873; 5,670,633; and 5,700,920, certain of which are commonly owned with the instant application. The entire contents of each of the foregoing are hereby incorporated herein by reference.

[0307] An iRNA of the invention can also include nucleobase (often referred to in the art simply as “base”) modifications or substitutions. As used herein, “unmodified” or “natural” nucleobases include the purine bases adenine (A) and guanine (G), and the pyrimidine bases thymine (T), cytosine (C) and uracil (U). Modified nucleobases include other synthetic and natural nucleobases such as 5-methylcytosine (5-me-C), 5-hydroxymethyl cytosine, xanthine, hypoxanthine, 2-aminoadenine, 6-methyl and other alkyl derivatives of adenine and guanine, 2-propyl and other alkyl derivatives of adenine and guanine, 2-thiouracil, 2-thiothymine and 2-thiocytosine, 5-halouracil and cytosine, 5-propynyl uracil and cytosine, 6-azo uracil, cytosine and thymine, 5-uracil (pseudouracil), 4-thiouracil, 8-halo, 8-amino, 8-thiol, 8-thioalkyl, 8-hydroxyl anal other 8-substituted adenines and guanines, 5-halo, particularly 5-bromo, 5-trifluoromethyl and other 5-substituted uracils and cytosines, 7-methylguanine and 7-methyladenine, 8-azaguanine and 8-azaadenine, 7-deazaguanine and 7-daazaadenine and 3-deazaguanine and 3-deazaadenine. Further nucleobases include those disclosed in U.S. Pat. No. 3,687,808, those disclosed in Modified Nucleosides in Biochemistry, Biotechnology and Medicine, Herdewijn, P. ed. Wiley-VCH, 2008; those disclosed in The Concise Encyclopedia Of Polymer Science And Engineering, pages 858-859, Kroschwitz, J. L, ed. John Wiley & Sons, 1990, these disclosed by Englisch et al., (1991) Angewandte Chemie, International Edition, 30:613, and those disclosed by Sanghvi, Y S., Chapter 15, dsRNA Research and Applications, pages 289-302, Crooke, S. T. and Lebleu, B., Ed., CRC Press, 1993. Certain of these nucleobases are particularly useful for increasing the binding affinity of the oligomeric compounds featured in the invention. These include 5-substituted pyrimidines, 6-azapyrimidines and N-2, N-6 and 0-6 substituted purines, including 2-aminopropyladenine, 5-propynyluracil and 5-propynylcytosine. 5-methylcytosine substitutions have been shown to increase nucleic acid duplex stability by 0.6-1.2° C. (Sanghvi, Y. S., Crooke, S. T. and Lebleu, B., Eds., dsRNA Research and Applications, CRC Press, Boca Raton, 1993, pp. 276-278) and are exemplary base substitutions, even more particularly when combined with 2′-O-methoxyethyl sugar modifications.

[0308] Representative U.S. patents that teach the preparation of certain of the above noted modified nucleobases as well as other modified nucleobases include, but are not limited to, the above noted U.S. Pat. Nos. 3,687,808, 4,845,205; 5,130,30; 5,134,066; 5,175,273; 5,367,066; 5,432,272; 5,457,187; 5,459,255; 5,484,908; 5,502,177; 5,525,711; 5,552,540; 5,587,469; 5,594,121, 5,596,091; 5,614,617; 5,681,941; 5,750,692; 6,015,886; 6,147,200; 6, 166, 197; 6,222,025; 6,235,887; 6,380,368; 6,528,640; 6,639,062; 6,617,438; 7,045,610; 7,427,672; and 7,495,088, the entire contents of each of which are hereby incorporated herein by reference.

[0309] An iRNA of the invention can also be modified to include one or more locked nucleic acids (LNA). A locked nucleic acid is a nucleotide having a modified ribose moiety in which the ribose moiety comprises an extra bridge connecting the 2′ and 4′ carbons. This structure effectively “locks” the ribose in the 3′-endo structural conformation. The addition of locked nucleic acids to siRNAs has been shown to increase siRNA stability in serum, and to reduce off-target effects (Elmen, J. et al., (2005) Nucleic Acids Research 33 (1): 439-447; Mook, O R. et al., (2007) Mol Canc Ther 6 (3): 833-843; Grunweller, A. et al., (2003) Nucleic Acids Research 31 (12): 3185-3193).

[0310] An iRNA of the invention can also be modified to include one or more bicyclic sugar moities. A “bicyclic sugar” is a furanosyl ring modified by the bridging of two atoms. A “bicyclic nucleoside” (“BNA”) is a nucleoside having a sugar moiety comprising a bridge connecting two carbon atoms of the sugar ring, thereby forming a bicyclic ring system. In certain embodiments, the bridge connects the 4′-carbon and the 2′-carbon of the sugar ring. Thus, in some embodiments an agent of the invention may include one or more locked nucleic acids (LNA). A locked nucleic acid is a nucleotide having a modified ribose moiety in which the ribose moiety comprises an extra bridge connecting the 2′ and 4′ carbons. In other words, an LNA is a nucleotide comprising a bicyclic sugar moiety comprising a 4′-CH2-O-2′ bridge. This structure effectively “locks” the ribose in the 3′-endo structural conformation. The addition of locked nucleic acids to siRNAs has been shown to increase siRNA stability in serum, and to reduce off-target effects (Elmen, J. et al., (2005) Nucleic Acids Research 33 (1): 439-447; Mook, O R. et al., (2007) Mol Canc Ther 6 (3): 833-843; Grunweller, A. et al., (2003) Nucleic Acids Research 31 (12): 3185-3193). Examples of bicyclic nucleosides for use in the polynucleotides of the invention include without limitation nucleosides comprising a bridge between the 4′ and the 2′ ribosyl ring atoms. In certain embodiments, the antisense polynucleotide agents of the invention include one or more bicyclic nucleosides comprising a 4′ to 2′ bridge. Examples of such 4′ to 2′ bridged bicyclic nucleosides, include but are not limited to 4′-(CH2)-O-2′ (LNA); 4′-(CH2)S-2′; 4′-(CH2) 2-O-2′ (ENA); 4′-CH(CH3)O-2′ (also referred to as “constrained ethyl” or “cEt”) and 4′-CH(CH2OCH3)-O-2′ (and analogs thereof; see, e.g., U.S. Pat. No. 7,399,845); 4′-C(CH3) (CH3)-O-2′ (and analogs thereof; see e.g., U.S. Pat. No. 8,278,283); 4′-CH2-N(OCH3)-2′ (and analogs thereof; see e.g., U.S. Pat. No. 8,278,425); 4′-CH2-O—N (CH3)-2′ (see, e.g., U.S. Patent Publication No. 2004/0171570); 4′-CH2-N(R)—O-2′, wherein R is H, C1-C12 alkyl, or a protecting group (see, e.g., U.S. Pat. No. 7,427,672); 4′-CH2-C(H) (CH3)-2′ (see, e.g., Chattopadhyaya et al., J. Org. Chem., 2009, 74, 118-134); and 4′-CH2-C(═CH2)-2′ (and analogs thereof; see, e.g., U.S. Pat. No. 8,278,426). The entire contents of each of the foregoing are hereby incorporated herein by reference.

[0311] Additional representative U.S. Patents and US Patent Publications that teach the preparation of locked nucleic acid nucleotides include, but are not limited to, the following: U.S. Pat. Nos. 6,268,490; 6,525,191; 6,670,461; 6,770,748; 6,794,499; 6,998,484; 7,053,207; 7,034,133; 7,084,125; 7,399,845; 7,427,672; 7,569,686; 7,741,457; 8,022,193; 8,030,467; 8,278,425; 8,278,426; 8,278,283; US 2008/0039618; and US 2009/0012281, the entire contents of each of which are hereby incorporated herein by reference.

[0312] Any of the foregoing bicyclic nucleosides can be prepared having one or more stereochemical sugar configurations including for example α-L-ribofuranose and β-D-ribofuranose (see WO 99/14226).

[0313] An iRNA of the invention can also be modified to include one or more constrained ethyl nucleotides. As used herein, a “constrained ethyl nucleotide” or “cEt” is a locked nucleic acid comprising a bicyclic sugar moiety comprising a 4′-CH(CH3)-O-2′ bridge. In one embodiment, a constrained ethyl nucleotide is in the S conformation referred to herein as “S-cEt.”

[0314] An iRNA of the invention may also include one or more “conformationally restricted nucleotides” (“CRN”). CRN are nucleotide analogs with a linker connecting the C2′ and C4′ carbons of ribose or the C3 and —C5′ carbons of ribose. CRN lock the ribose ring into a stable conformation and increase the hybridization affinity to mRNA. The linker is of sufficient length to place the oxygen in an optimal position for stability and affinity resulting in less ribose ring puckering.

[0315] Representative publications that teach the preparation of certain of the above noted CRN include, but are not limited to, US Patent Publication No. 2013/0190383; and PCT publication WO 2013/036868, the entire contents of each of which are hereby incorporated herein by reference.

[0316] In some embodiments, an iRNA of the invention comprises one or more monomers that are UNA (unlocked nucleic acid) nucleotides. UNA is unlocked acyclic nucleic acid, wherein any of the bonds of the sugar has been removed, forming an unlocked “sugar” residue. In one example, UNA also encompasses monomer with bonds between C1′-C4′ have been removed (i.e. the covalent carbon-oxygen-carbon bond between the C1′ and C4′ carbons). In another example, the C2′-C3′ bond (i.e. the covalent carbon-carbon bond between the C2′ and C3′ carbons) of the sugar has been removed (see Nuc. Acids Symp. Series, 52, 133-134 (2008) and Fluiter et al., Mol. Biosyst., 2009, 10, 1039 hereby incorporated by reference).

[0317] Representative U.S. publications that teach the preparation of UNA include, but are not limited to, U.S. Pat. No. 8,314,227; and US Patent Publication Nos. 2013/0096289; 2013/0011922; and 2011/0313020, the entire contents of each of which are hereby incorporated herein by reference.

[0318] Potentially stabilizing modifications to the ends of RNA molecules can include N-(acetylaminocaproyl)-4-hydroxyprolinol (Hyp-C6-NHAc), N-(caproyl-4-hydroxyprolinol (Hyp-C6), N-(acetyl-4-hydroxyprolinol (Hyp-NHAc), thymidine-2′-O-deoxythymidine (ether), N-(aminocaproyl)-4-hydroxyprolinol (Hyp-C6-amino), 2-docosanoyl-uridine-3″-phosphate, inverted base dT (idT) and others. Disclosure of this modification can be found in PCT Publication No. WO 2011/005861.

[0319] Other modifications of an iRNA of the invention include a 5′ phosphate or 5′ phosphate mimic, e.g., a 5′-terminal phosphate or phosphate mimic on the antisense strand of an RNAi agent. Suitable phosphate mimics are disclosed in, for example US Patent Publication No. 2012/0157511, the entire contents of which are incorporated herein by reference.

[0320] In certain specific embodiments, an RNAi agent of the present invention is an agent that inhibits the expression of an LDHA gene which is selected from the group of agents listed in any one of Tables 2-5. In other embodiments, an RNAi agent of the present invention is an dual targeting iRNA agent that inhibits the expression of an LDHA gene and an HAO1, wherein the first dsRNA inhibits expression of an LDHA gene and is selected from the group of agents listed in any one of Tables 2-5, and and the first dsRNA inhibits expression of an HAO1 gene and is selected from the group of agents listed in any one of Tables 7-14. Any of these agents may further comprise a ligand.

A. Modified iRNAs Comprising Motifs of the Invention

[0321] In certain aspects of the invention, the double stranded RNAi agents of the invention include agents with chemical modifications as disclosed, for example, in WO 2013/075035, filed on Nov. 16, 2012, the entire contents of which are incorporated herein by reference.

[0322] It is to be understood that, in embodiments in which a first dsRNA agent targeting LDHA and a second dsRNA agent targeting HAO1 are covalently attached (i.e., a dual targeting RNAi agent), the first agent may comprise any one or more of the motifs described below, the second agent may comprise any one or more of the motifs described below, or both the first agent and the second agent may independently comprise any one or more of the motifs described below.

[0323] Accordingly, the invention provides double stranded RNAi agents capable of inhibiting the expression of a target gene (i.e., an LDHA gene or an LDHA gene and an HAO1 gene) in vivo. The RNAi agent comprises a sense strand and an antisense strand. Each strand of the RNAi agent may range from 12-30 nucleotides in length. For example, each strand may be between 14-30 nucleotides in length, 17-30 nucleotides in length, 25-30 nucleotides in length, 27-30 nucleotides in length, 17-23 nucleotides in length, 17-21 nucleotides in length, 17-19 nucleotides in length, 19-25 nucleotides in length, 19-23 nucleotides in length, 19-21 nucleotides in length, 21-25 nucleotides in length, or 21-23 nucleotides in length.

[0324] The sense strand and antisense strand typically form a duplex double stranded RNA (“dsRNA”), also referred to herein as an “RNAi agent.” The duplex region of an RNAi agent may be 12-30 nucleotide pairs in length. For example, the duplex region can be between 14-30 nucleotide pairs in length, 17-30 nucleotide pairs in length, 27-30 nucleotide pairs in length, 17-23 nucleotide pairs in length, 17-21 nucleotide pairs in length, 17-19 nucleotide pairs in length, 19-25 nucleotide pairs in length, 19-23 nucleotide pairs in length, 19-21 nucleotide pairs in length, 21-25 nucleotide pairs in length, or 21-23 nucleotide pairs in length. In another example, the duplex region is selected from 15, 16, 17, 18, 19, 20, 21, 22, 23, 24, 25, 26, and 27 nucleotides in length.

[0325] In one embodiment, the RNAi agent may contain one or more overhang regions and/or capping groups at the 3′-end, 5′-end, or both ends of one or both strands. The overhang can be 1-6 nucleotides in length, for instance 2-6 nucleotides in length, 1-5 nucleotides in length, 2-5 nucleotides in length, 1-4 nucleotides in length, 2-4 nucleotides in length, 1-3 nucleotides in length, 2-3 nucleotides in length, or 1-2 nucleotides in length. The overhangs can be the result of one strand being longer than the other, or the result of two strands of the same length being staggered. The overhang can form a mismatch with the target mRNA or it can be complementary to the gene sequences being targeted or can be another sequence. The first and second strands can also be joined, e.g., by additional bases to form a hairpin, or by other non-base linkers.

[0326] In one embodiment, the nucleotides in the overhang region of the RNAi agent can each independently be a modified or unmodified nucleotide including, but no limited to 2′-sugar modified, such as, 2-F, 2′-Omethyl, thymidine (T), 2′-O-methoxyethyl-5-methyluridine (Teo), 2′-O-methoxyethyladenosine (Aeo), 2′-O-methoxyethyl-5-methylcytidine (m5Ceo), and any combinations thereof. For example, TT can be an overhang sequence for either end on either strand. The overhang can form a mismatch with the target mRNA or it can be complementary to the gene sequences being targeted or can be another sequence.

[0327] The 5′- or 3′-overhangs at the sense strand, antisense strand or both strands of the RNAi agent may be phosphorylated. In some embodiments, the overhang region(s) contains two nucleotides having a phosphorothioate between the two nucleotides, where the two nucleotides can be the same or different. In one embodiment, the overhang is present at the 3′-end of the sense strand, antisense strand, or both strands. In one embodiment, this 3′-overhang is present in the antisense strand. In one embodiment, this 3′-overhang is present in the sense strand.

[0328] The RNAi agent may contain only a single overhang, which can strengthen the interference activity of the RNAi, without affecting its overall stability. For example, the single-stranded overhang may be located at the 3′-terminal end of the sense strand or, alternatively, at the 3′-terminal end of the antisense strand. The RNAi may also have a blunt end, located at the 5′-end of the antisense strand (or the 3′-end of the sense strand) or vice versa. Generally, the antisense strand of the RNAi has a nucleotide overhang at the 3′-end, and the 5′-end is blunt. While not wishing to be bound by theory, the asymmetric blunt end at the 5′-end of the antisense strand and 3′-end overhang of the antisense strand favor the guide strand loading into RISC process.

[0329] In one embodiment, the RNAi agent is a double ended bluntmer of 19 nucleotides in length, wherein the sense strand contains at least one motif of three 2′-F modifications on three consecutive nucleotides at positions 7, 8, 9 from the 5′end. The antisense strand contains at least one motif of three 2′-O-methyl modifications on three consecutive nucleotides at positions 11, 12, 13 from the 5′end.

[0330] In another embodiment, the RNAi agent is a double ended bluntmer of 20 nucleotides in length, wherein the sense strand contains at least one motif of three 2′-F modifications on three consecutive nucleotides at positions 8, 9, 10 from the 5′end. The antisense strand contains at least one motif of three 2′-O-methyl modifications on three consecutive nucleotides at positions 11, 12, 13 from the 5′end.

[0331] In yet another embodiment, the RNAi agent is a double ended bluntmer of 21 nucleotides in length, wherein the sense strand contains at least one motif of three 2′-F modifications on three consecutive nucleotides at positions 9, 10, 11 from the 5′end. The antisense strand contains at least one motif of three 2′-O-methyl modifications on three consecutive nucleotides at positions 11, 12, 13 from the 5′end.

[0332] In one embodiment, the RNAi agent comprises a 21 nucleotide sense strand and a 23 nucleotide antisense strand, wherein the sense strand contains at least one motif of three 2′-F modifications on three consecutive nucleotides at positions 9, 10, 11 from the 5′end; the antisense strand contains at least one motif of three 2′-O-methyl modifications on three consecutive nucleotides at positions 11, 12, 13 from the 5′end, wherein one end of the RNAi agent is blunt, while the other end comprises a 2 nucleotide overhang. Preferably, the 2 nucleotide overhang is at the 3′-end of the antisense strand.

[0333] When the 2 nucleotide overhang is at the 3′-end of the antisense strand, there may be two phosphorothioate internucleotide linkages between the terminal three nucleotides, wherein two of the three nucleotides are the overhang nucleotides, and the third nucleotide is a paired nucleotide next to the overhang nucleotide. In one embodiment, the RNAi agent additionally has two phosphorothioate internucleotide linkages between the terminal three nucleotides at both the 5′-end of the sense strand and at the 5′-end of the antisense strand. In one embodiment, every nucleotide in the sense strand and the antisense strand of the RNAi agent, including the nucleotides that are part of the motifs are modified nucleotides. In one embodiment each residue is independently modified with a 2′-O-methyl or 3′-fluoro, e.g., in an alternating motif. Optionally, the RNAi agent further comprises a ligand (preferably GalNAc3).

[0334] In one embodiment, the RNAi agent comprises a sense and an antisense strand, wherein the sense strand is 25-30 nucleotide residues in length, wherein starting from the 5′ terminal nucleotide (position 1) positions 1 to 23 of the first strand comprise at least 8 ribonucleotides; the antisense strand is 36-66 nucleotide residues in length and, starting from the 3′ terminal nucleotide, comprises at least 8 ribonucleotides in the positions paired with positions 1-23 of sense strand to form a duplex; wherein at least the 3 ‘terminal nucleotide of antisense strand is unpaired with sense strand, and up to 6 consecutive 3’ terminal nucleotides are unpaired with sense strand, thereby forming a 3′ single stranded overhang of 1-6 nucleotides; wherein the 5′ terminus of antisense strand comprises from 10-30 consecutive nucleotides which are unpaired with sense strand, thereby forming a 10-30 nucleotide single stranded 5′ overhang; wherein at least the sense strand 5′ terminal and 3′ terminal nucleotides are base paired with nucleotides of antisense strand when sense and antisense strands are aligned for maximum complementarity, thereby forming a substantially duplexed region between sense and antisense strands; and antisense strand is sufficiently complementary to a target RNA along at least 19 ribonucleotides of antisense strand length to reduce target gene expression when the double stranded nucleic acid is introduced into a mammalian cell; and wherein the sense strand contains at least one motif of three 2′-F modifications on three consecutive nucleotides, where at least one of the motifs occurs at or near the cleavage site. The antisense strand contains at least one motif of three 2′-O-methyl modifications on three consecutive nucleotides at or near the cleavage site.

[0335] In one embodiment, the RNAi agent comprises sense and antisense strands, wherein the RNAi agent comprises a first strand having a length which is at least 25 and at most 29 nucleotides and a second strand having a length which is at most 30 nucleotides with at least one motif of three 2′-O-methyl modifications on three consecutive nucleotides at position 11, 12, 13 from the 5′ end; wherein the 3′ end of the first strand and the 5′ end of the second strand form a blunt end and the second strand is 1-4 nucleotides longer at its 3′ end than the first strand, wherein the duplex region region which is at least 25 nucleotides in length, and the second strand is sufficiently complementary to a target mRNA along at least 19 nucleotide of the second strand length to reduce target gene expression when the RNAi agent is introduced into a mammalian cell, and wherein dicer cleavage of the RNAi agent preferentially results in an siRNA comprising the 3′ end of the second strand, thereby reducing expression of the target gene in the mammal. Optionally, the RNAi agent further comprises a ligand.

[0336] In one embodiment, the sense strand of the RNAi agent contains at least one motif of three identical modifications on three consecutive nucleotides, where one of the motifs occurs at the cleavage site in the sense strand.

[0337] In one embodiment, the antisense strand of the RNAi agent can also contain at least one motif of three identical modifications on three consecutive nucleotides, where one of the motifs occurs at or near the cleavage site in the antisense strand.

[0338] For an RNAi agent having a duplex region of 17-23 nucleotide in length, the cleavage site of the antisense strand is typically around the 10, 11 and 12 positions from the 5′-end. Thus the motifs of three identical modifications may occur at the 9, 10, 11 positions; 10, 11, 12 positions; 11, 12, 13 positions; 12, 13, 14 positions; or 13, 14, 15 positions of the antisense strand, the count starting from the 1^{st} nucleotide from the 5′-end of the antisense strand, or, the count starting from the 1^{st} paired nucleotide within the duplex region from the 5′-end of the antisense strand. The cleavage site in the antisense strand may also change according to the length of the duplex region of the RNAi from the 5′-end.

[0339] The sense strand of the RNAi agent may contain at least one motif of three identical modifications on three consecutive nucleotides at the cleavage site of the strand; and the antisense strand may have at least one motif of three identical modifications on three consecutive nucleotides at or near the cleavage site of the strand. When the sense strand and the antisense strand form a dsRNA duplex, the sense strand and the antisense strand can be so aligned that one motif of the three nucleotides on the sense strand and one motif of the three nucleotides on the antisense strand have at least one nucleotide overlap, i.e., at least one of the three nucleotides of the motif in the sense strand forms a base pair with at least one of the three nucleotides of the motif in the antisense strand. Alternatively, at least two nucleotides may overlap, or all three nucleotides may overlap.

[0340] In one embodiment, the sense strand of the RNAi agent may contain more than one motif of three identical modifications on three consecutive nucleotides. The first motif may occur at or near the cleavage site of the strand and the other motifs may be a wing modification. The term “wing modification” herein refers to a motif occurring at another portion of the strand that is separated from the motif at or near the cleavage site of the same strand. The wing modification is either adjacent to the first motif or is separated by at least one or more nucleotides. When the motifs are immediately adjacent to each other then the chemistry of the motifs are distinct from each other and when the motifs are separated by one or more nucleotide than the chemistries can be the same or different. Two or more wing modifications may be present. For instance, when two wing modifications are present, each wing modification may occur at one end relative to the first motif which is at or near cleavage site or on either side of the lead motif.

[0341] Like the sense strand, the antisense strand of the RNAi agent may contain more than one motifs of three identical modifications on three consecutive nucleotides, with at least one of the motifs occurring at or near the cleavage site of the strand. This antisense strand may also contain one or more wing modifications in an alignment similar to the wing modifications that may be present on the sense strand.

[0342] In one embodiment, the wing modification on the sense strand or antisense strand of the RNAi agent typically does not include the first one or two terminal nucleotides at the 3′-end, 5′-end or both ends of the strand.

[0343] In another embodiment, the wing modification on the sense strand or antisense strand of the RNAi agent typically does not include the first one or two paired nucleotides within the duplex region at the 3′-end, 5′-end or both ends of the strand.

[0344] When the sense strand and the antisense strand of the RNAi agent each contain at least one wing modification, the wing modifications may fall on the same end of the duplex region, and have an overlap of one, two or three nucleotides.

[0345] When the sense strand and the antisense strand of the RNAi agent each contain at least two wing modifications, the sense strand and the antisense strand can be so aligned that two modifications each from one strand fall on one end of the duplex region, having an overlap of one, two or three nucleotides; two modifications each from one strand fall on the other end of the duplex region, having an overlap of one, two or three nucleotides; two modifications one strand fall on each side of the lead motif, having an overlap of one, two or three nucleotides in the duplex region.

[0346] In one embodiment, every nucleotide in the sense strand and antisense strand of the RNAi agent, including the nucleotides that are part of the motifs, may be modified. Each nucleotide may be modified with the same or different modification which can include one or more alteration of one or both of the non-linking phosphate oxygens and/or of one or more of the linking phosphate oxygens; alteration of a constituent of the ribose sugar, e.g., of the 2′ hydroxyl on the ribose sugar; wholesale replacement of the phosphate moiety with “dephospho” linkers; modification or replacement of a naturally occurring base; and replacement or modification of the ribose-phosphate backbone.

[0347] As nucleic acids are polymers of subunits, many of the modifications occur at a position which is repeated within a nucleic acid, e.g., a modification of a base, or a phosphate moiety, or a non-linking O of a phosphate moiety. In some cases the modification will occur at all of the subject positions in the nucleic acid but in many cases it will not. By way of example, a modification may only occur at a 3′ or 5′ terminal position, may only occur in a terminal region, e.g., at a position on a terminal nucleotide or in the last 2, 3, 4, 5, or 10 nucleotides of a strand.

[0348] A modification may occur in a double strand region, a single strand region, or in both. A modification may occur only in the double strand region of a RNA or may only occur in a single strand region of a RNA. For example, a phosphorothioate modification at a non-linking O position may only occur at one or both termini, may only occur in a terminal region, e.g., at a position on a terminal nucleotide or in the last 2, 3, 4, 5, or 10 nucleotides of a strand, or may occur in double strand and single strand regions, particularly at termini. The 5′ end or ends can be phosphorylated.

[0349] It may be possible, e.g., to enhance stability, to include particular bases in overhangs, or to include modified nucleotides or nucleotide surrogates, in single strand overhangs, e.g., in a 5′ or 3′ overhang, or in both. For example, it can be desirable to include purine nucleotides in overhangs. In some embodiments all or some of the bases in a 3′ or 5′ overhang may be modified, e.g., with a modification described herein. Modifications can include, e.g., the use of modifications at the 2′ position of the ribose sugar with modifications that are known in the art, e.g., the use of deoxyribonucleotides, 2′-deoxy-2′-fluoro (2′-F) or 2′-O-methyl modified instead of the ribosugar of the nucleobase, and modifications in the phosphate group, e.g., phosphorothioate modifications. Overhangs need not be homologous with the target sequence.

[0350] In one embodiment, each residue of the sense strand and antisense strand is independently modified with LNA, CRN, CET, UNA, HNA, CeNA, 2′-methoxyethyl, 2′-O-methyl, 2′-O-allyl, 2′-C-allyl, 2′-deoxy, 2′-hydroxyl, or 2′-fluoro. The strands can contain more than one modification. In one embodiment, each residue of the sense strand and antisense strand is independently modified with 2′-O-methyl or 2′-fluoro.

[0351] At least two different modifications are typically present on the sense strand and antisense strand. Those two modifications may be the 2′-O-methyl or 2′-fluoro modifications, or others.

[0352] In one embodiment, the Nₐ and/or N_{b} comprise modifications of an alternating pattern. The term “alternating motif” as used herein refers to a motif having one or more modifications, each modification occurring on alternating nucleotides of one strand. The alternating nucleotide may refer to one per every other nucleotide or one per every three nucleotides, or a similar pattern. For example, if A, B and C each represent one type of modification to the nucleotide, the alternating motif can be “ABABABABABAB . . . ,” “AABBAABBAABB . . . ” “AABAABAABAAB . . . ,” “AAABAAABAAAB . . . ,” “AAABBBAAABBB . . . ,” or “ABCABCABCABC . . . ,” etc.

[0353] The type of modifications contained in the alternating motif may be the same or different. For example, if A, B, C, D each represent one type of modification on the nucleotide, the alternating pattern, i.e., modifications on every other nucleotide, may be the same, but each of the sense strand or antisense strand can be selected from several possibilities of modifications within the alternating motif such as “ABABAB . . . ”, “ACACAC . . . ” “BDBDBD . . . ” or “CDCDCD . . . ,” etc.

[0354] In one embodiment, the RNAi agent of the invention comprises the modification pattern for the alternating motif on the sense strand relative to the modification pattern for the alternating motif on the antisense strand is shifted. The shift may be such that the modified group of nucleotides of the sense strand corresponds to a differently modified group of nucleotides of the antisense strand and vice versa. For example, the sense strand when paired with the antisense strand in the dsRNA duplex, the alternating motif in the sense strand may start with “ABABAB” from 5′-3′ of the strand and the alternating motif in the antisense strand may start with “BABABA” from 5′-3′ of the strand within the duplex region. As another example, the alternating motif in the sense strand may start with “AABBAABB” from 5′-3′ of the strand and the alternating motif in the antisense strand may start with “BBAABBAA” from 5′-3′ of the strand within the duplex region, so that there is a complete or partial shift of the modification patterns between the sense strand and the antisense strand.

[0355] In one embodiment, the RNAi agent comprises the pattern of the alternating motif of 2′-O-methyl modification and 2′-F modification on the sense strand initially has a shift relative to the pattern of the alternating motif of 2′-O-methyl modification and 2′-F modification on the antisense strand initially, i.e., the 2′-O-methyl modified nucleotide on the sense strand base pairs with a 2′-F modified nucleotide on the antisense strand and vice versa. The 1 position of the sense strand may start with the 2′-F modification, and the 1 position of the antisense strand may start with the 2′-O-methyl modification.

[0356] The introduction of one or more motifs of three identical modifications on three consecutive nucleotides to the sense strand and/or antisense strand interrupts the initial modification pattern present in the sense strand and/or antisense strand. This interruption of the modification pattern of the sense and/or antisense strand by introducing one or more motifs of three identical modifications on three consecutive nucleotides to the sense and/or antisense strand surprisingly enhances the gene silencing activity to the target gene.

[0357] In one embodiment, when the motif of three identical modifications on three consecutive nucleotides is introduced to any of the strands, the modification of the nucleotide next to the motif is a different modification than the modification of the motif. For example, the portion of the sequence containing the motif is “ . . . . NaYYYNb . . . ,” where “Y” represents the modification of the motif of three identical modifications on three consecutive nucleotide, and “Nₐ” and “N_{b}” represent a modification to the nucleotide next to the motif “YYY” that is different than the modification of Y, and where Nₐ and N_{b} can be the same or different modifications.

[0358] Alternatively, Nₐ and/or N_{b} may be present or absent when there is a wing modification present. The RNAi agent may further comprise at least one phosphorothioate or methylphosphonate internucleotide linkage. The phosphorothioate or methylphosphonate internucleotide linkage modification may occur on any nucleotide of the sense strand or antisense strand or both strands in any position of the strand. For instance, the internucleotide linkage modification may occur on every nucleotide on the sense strand and/or antisense strand; each internucleotide linkage modification may occur in an alternating pattern on the sense strand and/or antisense strand; or the sense strand or antisense strand may contain both internucleotide linkage modifications in an alternating pattern. The alternating pattern of the internucleotide linkage modification on the sense strand may be the same or different from the antisense strand, and the alternating pattern of the internucleotide linkage modification on the sense strand may have a shift relative to the alternating pattern of the internucleotide linkage modification on the antisense strand. In one embodiment, a double-stranded RNAi agent comprises 6-8phosphorothioate internucleotide linkages. In one embodiment, the antisense strand comprises two phosphorothioate internucleotide linkages at the 5′-terminus and two phosphorothioate internucleotide linkages at the 3′-terminus, and the sense strand comprises at least two phosphorothioate internucleotide linkages at either the 5′-terminus or the 3′-terminus.

[0359] In one embodiment, the RNAi comprises a phosphorothioate or methylphosphonate internucleotide linkage modification in the overhang region. For example, the overhang region may contain two nucleotides having a phosphorothioate or methylphosphonate internucleotide linkage between the two nucleotides. Internucleotide linkage modifications also may be made to link the overhang nucleotides with the terminal paired nucleotides within the duplex region. For example, at least 2, 3, 4, or all the overhang nucleotides may be linked through phosphorothioate or methylphosphonate internucleotide linkage, and optionally, there may be additional phosphorothioate or methylphosphonate internucleotide linkages linking the overhang nucleotide with a paired nucleotide that is next to the overhang nucleotide. For instance, there may be at least two phosphorothioate internucleotide linkages between the terminal three nucleotides, in which two of the three nucleotides are overhang nucleotides, and the third is a paired nucleotide next to the overhang nucleotide. These terminal three nucleotides may be at the 3′-end of the antisense strand, the 3′-end of the sense strand, the 5′-end of the antisense strand, and/or the 5′end of the antisense strand.

[0360] In one embodiment, the 2 nucleotide overhang is at the 3′-end of the antisense strand, and there are two phosphorothioate internucleotide linkages between the terminal three nucleotides, wherein two of the three nucleotides are the overhang nucleotides, and the third nucleotide is a paired nucleotide next to the overhang nucleotide. Optionally, the RNAi agent may additionally have two phosphorothioate internucleotide linkages between the terminal three nucleotides at both the 5′-end of the sense strand and at the 5′-end of the antisense strand.

[0361] In one embodiment, the RNAi agent comprises mismatch(es) with the target, within the duplex, or combinations thereof. The mismatch may occur in the overhang region or the duplex region. The base pair may be ranked on the basis of their propensity to promote dissociation or melting (e.g., on the free energy of association or dissociation of a particular pairing, the simplest approach is to examine the pairs on an individual pair basis, though next neighbor or similar analysis can also be used). In terms of promoting dissociation: A:U is preferred over G:C; G:U is preferred over G:C; and I:C is preferred over G:C (I=inosine). Mismatches, e.g., non-canonical or other than canonical pairings (as described elsewhere herein) are preferred over canonical (A:T, A:U, G:C) pairings; and pairings which include a universal base are preferred over canonical pairings.

[0362] In one embodiment, the RNAi agent comprises at least one of the first 1, 2, 3, 4, or 5 base pairs within the duplex regions from the 5′-end of the antisense strand independently selected from the group of: A:U, G:U, I:C, and mismatched pairs, e.g., non-canonical or other than canonical pairings or pairings which include a universal base, to promote the dissociation of the antisense strand at the 5′-end of the duplex.

[0363] In one embodiment, the nucleotide at the 1 position within the duplex region from the 5′-end in the antisense strand is selected from the group consisting of A, dA, dU, U, and dT. Alternatively, at least one of the first 1, 2 or 3 base pair within the duplex region from the 5′-end of the antisense strand is an AU base pair. For example, the first base pair within the duplex region from the 5′-end of the antisense strand is an AU base pair.

[0364] In another embodiment, the nucleotide at the 3′-end of the sense strand is deoxy-thymine (dT). In another embodiment, the nucleotide at the 3′-end of the antisense strand is deoxy-thymine (dT). In one embodiment, there is a short sequence of deoxy-thymine nucleotides, for example, two dT nucleotides on the 3′-end of the sense and/or antisense strand.

[0365] In one embodiment, the sense strand sequence may be represented by formula (I):

(I)
5′ nₚ-Nₐ-(X X X )ᵢ-N_{b}-Y Y Y-N_{b}-(Z Z Z )ⱼ-Nₐ-n_{q} 3′

[0366] wherein:
[0367] i and j are each independently 0 or 1;
[0368] p and q are each independently 0-6;
   [0369] each Nₐ independently represents an oligonucleotide sequence comprising 0-25 modified nucleotides, each sequence comprising at least two differently modified nucleotides;
   [0370] each N_{b} independently represents an oligonucleotide sequence comprising 0-10 modified nucleotides;
   [0371] each nₚ and n_{q} independently represent an overhang nucleotide;
   [0372] wherein N_{b} and Y do not have the same modification; and
   [0373] XXX, YYY and ZZZ each independently represent one motif of three identical modifications on three consecutive nucleotides. Preferably YYY is all 2′-F modified nucleotides.

[0374] In one embodiment, the Nₐ and/or N_{b} comprise modifications of alternating pattern.

[0375] In one embodiment, the YYY motif occurs at or near the cleavage site of the sense strand. For example, when the RNAi agent has a duplex region of 17-23 nucleotides in length, the YYY motif can occur at or the vicinity of the cleavage site (e.g.: can occur at positions 6, 7, 8, 7, 8, 9, 8, 9, 10, 9, 10, 11, 10, 11, 12 or 11, 12, 13) of—the sense strand, the count starting from the 1^{st} nucleotide, from the 5′-end; or optionally, the count starting at the 1^{st} paired nucleotide within the duplex region, from the 5′-end.

[0376] In one embodiment, i is 1 and j is 0, or i is 0 and j is 1, or both i and j are 1. The sense strand can therefore be represented by the following formulas:

(Ib)
5′ nₚ-Nₐ-YYY-N_{b}-ZZZ-Nₐ-n_{q} 3′;
(Ic)
5′ nₚ-Nₐ-XXX-N_{b}-YYY-Nₐ-n_{q} 3′;
or
(Id)
5′ nₚ-Nₐ-XXX-N_{b}-YYY-N_{b}-ZZZ-Nₐ-n_{q} 3′.

[0377] When the sense strand is represented by formula (Ib), N_{b} represents an oligonucleotide sequence comprising 0-10, 0-7, 0-5, 0-4, 0-2 or 0 modified nucleotides. Each Nₐ independently can represent an oligonucleotide sequence comprising 2-20, 2-15, or 2-10 modified nucleotides.

[0378] When the sense strand is represented as formula (Ic), N_{b} represents an oligonucleotide sequence comprising 0-10, 0-7, 0-10, 0-7, 0-5, 0-4, 0-2 or 0 modified nucleotides. Each Nₐ can independently represent an oligonucleotide sequence comprising 2-20, 2-15, or 2-10 modified nucleotides.

[0379] When the sense strand is represented as formula (Id), each N_{b} independently represents an oligonucleotide sequence comprising 0-10, 0-7, 0-5, 0-4, 0-2 or 0 modified nucleotides. Preferably, N_{b} is 0, 1, 2, 3, 4, 5 or 6. Each Nₐ can independently represent an oligonucleotide sequence comprising 2-20, 2-15, or 2-10 modified nucleotides.

[0380] Each of X, Y and Z may be the same or different from each other.

[0381] In other embodiments, i is 0 and j is 0, and the sense strand may be represented by the formula:

(Ia)
5′ np-Na-YYY-Na-nq 3′.

[0382] When the sense strand is represented by formula (Ia), each Nₐ independently can represent an oligonucleotide sequence comprising 2-20, 2-15, or 2-10 modified nucleotides.

[0383] In one embodiment, the antisense strand sequence of the RNAi may be represented by formula (II):

(II)
5′ n_{q′}-Nₐ′-(Z′Z′Z′)ₖ-N_{b}′-Y′Y′Y′-N_{b}′-
(X′X′X′)ₗ-N′ₐ-nₚ′ 3′

[0384] wherein:
[0385] k and l are each independently 0 or 1;
[0386] p′ and q′ are each independently 0-6;
   [0387] each Nₐ′ independently represents an oligonucleotide sequence comprising 0-25 modified nucleotides, each sequence comprising at least two differently modified nucleotides;
   [0388] each N_{b}′ independently represents an oligonucleotide sequence comprising 0-10 modified nucleotides;
   [0389] each nₚ′ and n_{q}′ independently represent an overhang nucleotide;
   [0390] wherein N_{b}′ and Y′ do not have the same modification; and
   [0391] X′X′X′, Y′Y′Y′ and Z′Z′Z′ each independently represent one motif of three identical modifications on three consecutive nucleotides.

[0392] In one embodiment, the Nₐ′ and/or N_{b}′ comprise modifications of alternating pattern.

[0393] The Y′Y′Y′ motif occurs at or near the cleavage site of the antisense strand. For example, when the RNAi agent has a duplex region of 17-23nucleotide in length, the Y′Y′Y′ motif can occur at positions 9, 10, 11; 10, 11, 12; 11, 12, 13; 12, 13, 14; or 13, 14, 15 of the antisense strand, with the count starting from the 1^{st} nucleotide, from the 5′-end; or optionally, the count starting at the 1^{st} paired nucleotide within the duplex region, from the 5′-end. Preferably, the Y′Y′Y′ motif occurs at positions 11, 12, 13.

[0394] In one embodiment, Y′Y′Y′ motif is all 2′-OMe modified nucleotides.

[0395] In one embodiment, k is 1 and l is 0, or k is 0 and l is 1, or both k and l are 1.

[0396] The antisense strand can therefore be represented by the following formulas:

(IIb)
5′ n_{q′}-Nₐ′-Z′Z′Z′-N_{b}′-Y′Y′Y′-Nₐ′-n_{p′} 3′;
(IIc)
5′ n_{q′}-Nₐ′-Y′Y′Y′-N_{b}′-X′X′X′-n_{p′} 3′;
or
(IId)
5′ n_{q′}-Nₐ′-Z′Z′Z′-N_{b}′-Y′Y′Y′-N_{b}′-X′X′X′-Nₐ′-n_{p′} 3′.

[0397] When the antisense strand is represented by formula (IIb), N_{b}′ represents an oligonucleotide sequence comprising 0-10, 0-7, 0-10, 0-7, 0-5, 0-4, 0-2 or 0 modified nucleotides. Each Nₐ′ independently represents an oligonucleotide sequence comprising 2-20, 2-15, or 2-10 modified nucleotides.

[0398] When the antisense strand is represented as formula (IIc), N_{b}′ represents an oligonucleotide sequence comprising 0-10, 0-7, 0-10, 0-7, 0-5, 0-4, 0-2 or 0 modified nucleotides. Each Nₐ′ independently represents an oligonucleotide sequence comprising 2-20, 2-15, or 2-10 modified nucleotides.

[0399] When the antisense strand is represented as formula (IId), each N_{b}′ independently represents an oligonucleotide sequence comprising 0-10, 0-7, 0-10, 0-7, 0-5, 0-4, 0-2 or 0 modified nucleotides. Each Na′ independently represents an oligonucleotide sequence comprising 2-20, 2-15, or 2-10 modified nucleotides. Preferably, N_{b} is 0, 1, 2, 3, 4, 5 or 6.

[0400] In other embodiments, k is 0 and 1 is 0 and the antisense strand may be represented by the formula:

(Ia)
5′ n_{p′}-N_{a′}-Y′Y′Y′-N_{a′}-n_{q′} 3′.

[0401] When the antisense strand is represented as formula (IIa), each Nₐ′ independently represents an oligonucleotide sequence comprising 2-20, 2-15, or 2-10 modified nucleotides.

[0402] Each of X′, Y′ and Z′ may be the same or different from each other.

[0403] Each nucleotide of the sense strand and antisense strand may be independently modified with LNA, CRN, UNA, cEt, HNA, CeNA, 2′-methoxyethyl, 2′-O-methyl, 2′-O-allyl, 2′-C-allyl, 2′-hydroxyl, or 2′-fluoro. For example, each nucleotide of the sense strand and antisense strand is independently modified with 2′-O-methyl or 2′-fluoro. Each X, Y, Z, X′, Y′ and Z′, in particular, may represent a 2′-O-methyl modification or a 2′-fluoro modification.

[0404] In one embodiment, the sense strand of the RNAi agent may contain YYY motif occurring at 9, 10 and 11 positions of the strand when the duplex region is 21 nt, the count starting from the 1^{st} nucleotide from the 5′-end, or optionally, the count starting at the 1^{st} paired nucleotide within the duplex region, from the 5′-end; and Y represents 2′-F modification. The sense strand may additionally contain XXX motif or ZZZ motifs as wing modifications at the opposite end of the duplex region; and XXX and ZZZ each independently represents a 2′-OMe modification or 2′-F modification.

[0405] In one embodiment the antisense strand may contain Y′Y′Y′ motif occurring at positions 11, 12, 13 of the strand, the count starting from the 1^{st} nucleotide from the 5′ end, or optionally, the count starting at the 1^{st} paired nucleotide within the duplex region, from the 5′-end; and Y′ represents 2′-O-methyl modification. The antisense strand may additionally contain X′X′X′ motif or Z′Z′Z′ motifs as wing modifications at the opposite end of the duplex region; and X′X′X′ and Z′Z′Z′ each independently represents a 2′-OMe modification or 2′-F modification.

[0406] The sense strand represented by any one of the above formulas (Ia), (Ib), (Ic), and (Id) forms a duplex with a antisense strand being represented by any one of formulas (IIa), (IIb), (IIc), and (IId), respectively.

[0407] Accordingly, the RNAi agents for use in the methods of the invention may comprise a sense strand and an antisense strand, each strand having 14 to 30 nucleotides, the RNAi duplex represented by formula (III):

sense:
5′ np-Na-(X X X)i-Nb-Y Y Y-Nb-
(Z Z Z)j-Na-nq 3′
antisense:
3′ np′-Na′-(X′X′X′)k-Nb′-Y′Y′Y′-Nb′-
(Z′Z′Z′)l-Na′-nq′ 5′

[0408] (III)
[0409] wherein:
[0410] i, j, k, and l are each independently 0 or 1;
[0411] p, p′, q, and q′ are each independently 0-6;
   [0412] each Na and Na′ independently represents an oligonucleotide sequence comprising 0-25 modified nucleotides, each sequence comprising at least two differently modified nucleotides;
   [0413] each Nb and Nb′ independently represents an oligonucleotide sequence comprising 0-10 modified nucleotides;
   [0414] wherein each np′, np, nq′, and nq, each of which may or may not be present, independently represents an overhang nucleotide; and
   [0415] XXX, YYY, ZZZ, X′X′X′, Y′Y′Y′, and Z′Z′Z′ each independently represent one motif of three identical modifications on three consecutive nucleotides.

[0416] In one embodiment, i is 0 and j is 0; or i is 1 and j is 0; or i is 0 and j is 1; or both i and j are 0; or both i and j are 1. In another embodiment, k is 0 and 1 is 0; or k is 1 and 1 is 0; k is 0 and 1 is 1; or both k and l are 0; or both k and l are 1.

[0417] Exemplary combinations of the sense strand and antisense strand forming a RNAi duplex include the formulas below:

(IIIa)
5′ np-Na-Y Y Y-Na-nq 3′
3′ np′-Na′-Y′Y′Y′-Na′nq′ 5′
(IIIb)
5′ np-Na-Y Y Y-Nb-ZZ Z-Na-nq 3′
3′ np′-Na′-Y′Y′Y′-Nb′-Z′Z′Z′-Na′nq′ 5′
(IIIc)
5′ np-Na-X X X-Nb-Y Y Y-Na-nq 3′
3′ np′-Na′-X′X′X′-Nb′-Y′Y′Y′-Na′-nq′ 5′
(IIId)
5′ np-Na-X X X-Nb-Y Y Y-Nb-Z Z Z-Na-nq 3′
3′ np′-Na′-X′X′X′-Nb′-Y′Y′Y′-Nb′-Z′Z′Z′-Na-nq′ 5′

[0418] When the RNAi agent is represented by formula (IIIa), each Na independently represents an oligonucleotide sequence comprising 2-20, 2-15, or 2-10 modified nucleotides.

[0419] When the RNAi agent is represented by formula (IIIb), each Nb independently represents an oligonucleotide sequence comprising 1-10, 1-7, 1-5 or 1-4 modified nucleotides. Each Na independently represents an oligonucleotide sequence comprising 2-20, 2-15, or 2-10 modified nucleotides.

[0420] When the RNAi agent is represented as formula (IIIc), each Nb, Nb′ independently represents an oligonucleotide sequence comprising 0-10, 0-7, 0-10, 0-7, 0-5, 0-4, 0-2 or 0 modified nucleotides. Each Na independently represents an oligonucleotide sequence comprising 2-20, 2-15, or 2-10 modified nucleotides.

[0421] When the RNAi agent is represented as formula (IIId), each Nb, Nb′ independently represents an oligonucleotide sequence comprising 0-10, 0-7, 0-10, 0-7, 0-5, 0-4, 0-2 or 0 modified nucleotides. Each Na, Na′ independently represents an oligonucleotide sequence comprising 2-20, 2-15, or 2-10 modified nucleotides. Each of Na, Na′, Nb and Nb′ independently comprises modifications of alternating pattern.

[0422] Each of X, Y and Z in formulas (III), (IIIa), (IIIb), (IIIc), and (IIId) may be the same or different from each other.

[0423] When the RNAi agent is represented by formula (III), (IIIa), (IIIb), (IIIc), and (IIId), at least one of the Y nucleotides may form a base pair with one of the Y′ nucleotides. Alternatively, at least two of the Y nucleotides form base pairs with the corresponding Y′ nucleotides; or all three of the Y nucleotides all form base pairs with the corresponding Y′ nucleotides.

[0424] When the RNAi agent is represented by formula (IIIb) or (IIId), at least one of the Z nucleotides may form a base pair with one of the Z′ nucleotides. Alternatively, at least two of the Z nucleotides form base pairs with the corresponding Z′ nucleotides; or all three of the Z nucleotides all form base pairs with the corresponding Z′ nucleotides.

[0425] When the RNAi agent is represented as formula (IIIc) or (IIId), at least one of the X nucleotides may form a base pair with one of the X′ nucleotides. Alternatively, at least two of the X nucleotides form base pairs with the corresponding X′ nucleotides; or all three of the X nucleotides all form base pairs with the corresponding X′ nucleotides.

[0426] In one embodiment, the modification on the Y nucleotide is different than the modification on the Y′ nucleotide, the modification on the Z nucleotide is different than the modification on the Z′ nucleotide, and/or the modification on the X nucleotide is different than the modification on the X′ nucleotide.

[0427] In one embodiment, when the RNAi agent is represented by formula (IIId), the Na modifications are 2′-O-methyl or 2′-fluoro modifications. In another embodiment, when the RNAi agent is represented by formula (IIId), the Na modifications are 2′-O-methyl or 2′-fluoro modifications and np′>0 and at least one np′ is linked to a neighboring nucleotide a via phosphorothioate linkage. In yet another embodiment, when the RNAi agent is represented by formula (IIId), the Na modifications are 2′-O-methyl or 2′-fluoro modifications, np′>0 and at least one np′ is linked to a neighboring nucleotide via phosphorothioate linkage, and the sense strand is conjugated to one or more GalNAc derivatives attached through a bivalent or trivalent branched linker (described below). In another embodiment, when the RNAi agent is represented by formula (IIId), the Na modifications are 2′-O-methyl or 2′-fluoro modifications, np′>0 and at least one np′ is linked to a neighboring nucleotide via phosphorothioate linkage, the sense strand comprises at least one phosphorothioate linkage, and the sense strand is conjugated to one or more GalNAc derivatives attached through a bivalent or trivalent branched linker.

[0428] In one embodiment, when the RNAi agent is represented by formula (IIIa), the Na modifications are 2′-O-methyl or 2′-fluoro modifications, np′>0 and at least one np′ is linked to a neighboring nucleotide via phosphorothioate linkage, the sense strand comprises at least one phosphorothioate linkage, and the sense strand is conjugated to one or more GalNAc derivatives attached through a bivalent or trivalent branched linker.

[0429] In one embodiment, the RNAi agent is a multimer containing at least two duplexes represented by formula (III), (IIIa), (IIIb), (IIIc), and (IIId), wherein the duplexes are connected by a linker. The linker can be cleavable or non-cleavable. Optionally, the multimer further comprises a ligand. Each of the duplexes can target the same gene or two different genes; or each of the duplexes can target same gene at two different target sites.

[0430] In one embodiment, the RNAi agent is a multimer containing three, four, five, six or more duplexes represented by formula (III), (IIIa), (IIIb), (IIIc), and (IIId), wherein the duplexes are connected by a linker. The linker can be cleavable or non-cleavable. Optionally, the multimer further comprises a ligand. Each of the duplexes can target the same gene or two different genes; or each of the duplexes can target same gene at two different target sites.

[0431] In one embodiment, two RNAi agents represented by formula (III), (IIIa), (IIIb), (IIIc), and (IIId) are linked to each other at the 5′ end, and one or both of the 3′ ends and are optionally conjugated to to a ligand. Each of the agents can target the same gene or two different genes; or each of the agents can target same gene at two different target sites.

[0432] In certain embodiments, an RNAi agent of the invention may contain a low number of nucleotides containing a 2′-fluoro modification, e.g., 10 or fewer nucleotides with 2′-fluoro modification. For example, the RNAi agent may contain 10, 9, 8, 7, 6, 5, 4, 3, 2, 1 or 0 nucleotides with a 2′-fluoro modification. In a specific embodiment, the RNAi agent of the invention contains 10 nucleotides with a 2′-fluoro modification, e.g., 4 nucleotides with a 2′-fluoro modification in the sense strand and 6 nucleotides with a 2′-fluoro modification in the antisense strand. In another specific embodiment, the RNAi agent of the invention contains 6 nucleotides with a 2′-fluoro modification, e.g., 4 nucleotides with a 2′-fluoro modification in the sense strand and 2 nucleotides with a 2′-fluoro modification in the antisense strand.

[0433] In other embodiments, an RNAi agent of the invention may contain an ultra low number of nucleotides containing a 2′-fluoro modification, e.g., 2 or fewer nucleotides containing a 2′-fluoro modification. For example, the RNAi agent may contain 2, 1 of 0 nucleotides with a 2′-fluoro modification. In a specific embodiment, the RNAi agent may contain 2 nucleotides with a 2′-fluoro modification, e.g., 0 nucleotides with a 2-fluoro modification in the sense strand and 2 nucleotides with a 2′-fluoro modification in the antisense strand.

[0434] Various publications describe multimeric RNAi agents that can be used in the methods of the invention. Such publications include WO2007/091269, U.S. Pat. No. 7,858,769, WO2010/141511, WO2007/117686, WO2009/014887 and WO2011/031520 the entire contents of each of which are hereby incorporated herein by reference.

[0435] As described in more detail below, the RNAi agent that contains conjugations of one or more carbohydrate moieties to a RNAi agent can optimize one or more properties of the RNAi agent. In many cases, the carbohydrate moiety will be attached to a modified subunit of the RNAi agent. For example, the ribose sugar of one or more ribonucleotide subunits of a dsRNA agent can be replaced with another moiety, e.g., a non-carbohydrate (preferably cyclic) carrier to which is attached a carbohydrate ligand. A ribonucleotide subunit in which the ribose sugar of the subunit has been so replaced is referred to herein as a ribose replacement modification subunit (RRMS). A cyclic carrier may be a carbocyclic ring system, i.e., all ring atoms are carbon atoms, or a heterocyclic ring system, i.e., one or more ring atoms may be a heteroatom, e.g., nitrogen, oxygen, sulfur. The cyclic carrier may be a monocyclic ring system, or may contain two or more rings, e.g. fused rings. The cyclic carrier may be a fully saturated ring system, or it may contain one or more double bonds.

[0436] The ligand may be attached to the polynucleotide via a carrier. The carriers include (i) at least one “backbone attachment point,” preferably two “backbone attachment points” and (ii) at least one “tethering attachment point.” A “backbone attachment point” as used herein refers to a functional group, e.g. a hydroxyl group, or generally, a bond available for, and that is suitable for incorporation of the carrier into the backbone, e.g., the phosphate, or modified phosphate, e.g., sulfur containing, backbone, of a ribonucleic acid. A “tethering attachment point” (TAP) in some embodiments refers to a constituent ring atom of the cyclic carrier, e.g., a carbon atom or a heteroatom (distinct from an atom which provides a backbone attachment point), that connects a selected moiety. The moiety can be, e.g., a carbohydrate, e.g. monosaccharide, disaccharide, trisaccharide, tetrasaccharide, oligosaccharide and polysaccharide. Optionally, the selected moiety is connected by an intervening tether to the cyclic carrier. Thus, the cyclic carrier will often include a functional group, e.g., an amino group, or generally, provide a bond, that is suitable for incorporation or tethering of another chemical entity, e.g., a ligand to the constituent ring.

[0437] The RNAi agents may be conjugated to a ligand via a carrier, wherein the carrier can be cyclic group or acyclic group; preferably, the cyclic group is selected from pyrrolidinyl, pyrazolinyl, pyrazolidinyl, imidazolinyl, imidazolidinyl, piperidinyl, piperazinyl, [1,3]dioxolane, oxazolidinyl, isoxazolidinyl, morpholinyl, thiazolidinyl, isothiazolidinyl, quinoxalinyl, pyridazinonyl, tetrahydrofuryl and and decalin; preferably, the acyclic group is selected from serinol backbone or diethanolamine backbone.

[0438] In another embodiment of the invention, an iRNA agent comprises a sense strand and an antisense strand, each strand having 14 to 40 nucleotides. The RNAi agent may be represented by formula (L):

[0439] In formula (L), B1, B2, B3, B1′, B2′, B3′, and B4′ each are independently a nucleotide containing a modification selected from the group consisting of 2′-O-alkyl, 2′-substituted alkoxy, 2′-substituted alkyl, 2′-halo, ENA, and BNA/LNA. In one embodiment, B1, B2, B3, B1′, B2′, B3′, and B4′ each contain 2′-OMe modifications. In one embodiment, B1, B2, B3, B1′, B2′, B3′, and B4′ each contain 2′-OMe or 2′-F modifications. In one embodiment, at least one of B1, B2, B3, B1′, B2′, B3′, and B4′ contain 2′-O—N-methylacetamido (2′-O-NMA) modification.

[0440] C1 is a thermally destabilizing nucleotide placed at a site opposite to the seed region of the antisense strand (i.e., at positions 2-8 of the 5′-end of the antisense strand). For example, C1 is at a position of the sense strand that pairs with a nucleotide at positions 2-8 of the 5′-end of the antisense strand. In one example, C1 is at position 15 from the 5′-end of the sense strand. C1 nucleotide bears the thermally destabilizing modification which can include abasic modification; mismatch with the opposing nucleotide in the duplex; and sugar modification such as 2′-deoxy modification or acyclic nucleotide e.g., unlocked nucleic acids (UNA) or glycerol nucleic acid (GNA). In one embodiment, C1 has thermally destabilizing modification selected from the group consisting of: i) mismatch with the opposing nucleotide in the antisense strand; ii) abasic modification selected from the group consisting of:

[chemical structure]

and iii) sugar modification selected from the group consisting of:

[chemical structure]

wherein B is a modified or unmodified nucleobase, R¹ and R² independently are H, halogen, OR₃, or alkyl; and R₃ is H, alkyl, cycloalkyl, aryl, aralkyl, heteroaryl or sugar. In one embodiment, the thermally destabilizing modification in C1 is a mismatch selected from the group consisting of G:G, G:A, G:U, G:T, A:A, A:C, C:C, C:U, C:T, U:U, T:T, and U:T; and optionally, at least one nucleobase in the mismatch pair is a 2′-deoxy nucleobase. In one example, the thermally destabilizing modification in C1 is GNA or

[chemical structure]

[0441] T1, T1′, T2′, and T3′ each independently represent a nucleotide comprising a modification providing the nucleotide a steric bulk that is less or equal to the steric bulk of a 2′-OMe modification. A steric bulk refers to the sum of steric effects of a modification. Methods for determining steric effects of a modification of a nucleotide are known to one skilled in the art. The modification can be at the 2′ position of a ribose sugar of the nucleotide, or a modification to a non-ribose nucleotide, acyclic nucleotide, or the backbone of the nucleotide that is similar or equivalent to the 2′ position of the ribose sugar, and provides the nucleotide a steric bulk that is less than or equal to the steric bulk of a 2′-OMe modification. For example, T1, T1′, T2′, and T3′ are each independently selected from DNA, RNA, LNA, 2′-F, and 2′-F-5′-methyl. In one embodiment, T1 is DNA. In one embodiment, T1′ is DNA, RNA or LNA. In one embodiment, T2′ is DNA or RNA. In one embodiment, T3′ is DNA or RNA.

[0442] n¹, n³, and q¹ are independently 4 to 15 nucleotides in length.

[0443] n⁵, q³, and q⁷ are independently 1-6 nucleotide(s) in length.

[0444] n⁴, q², and q⁶ are independently 1-3 nucleotide(s) in length; alternatively, n⁴ is 0.

[0445] q⁵ is independently 0-10 nucleotide(s) in length.

[0446] n² and q⁴ are independently 0-3 nucleotide(s) in length.

[0447] Alternatively, n⁴ is 0-3 nucleotide(s) in length.

[0448] In one embodiment, n⁴ can be 0. In one example, n⁴ is 0, and q² and q⁶ are 1. In another example, n⁴ is 0, and q² and q⁶ are 1, with two phosphorothioate internucleotide linkage modifications within position 1-5 of the sense strand (counting from the 5′-end of the sense strand), and two phosphorothioate internucleotide linkage modifications at positions 1 and 2 and two phosphorothioate internucleotide linkage modifications within positions 18-23 of the antisense strand (counting from the 5′-end of the antisense strand).

[0449] In one embodiment, n⁴, q², and q⁶ are each 1.

[0450] In one embodiment, n², n⁴, q², q⁴, and q⁶ are each 1.

[0451] In one embodiment, C1 is at position 14-17 of the 5′-end of the sense strand, when the sense strand is 19-22 nucleotides in length, and n⁴ is 1. In one embodiment, C1 is at position 15 of the 5′-end of the sense strand

[0452] In one embodiment, T3′ starts at position 2 from the 5′ end of the antisense strand. In one example, T3′ is at position 2 from the 5′ end of the antisense strand and q⁶ is equal to 1.

[0453] In one embodiment, T1′ starts at position 14 from the 5′ end of the antisense strand. In one example, T1′ is at position 14 from the 5′ end of the antisense strand and q² is equal to 1.

[0454] In an exemplary embodiment, T3′ starts from position 2 from the 5′ end of the antisense strand and T1′ starts from position 14 from the 5′ end of the antisense strand. In one example, T3′ starts from position 2 from the 5′ end of the antisense strand and q⁶ is equal to 1 and T1′ starts from position 14 from the 5′ end of the antisense strand and q² is equal to 1.

[0455] In one embodiment, T1′ and T3′ are separated by 11 nucleotides in length (i.e. not counting the T1′ and T3′ nucleotides).

[0456] In one embodiment, T1′ is at position 14 from the 5′ end of the antisense strand. In one example, T1′ is at position 14 from the 5′ end of the antisense strand and q² is equal to 1, and the modification at the 2′ position or positions in a non-ribose, acyclic or backbone that provide less steric bulk than a 2′-OMe ribose.

[0457] In one embodiment, T3′ is at position 2 from the 5′ end of the antisense strand. In one example, T3′ is at position 2 from the 5′ end of the antisense strand and q⁶ is equal to 1, and the modification at the 2′ position or positions in a non-ribose, acyclic or backbone that provide less than or equal to steric bulk than a 2′-OMe ribose.

[0458] In one embodiment, T1 is at the cleavage site of the sense strand. In one example, T1 is at position 11 from the 5′ end of the sense strand, when the sense strand is 19-22 nucleotides in length, and n² is 1. In an exemplary embodiment, T1 is at the cleavage site of the sense strand at position 11 from the 5′ end of the sense strand, when the sense strand is 19-22 nucleotides in length, and n² is 1,

[0459] In one embodiment, T2′ starts at position 6 from the 5′ end of the antisense strand. In one example, T2′ is at positions 6-10 from the 5′ end of the antisense strand, and q⁴ is 1.

[0460] In an exemplary embodiment, T1 is at the cleavage site of the sense strand, for instance, at position 11 from the 5′ end of the sense strand, when the sense strand is 19-22 nucleotides in length, and n² is 1; T1′ is at position 14 from the 5′ end of the antisense strand, and q² is equal to 1, and the modification to T1′ is at the 2′ position of a ribose sugar or at positions in a non-ribose, acyclic or backbone that provide less steric bulk than a 2′-OMe ribose; T2′ is at positions 6-10 from the 5′ end of the antisense strand, and q⁴ is 1; and T3′ is at position 2 from the 5′ end of the antisense strand, and q⁶ is equal to 1, and the modification to T3′ is at the 2′ position or at positions in a non-ribose, acyclic or backbone that provide less than or equal to steric bulk than a 2′-OMe ribose.

[0461] In one embodiment, T2′ starts at position 8 from the 5′ end of the antisense strand. In one example, T2′ starts at position 8 from the 5′ end of the antisense strand, and q⁴ is 2.

[0462] In one embodiment, T2′ starts at position 9 from the 5′ end of the antisense strand. In one example, T2′ is at position 9 from the 5′ end of the antisense strand, and q⁴ is 1.

[0463] In one embodiment, B1′ is 2′-OMe or 2′-F, q¹ is 9, T1′ is 2′-F, q² is 1, B2′ is 2′-OMe or 2′-F, q³ is 4, T2′ is 2′-F, q⁴ is 1, B3′ is 2′-OMe or 2′-F, q⁵ is 6, T3′ is 2′-F, q⁶ is 1, B4′ is 2′-OMe, and q⁷ is 1; with two phosphorothioate internucleotide linkage modifications within positions 1-5 of the sense strand (counting from the 5′-end of the sense strand), and two phosphorothioate internucleotide linkage modifications at positions 1 and 2 and two phosphorothioate internucleotide linkage modifications within positions 18-23 of the antisense strand (counting from the 5′-end of the antisense strand).

[0464] In one embodiment, n⁴ is 0, B3 is 2′-OMe, n⁵ is 3, B1′ is 2′-OMe or 2′-F, q¹ is 9, T1′ is 2′-F, q² is 1, B2′ is 2′-OMe or 2′-F, q³ is 4, T2′ is 2′-F, q⁴ is 1, B3′ is 2′-OMe or 2′-F, q⁵ is 6, T3′ is 2′-F, q⁶ is 1, B4′ is 2′-OMe, and q⁷ is 1; with two phosphorothioate internucleotide linkage modifications within positions 1-5 of the sense strand (counting from the 5′-end of the sense strand), and two phosphorothioate internucleotide linkage modifications at positions 1 and 2 and two phosphorothioate internucleotide linkage modifications within positions 18-23 of the antisense strand (counting from the 5′-end of the antisense strand).

[0465] In one embodiment, B1 is 2′-OMe or 2′-F, n¹ is 8, T1 is 2′F, n² is 3, B2 is 2′-OMe, n³ is 7, n⁴ is 0, B3 is 2′OMe, n⁵ is 3, B1′ is 2′-OMe or 2′-F, q¹ is 9, T1′ is 2′-F, q² is 1, B2′ is 2′-OMe or 2′-F, q³ is 4, T2′ is 2′-F, q⁴ is 2, B3′ is 2′-OMe or 2′-F, q⁵ is 5, T3′ is 2′-F, q⁶ is 1, B4′ is 2′-OMe, and q⁷ is 1.

[0466] In one embodiment, B1 is 2′-OMe or 2′-F, n¹ is 8, T1 is 2′F, n² is 3, B2 is 2′-OMe, n³ is 7, n⁴ is 0, B3 is 2′-OMe, n⁵ is 3, B1′ is 2′-OMe or 2′-F, q¹ is 9, T1′ is 2′-F, q² is 1, B2′ is 2′-OMe or 2′-F, q³ is 4, T2′ is 2′-F, q⁴ is 2, B3′ is 2′-OMe or 2′-F, q⁵ is 5, T3′ is 2′-F, q⁶ is 1, B4′ is 2′-OMe, and q⁷ is 1; with two phosphorothioate internucleotide linkage modifications within positions 1-5 of the sense strand (counting from the 5′-end of the sense strand), and two phosphorothioate internucleotide linkage modifications at positions 1 and 2 and two phosphorothioate internucleotide linkage modifications within positions 18-23 of the antisense strand (counting from the 5′-end of the antisense strand).

[0467] In one embodiment, B1 is 2′-OMe or 2′-F, n¹ is 6, T1 is 2′F, n² is 3, B2 is 2′-OMe, n³ is 7, n⁴ is 0, B3 is 2′OMe, n⁵ is 3, B1′ is 2′-OMe or 2′-F, q¹ is 7, T1′ is 2′-F, q² is 1, B2′ is 2′-OMe or 2′-F, q³ is 4, T2′ is 2′-F, q⁴ is 2, B3′ is 2′-OMe or 2′-F, q⁵ is 5, T3′ is 2′-F, q⁶ is 1, B4′ is 2′-OMe, and q⁷ is 1.

[0468] In one embodiment, B1 is 2′-OMe or 2′-F, n¹ is 6, T1 is 2′F, n² is 3, B2 is 2′-OMe, n³ is 7, n⁴ is 0, B3 is 2′-OMe, n⁵ is 3, B1′ is 2′-OMe or 2′-F, q¹ is 7, T1′ is 2′-F, q² is 1, B2′ is 2′-OMe or 2′-F, q³ is 4, T2′ is 2′-F, q⁴ is 2, B3′ is 2′-OMe or 2′-F, q⁵ is 5, T3′ is 2′-F, q⁶ is 1, B4′ is 2′-OMe, and q⁷ is 1; with two phosphorothioate internucleotide linkage modifications within positions 1-5 of the sense strand (counting from the 5′-end of the sense strand), and two phosphorothioate internucleotide linkage modifications at positions 1 and 2 and two phosphorothioate internucleotide linkage modifications within positions 18-23 of the antisense strand (counting from the 5′-end of the antisense strand).

[0469] In one embodiment, B1 is 2′-OMe or 2′-F, n¹ is 8, T1 is 2′F, n² is 3, B2 is 2′-OMe, n³ is 7, n⁴ is 0, B3 is 2′OMe, n⁵ is 3, B1′ is 2′-OMe or 2′-F, q¹ is 9, T1′ is 2′-F, q² is 1, B2′ is 2′-OMe or 2′-F, q³ is 4, T2′ is 2′-F, q⁴ is 1, B3′ is 2′-OMe or 2′-F, q⁵ is 6, T3′ is 2′-F, q⁶ is 1, B4′ is 2′-OMe, and q⁷ is 1.

[0470] In one embodiment, B1 is 2′-OMe or 2′-F, n¹ is 8, T1 is 2′F, n² is 3, B2 is 2′-OMe, n³ is 7, n⁴ is 0, B3 is 2′-OMe, n⁵ is 3, B1′ is 2′-OMe or 2′-F, q¹ is 9, T1′ is 2′-F, q² is 1, B2′ is 2′-OMe or 2′-F, q³ is 4, T2′ is 2′-F, q⁴ is 1, B3′ is 2′-OMe or 2′-F, q⁵ is 6, T3′ is 2′-F, q⁶ is 1, B4′ is 2′-OMe, and q⁷ is 1; with two phosphorothioate internucleotide linkage modifications within positions 1-5 of the sense strand (counting from the 5′-end of the sense strand), and two phosphorothioate internucleotide linkage modifications at positions 1 and 2 and two phosphorothioate internucleotide linkage modifications within positions 18-23 of the antisense strand (counting from the 5′-end of the antisense strand).

[0471] In one embodiment, B1 is 2′-OMe or 2′-F, n¹ is 8, T1 is 2′F, n² is 3, B2 is 2′-OMe, n³ is 7, n⁴ is 0, B3 is 2′OMe, n⁵ is 3, B1′ is 2′-OMe or 2′-F, q¹ is 9, T1′ is 2′-F, q² is 1, B2′ is 2′-OMe or 2′-F, q³ is 5, T2′ is 2′-F, q⁴ is 1, B3′ is 2′-OMe or 2′-F, q⁵ is 5, T3′ is 2′-F, q⁶ is 1, B4′ is 2′-OMe, and q⁷ is 1; optionally with at least 2 additional TT at the 3′-end of the antisense strand.

[0472] In one embodiment, B1 is 2′-OMe or 2′-F, n¹ is 8, T1 is 2′F, n² is 3, B2 is 2′-OMe, n³ is 7, n⁴ is 0, B3 is 2′-OMe, n⁵ is 3, B1′ is 2′-OMe or 2′-F, q¹ is 9, T1′ is 2′-F, q² is 1, B2′ is 2′-OMe or 2′-F, q³ is 5, T2′ is 2′-F, q⁴ is 1, B3′ is 2′-OMe or 2′-F, q⁵ is 5, T3′ is 2′-F, q⁶ is 1, B4′ is 2′-OMe, and q⁷ is 1; optionally with at least 2 additional TT at the 3′-end of the antisense strand; with two phosphorothioate internucleotide linkage modifications within positions 1-5 of the sense strand (counting from the 5′-end of the sense strand), and two phosphorothioate internucleotide linkage modifications at positions 1 and 2 and two phosphorothioate internucleotide linkage modifications within positions 18-23 of the antisense strand (counting from the 5′-end of the antisense strand).

[0473] In one embodiment, B1 is 2′-OMe or 2′-F, n¹ is 8, T1 is 2′F, n² is 3, B2 is 2′-OMe, n³ is 7, n⁴ is 0, B3 is 2′-OMe, n³ is 3, B1′ is 2′-OMe or 2′-F, q¹ is 9, T1′ is 2′-F, q² is 1, B2′ is 2′-OMe or 2′-F, q³ is 4, q⁴ is 0, B3′ is 2′-OMe or 2′-F, q⁵ is 7, T3′ is 2′-F, q⁶ is 1, B4′ is 2′- OMe, and q⁷ is 1.

[0474] In one embodiment, B1 is 2′-OMe or 2′-F, n¹ is 8, T1 is 2′F, n² is 3, B2 is 2′-OMe, n³ is 7, n⁴ is 0, B3 is 2′-OMe, n⁵ is 3, B1′ is 2′-OMe or 2′-F, q¹ is 9, T1′ is 2′-F, q² is 1, B2′ is 2′-OMe or 2′-F, q³ is 4, q⁴ is 0, B3′ is 2′-OMe or 2′-F, q⁵ is 7, T3′ is 2′-F, q⁶ is 1, B4′ is 2′- OMe, and q⁷ is 1; with two phosphorothioate internucleotide linkage modifications within positions 1-5 of the sense strand (counting from the 5′-end), and two phosphorothioate internucleotide linkage modifications at positions 1 and 2 and two phosphorothioate internucleotide linkage modifications within positions 18-23 of the antisense strand (counting from the 5′-end).

[0475] In one embodiment, B1 is 2′-OMe or 2′-F, n¹ is 8, T1 is 2′F, n² is 3, B2 is 2′-OMe, n³ is 7, n⁴ is 0, B3 is 2′OMe, n⁵ is 3, B1′ is 2′-OMe or 2′-F, q¹ is 9, T1′ is 2′-F, q² is 1, B2′ is 2′-OMe or 2′-F, q³ is 4, T2′ is 2′-F, q⁴ is 2, B3′ is 2′-OMe or 2′-F, q⁵ is 5, T3′ is 2′-F, q⁶ is 1, B4′ is 2′-F, and q⁷ is 1.

[0476] In one embodiment, B1 is 2′-OMe or 2′-F, n¹ is 8, T1 is 2′F, n² is 3, B2 is 2′-OMe, n³ is 7, n⁴ is 0, B3 is 2′-OMe, n⁵ is 3, B1′ is 2′-OMe or 2′-F, q¹ is 9, T1′ is 2′-F, q² is 1, B2′ is 2′-OMe or 2′-F, q³ is 4, T2′ is 2′-F, q⁴ is 2, B3′ is 2′-OMe or 2′-F, q⁵ is 5, T3′ is 2′-F, q⁶ is 1, B4′ is 2′-F, and q⁷ is 1; with two phosphorothioate internucleotide linkage modifications within positions 1-5 of the sense strand (counting from the 5′-end of the sense strand), and two phosphorothioate internucleotide linkage modifications at positions 1 and 2 and two phosphorothioate internucleotide linkage modifications within positions 18-23 of the antisense strand (counting from the 5′-end of the antisense strand).

[0477] In one embodiment, B1 is 2′-OMe or 2′-F, n¹ is 8, T1 is 2′F, n² is 3, B2 is 2′-OMe, n³ is 7, n⁴ is 0, B3 is 2′-OMe, n⁵ is 3, B1′ is 2′-OMe or 2′-F, q¹ is 9, T1′ is 2′-F, q² is 1, B2′ is 2′-OMe or 2′-F, q³ is 4, q⁴ is 0, B3′ is 2′-OMe or 2′-F, q⁵ is 7, T3′ is 2′-F, q⁶ is 1, B4′ is 2′-F, and q⁷ is 1.

[0478] In one embodiment, B1 is 2′-OMe or 2′-F, n¹ is 8, T1 is 2′F, n² is 3, B2 is 2′-OMe, n³ is 7, n⁴ is 0, B3 is 2′-OMe, n⁵ is 3, B1′ is 2′-OMe or 2′-F, q¹ is 9, T1′ is 2′-F, q² is 1, B2′ is 2′-OMe or 2′-F, q³ is 4, q⁴ is 0, B3′ is 2′-OMe or 2′-F, q⁵ is 7, T3′ is 2′-F, q⁶ is 1, B4′ is 2′-F, and q⁷ is 1; with two phosphorothioate internucleotide linkage modifications within positions 1-5 of the sense strand (counting from the 5′-end of the sense strand), and two phosphorothioate internucleotide linkage modifications at positions 1 and 2 and two phosphorothioate internucleotide linkage modifications within positions 18-23 of the antisense strand (counting from the 5′-end of the antisense strand).

[0479] The RNAi agent can comprise a phosphorus-containing group at the 5′-end of the sense strand or antisense strand. The 5′-end phosphorus-containing group can be 5′-end phosphate (5′-P), 5′-end phosphorothioate (5′-PS), 5′-end phosphorodithioate (5′-PS2), 5′-end vinylphosphonate (5′-VP), 5′-end methylphosphonate (MePhos), or 5′-deoxy-5′-C-malonyl

[chemical structure]

When the 5′-end phosphorus-containing group is 5′-end vinylphosphonate (5′-VP), the 5′-VP can be either 5′-E-VP isomer

[chemical structure]

5′-Z-VP isomer

[chemical structure]

or mixtures thereof.

[0480] In one embodiment, the RNAi agent comprises a phosphorus-containing group at the 5′-end of the sense strand. In one embodiment, the RNAi agent comprises a phosphorus-containing group at the 5′-end of the antisense strand.

[0481] In one embodiment, the RNAi agent comprises a 5′-P. In one embodiment, the RNAi agent comprises a 5′-P in the antisense strand.

[0482] In one embodiment, the RNAi agent comprises a 5′-PS. In one embodiment, the RNAi agent comprises a 5′-PS in the antisense strand.

[0483] In one embodiment, the RNAi agent comprises a 5′-VP. In one embodiment, the RNAi agent comprises a 5′-VP in the antisense strand. In one embodiment, the RNAi agent comprises a 5′-E-VP in the antisense strand. In one embodiment, the RNAi agent comprises a 5′-Z-VP in the antisense strand.

[0484] In one embodiment, the RNAi agent comprises a 5′-PS2. In one embodiment, the RNAi agent comprises a 5′-PS2 in the antisense strand.

[0485] In one embodiment, the RNAi agent comprises a 5′-PS2. In one embodiment, the RNAi agent comprises a 5′-deoxy-5′-C-malonyl in the antisense strand.

[0486] In one embodiment, B1 is 2′-OMe or 2′-F, n¹ is 8, T1 is 2′F, n² is 3, B2 is 2′-OMe, n³ is 7, n⁴ is 0, B3 is 2′OMe, n⁵ is 3, B1′ is 2′-OMe or 2′-F, q¹ is 9, T1′ is 2′-F, q² is 1, B2′ is 2′-OMe or 2′-F, q³ is 4, T2′ is 2′-F, q⁴ is 2, B3′ is 2′-OMe or 2′-F, q⁵ is 5, T3′ is 2′-F, q⁶ is 1, B4′ is 2′-OMe, and q⁷ is 1. The RNAi agent also comprises a 5′-PS.

[0487] In one embodiment, B1 is 2′-OMe or 2′-F, n¹ is 8, T1 is 2′F, n² is 3, B2 is 2′-OMe, n³ is 7, n⁴ is 0, B3 is 2′OMe, n⁵ is 3, B1′ is 2′-OMe or 2′-F, q¹ is 9, T1′ is 2′-F, q² is 1, B2′ is 2′-OMe or 2′-F, q³ is 4, T2′ is 2′-F, q⁴ is 2, B3′ is 2′-OMe or 2′-F, q⁵ is 5, T3′ is 2′-F, q⁶ is 1, B4′ is 2′-OMe, and q⁷ is 1. The RNAi agent also comprises a 5′-P.

[0488] In one embodiment, B1 is 2′-OMe or 2′-F, n¹ is 8, T1 is 2′F, n² is 3, B2 is 2′-OMe, n³ is 7, n⁴ is 0, B3 is 2′OMe, n⁵ is 3, B1′ is 2′-OMe or 2′-F, q¹ is 9, T1′ is 2′-F, q² is 1, B2′ is 2′-OMe or 2′-F, q³ is 4, T2′ is 2′-F, q⁴ is 2, B3′ is 2′-OMe or 2′-F, q⁵ is 5, T3′ is 2′-F, q⁶ is 1, B4′ is 2′-OMe, and q⁷ is 1. The RNAi agent also comprises a 5′-VP. The 5′-VP may be 5′-E-VP, 5′-Z-VP, or combination thereof.

[0489] In one embodiment, B1 is 2′-OMe or 2′-F, n¹ is 8, T1 is 2′F, n² is 3, B2 is 2′-OMe, n³ is 7, n⁴ is 0, B3 is 2′OMe, n⁵ is 3, B1′ is 2′-OMe or 2′-F, q¹ is 9, T1′ is 2′-F, q² is 1, B2′ is 2′-OMe or 2′-F, q³ is 4, T2′ is 2′-F, q⁴ is 2, B3′ is 2′-OMe or 2′-F, q⁵ is 5, T3′ is 2′-F, q⁶ is 1, B4′ is 2′-OMe, and q⁷ is 1. The RNAi agent also comprises a 5′-PS2.

[0490] In one embodiment, B1 is 2′-OMe or 2′-F, n¹ is 8, T1 is 2′F, n² is 3, B2 is 2′-OMe, n³ is 7, n⁴ is 0, B3 is 2′OMe, n⁵ is 3, B1′ is 2′-OMe or 2′-F, q¹ is 9, T1′ is 2′-F, q² is 1, B2′ is 2′-OMe or 2′-F, q³ is 4, T2′ is 2′-F, q⁴ is 2, B3′ is 2′-OMe or 2′-F, q⁵ is 5, T3′ is 2′-F, q⁶ is 1, B4′ is 2′-OMe, and q⁷ is 1. The RNAi agent also comprises a 5′-deoxy-5′-C′-malonyl.

[0491] In one embodiment, B1 is 2′-OMe or 2′-F, n¹ is 8, T1 is 2′F, n² is 3, B2 is 2′-OMe, n³ is 7, n⁴ is 0, B3 is 2′-OMe, n⁵ is 3, B1′ is 2′-OMe or 2′-F, q¹ is 9, T1′ is 2′-F, q² is 1, B2′ is 2′-OMe or 2′-F, q³ is 4, T2′ is 2′-F, q⁴ is 2, B3′ is 2′-OMe or 2′-F, q⁵ is 5, T3′ is 2′-F, q⁶ is 1, B4′ is 2′-OMe, and q⁷ is 1; with two phosphorothioate internucleotide linkage modifications within position 1-5 of the sense strand (counting from the 5′-end of the sense strand), and two phosphorothioate internucleotide linkage modifications at positions 1 and 2 and two phosphorothioate internucleotide linkage modifications within positions 18-23 of the antisense strand (counting from the 5′-end of the antisense strand). The RNAi agent also comprises a 5′-P.

[0492] In one embodiment, B1 is 2′-OMe or 2′-F, n¹ is 8, T1 is 2′F, n² is 3, B2 is 2′-OMe, n³ is 7, n⁴ is 0, B3 is 2′-OMe, n⁵ is 3, B1′ is 2′-OMe or 2′-F, q¹ is 9, T1′ is 2′-F, q² is 1, B2′ is 2′-OMe or 2′-F, q³ is 4, T2′ is 2′-F, q⁴ is 2, B3′ is 2′-OMe or 2′-F, q⁵ is 5, T3′ is 2′-F, q⁶ is 1, B4′ is 2′-OMe, and q⁷ is 1; with two phosphorothioate internucleotide linkage modifications within position 1-5 of the sense strand (counting from the 5′-end of the sense strand), and two phosphorothioate internucleotide linkage modifications at positions 1 and 2 and two phosphorothioate internucleotide linkage modifications within positions 18-23 of the antisense strand (counting from the 5′-end of the antisense strand). The RNAi agent also comprises a 5′-PS.

[0493] In one embodiment, B1 is 2′-OMe or 2′-F, n¹ is 8, T1 is 2′F, n² is 3, B2 is 2′-OMe, n³ is 7, n⁴ is 0, B3 is 2′-OMe, n⁵ is 3, B1′ is 2′-OMe or 2′-F, q¹ is 9, T1′ is 2′-F, q² is 1, B2′ is 2′-OMe or 2′-F, q³ is 4, T2′ is 2′-F, q⁴ is 2, B3′ is 2′-OMe or 2′-F, q⁵ is 5, T3′ is 2′-F, q⁶ is 1, B4′ is 2′-OMe, and q⁷ is 1; with two phosphorothioate internucleotide linkage modifications within position 1-5 of the sense strand (counting from the 5′-end of the sense strand), and two phosphorothioate internucleotide linkage modifications at positions 1 and 2 and two phosphorothioate internucleotide linkage modifications within positions 18-23 of the antisense strand (counting from the 5′-end of the antisense strand). The RNAi agent also comprises a 5′-VP. The 5′-VP may be 5′-E-VP, 5′-Z-VP, or combination thereof.

[0494] In one embodiment, B1 is 2′-OMe or 2′-F, n¹ is 8, T1 is 2′F, n² is 3, B2 is 2′-OMe, n³ is 7, n⁴ is 0, B3 is 2′-OMe, n⁵ is 3, B1′ is 2′-OMe or 2′-F, q¹ is 9, T1′ is 2′-F, q² is 1, B2′ is 2′-OMe or 2′-F, q³ is 4, T2′ is 2′-F, q⁴ is 2, B3′ is 2′-OMe or 2′-F, q⁵ is 5, T3′ is 2′-F, q⁶ is 1, B4′ is 2′-OMe, and q⁷ is 1; with two phosphorothioate internucleotide linkage modifications within position 1-5 of the sense strand (counting from the 5′-end of the sense strand), and two phosphorothioate internucleotide linkage modifications at positions 1 and 2 and two phosphorothioate internucleotide linkage modifications within positions 18-23 of the antisense strand (counting from the 5′-end of the antisense strand). The RNAi agent also comprises a 5′-PS2.

[0495] In one embodiment, B1 is 2′-OMe or 2′-F, n¹ is 8, T1 is 2′F, n² is 3, B2 is 2′-OMe, n³ is 7, n⁴ is 0, B3 is 2′-OMe, n⁵ is 3, B1′ is 2′-OMe or 2′-F, q¹ is 9, T1′ is 2′-F, q² is 1, B2′ is 2′-OMe or 2′-F, q³ is 4, T2′ is 2′-F, q⁴ is 2, B3′ is 2′-OMe or 2′-F, q⁵ is 5, T3′ is 2′-F, q⁶ is 1, B4′ is 2′-OMe, and q⁷ is 1; with two phosphorothioate internucleotide linkage modifications within position 1-5 of the sense strand (counting from the 5′-end of the sense strand), and two phosphorothioate internucleotide linkage modifications at positions 1 and 2 and two phosphorothioate internucleotide linkage modifications within positions 18-23 of the antisense strand (counting from the 5′-end of the antisense strand). The RNAi agent also comprises a 5′-deoxy-5′-C′-malonyl.

[0496] In one embodiment, B1 is 2′-OMe or 2′-F, n¹ is 8, T1 is 2′F, n² is 3, B2 is 2′-OMe, n³ is 7, n⁴ is 0, B3 is 2′-OMe, n⁵ is 3, B1′ is 2′-OMe or 2′-F, q¹ is 9, T1′ is 2′-F, q² is 1, B2′ is 2′-OMe or 2′-F, q³ is 4, q⁴ is 0, B3′ is 2′-OMe or 2′-F, q⁵ is 7, T3′ is 2′-F, q⁶ is 1, B4′ is 2′- OMe, and q⁷ is 1. The RNAi agent also comprises a 5′-P.

[0497] In one embodiment, B1 is 2′-OMe or 2′-F, n¹ is 8, T1 is 2′F, n² is 3, B2 is 2′-OMe, n³ is 7, n⁴ is 0, B3 is 2′-OMe, n⁵ is 3, B1′ is 2′-OMe or 2′-F, q¹ is 9, T1′ is 2′-F, q² is 1, B2′ is 2′-OMe or 2′-F, q³ is 4, q⁴ is 0, B3′ is 2′-OMe or 2′-F, q⁵ is 7, T3′ is 2′-F, q⁶ is 1, B4′ is 2′- OMe, and q⁷ is 1. The dsRNA agent also comprises a 5′-PS.

[0498] In one embodiment, B1 is 2′-OMe or 2′-F, n¹ is 8, T1 is 2′F, n² is 3, B2 is 2′-OMe, n³ is 7, n⁴ is 0, B3 is 2′-OMe, n⁵ is 3, B1′ is 2′-OMe or 2′-F, q¹ is 9, T1′ is 2′-F, q² is 1, B2′ is 2′-OMe or 2′-F, q³ is 4, q⁴ is 0, B3′ is 2′-OMe or 2′-F, q⁵ is 7, T3′ is 2′-F, q⁶ is 1, B4′ is 2′- OMe, and q⁷ is 1. The RNAi agent also comprises a 5′-VP. The 5′-VP may be 5′-E-VP, 5′-Z-VP, or combination thereof.

[0499] In one embodiment, B1 is 2′-OMe or 2′-F, n¹ is 8, T1 is 2′F, n² is 3, B2 is 2′-OMe, n³ is 7, n⁴ is 0, B3 is 2′-OMe, n⁵ is 3, B1′ is 2′-OMe or 2′-F, q¹ is 9, T1′ is 2′-F, q² is 1, B2′ is 2′-OMe or 2′-F, q³ is 4, q⁴ is 0, B3′ is 2′-OMe or 2′-F, q⁵ is 7, T3′ is 2′-F, q⁶ is 1, B4′ is 2′- OMe, and q⁷ is 1. The RNAi agent also comprises a 5′-PS2.

[0500] In one embodiment, B1 is 2′-OMe or 2′-F, n¹ is 8, T1 is 2′F, n² is 3, B2 is 2′-OMe, n³ is 7, n⁴ is 0, B3 is 2′-OMe, n⁵ is 3, B1′ is 2′-OMe or 2′-F, q¹ is 9, T1′ is 2′-F, q² is 1, B2′ is 2′-OMe or 2′-F, q³ is 4, q⁴ is 0, B3′ is 2′-OMe or 2′-F, q⁵ is 7, T3′ is 2′-F, q⁶ is 1, B4′ is 2′- OMe, and q⁷ is 1. The RNAi agent also comprises a 5′-deoxy-5′-C′-malonyl.

[0501] In one embodiment, B1 is 2′-OMe or 2′-F, n¹ is 8, T1 is 2′F, n² is 3, B2 is 2′-OMe, n³ is 7, n⁴ is 0, B3 is 2′-OMe, n⁵ is 3, B1′ is 2′-OMe or 2′-F, q¹ is 9, T1′ is 2′-F, q² is 1, B2′ is 2′-OMe or 2′-F, q³ is 4, q⁴ is 0, B3′ is 2′-OMe or 2′-F, q⁵ is 7, T3′ is 2′-F, q⁶ is 1, B4′ is 2′- OMe, and q⁷ is 1; with two phosphorothioate internucleotide linkage modifications within position 1-5 of the sense strand (counting from the 5′-end), and two phosphorothioate internucleotide linkage modifications at positions 1 and 2 and two phosphorothioate internucleotide linkage modifications within positions 18-23 of the antisense strand (counting from the 5′-end). The RNAi agent also comprises a 5′-P.

[0502] In one embodiment, B1 is 2′-OMe or 2′-F, n¹ is 8, T1 is 2′F, n² is 3, B2 is 2′-OMe, n³ is 7, n⁴ is 0, B3 is 2′-OMe, n⁵ is 3, B1′ is 2′-OMe or 2′-F, q¹ is 9, T1′ is 2′-F, q² is 1, B2′ is 2′-OMe or 2′-F, q³ is 4, q⁴ is 0, B3′ is 2′-OMe or 2′-F, q⁵ is 7, T3′ is 2′-F, q⁶ is 1, B4′ is 2′- OMe, and q⁷ is 1; with two phosphorothioate internucleotide linkage modifications within position 1-5 of the sense strand (counting from the 5′-end), and two phosphorothioate internucleotide linkage modifications at positions 1 and 2 and two phosphorothioate internucleotide linkage modifications within positions 18-23 of the antisense strand (counting from the 5′-end). The RNAi agent also comprises a 5′-PS.

[0503] In one embodiment, B1 is 2′-OMe or 2′-F, n¹ is 8, T1 is 2′F, n² is 3, B2 is 2′-OMe, n³ is 7, n⁴ is 0, B3 is 2′-OMe, n⁵ is 3, B1′ is 2′-OMe or 2′-F, q¹ is 9, T1′ is 2′-F, q² is 1, B2′ is 2′-OMe or 2′-F, q³ is 4, q⁴ is 0, B3′ is 2′-OMe or 2′-F, q⁵ is 7, T3′ is 2′-F, q⁶ is 1, B4′ is 2′- OMe, and q⁷ is 1; with two phosphorothioate internucleotide linkage modifications within position 1-5 of the sense strand (counting from the 5′-end), and two phosphorothioate internucleotide linkage modifications at positions 1 and 2 and two phosphorothioate internucleotide linkage modifications within positions 18-23 of the antisense strand (counting from the 5′-end). The RNAi agent also comprises a 5′-VP. The 5′-VP may be 5′-F-VP, 5′-Z-VP, or combination thereof.

[0504] In one embodiment, B1 is 2′-OMe or 2′-F, n¹ is 8, T1 is 2′F, n² is 3, B2 is 2′-OMe, n³ is 7, n⁴ is 0, B3 is 2′-OMe, n⁵ is 3, B1′ is 2′-OMe or 2′-F, q¹ is 9, T1′ is 2′-F, q² is 1, B2′ is 2′-OMe or 2′-F, q³ is 4, q⁴ is 0, B3′ is 2′-OMe or 2′-F, q⁵ is 7, T3′ is 2′-F, q⁶ is 1, B4′ is 2′- OMe, and q⁷ is 1; with two phosphorothioate internucleotide linkage modifications within position 1-5 of the sense strand (counting from the 5′-end), and two phosphorothioate internucleotide linkage modifications at positions 1 and 2 and two phosphorothioate internucleotide linkage modifications within positions 18-23 of the antisense strand (counting from the 5′-end). The RNAi agent also comprises a 5′-PS2.

[0505] In one embodiment, B1 is 2′-OMe or 2′-F, n¹ is 8, T1 is 2′F, n² is 3, B2 is 2′-OMe, n³ is 7, n⁴ is 0, B3 is 2′-OMe, n⁵ is 3, B1′ is 2′-OMe or 2′-F, q¹ is 9, T1′ is 2′-F, q² is 1, B2′ is 2′-OMe or 2′-F, q³ is 4, q⁴ is 0, B3′ is 2′-OMe or 2′-F, q⁵ is 7, T3′ is 2′-F, q⁶ is 1, B4′ is 2′- OMe, and q⁷ is 1; with two phosphorothioate internucleotide linkage modifications within position 1-5 of the sense strand (counting from the 5′-end), and two phosphorothioate internucleotide linkage modifications at positions 1 and 2 and two phosphorothioate internucleotide linkage modifications within positions 18-23 of the antisense strand (counting from the 5′-end). The RNAi agent also comprises a 5′-deoxy-5′-C′-malonyl.

[0506] In one embodiment, B1 is 2′-OMe or 2′-F, n¹ is 8, T1 is 2′F, n² is 3, B2 is 2′-OMe, n³ is 7, n⁴ is 0, B3 is 2′OMe, n⁵ is 3, B1′ is 2′-OMe or 2′-F, q¹ is 9, T1′ is 2′-F, q² is 1, B2′ is 2′-OMe or 2′-F, q³ is 4, T2′ is 2′-F, q⁴ is 2, B3′ is 2′-OMe or 2′-F, q⁵ is 5, T3′ is 2′-F, q⁶ is 1, B4′ is 2′-F, and q⁷ is 1. The RNAi agent also comprises a 5′-P.

[0507] In one embodiment, B1 is 2′-OMe or 2′-F, n¹ is 8, T1 is 2′F, n² is 3, B2 is 2′-OMe, n³ is 7, n⁴ is 0, B3 is 2′OMe, n⁵ is 3, B1′ is 2′-OMe or 2′-F, q¹ is 9, T1′ is 2′-F, q² is 1, B2′ is 2′-OMe or 2′-F, q³ is 4, T2′ is 2′-F, q⁴ is 2, B3′ is 2′-OMe or 2′-F, q⁵ is 5, T3′ is 2′-F, q⁶ is 1, B4′ is 2′-F, and q⁷ is 1. The RNAi agent also comprises a 5′-PS.

[0508] In one embodiment, B1 is 2′-OMe or 2′-F, n¹ is 8, T1 is 2′F, n² is 3, B2 is 2′-OMe, n³ is 7, n⁴ is 0, B3 is 2′OMe, n⁵ is 3, B1′ is 2′-OMe or 2′-F, q¹ is 9, T1′ is 2′-F, q² is 1, B2′ is 2′-OMe or 2′-F, q³ is 4, T2′ is 2′-F, q⁴ is 2, B3′ is 2′-OMe or 2′-F, q⁵ is 5, T3′ is 2′-F, q⁶ is 1, B4′ is 2′-F, and q⁷ is 1. The RNAi agent also comprises a 5′-VP. The 5′-VP may be 5′-E-VP, 5′-Z-VP, or combination thereof.

[0509] In one embodiment, B1 is 2′-OMe or 2′-F, n¹ is 8, T1 is 2′F, n² is 3, B2 is 2′-OMe, n³ is 7, n⁴ is 0, B3 is 2′OMe, n⁵ is 3, B1′ is 2′-OMe or 2′-F, q¹ is 9, T1′ is 2′-F, q² is 1, B2′ is 2′-OMe or 2′-F, q³ is 4, T2′ is 2′-F, q⁴ is 2, B3′ is 2′-OMe or 2′-F, q⁵ is 5, T3′ is 2′-F, q⁶ is 1, B4′ is 2′-F, and q⁷ is 1. The dsRNAi RNA agent also comprises a 5′-PS2.

[0510] In one embodiment, B1 is 2′-OMe or 2′-F, n¹ is 8, T1 is 2′F, n² is 3, B2 is 2′-OMe, n³ is 7, n⁴ is 0, B3 is 2′OMe, n⁵ is 3, B1′ is 2′-OMe or 2′-F, q¹ is 9, T1′ is 2′-F, q² is 1, B2′ is 2′-OMe or 2′-F, q³ is 4, T2′ is 2′-F, q⁴ is 2, B3′ is 2′-OMe or 2′-F, q⁵ is 5, T3′ is 2′-F, q⁶ is 1, B4′ is 2′-F, and q⁷ is 1. The RNAi agent also comprises a 5′-deoxy-5′-C′-malonyl.

[0511] In one embodiment, B1 is 2′-OMe or 2′-F, n¹ is 8, T1 is 2′F, n² is 3, B2 is 2′-OMe, n³ is 7, n⁴ is 0, B3 is 2′-OMe, n⁵ is 3, B1′ is 2′-OMe or 2′-F, q¹ is 9, T1′ is 2′-F, q² is 1, B2′ is 2′-OMe or 2′-F, q³ is 4, T2′ is 2′-F, q⁴ is 2, B3′ is 2′-OMe or 2′-F, q⁵ is 5, T3′ is 2′-F, q⁶ is 1, B4′ is 2′-F, and q⁷ is 1; with two phosphorothioate internucleotide linkage modifications within position 1-5 of the sense strand (counting from the 5′-end of the sense strand), and two phosphorothioate internucleotide linkage modifications at positions 1 and 2 and two phosphorothioate internucleotide linkage modifications within positions 18-23 of the antisense strand (counting from the 5′-end of the antisense strand). The RNAi agent also comprises a 5′-P.

[0512] In one embodiment, B1 is 2′-OMe or 2′-F, n¹ is 8, T1 is 2′F, n² is 3, B2 is 2′-OMe, n³ is 7, n⁴ is 0, B3 is 2′-OMe, n⁵ is 3, B1′ is 2′-OMe or 2′-F, q¹ is 9, T1′ is 2′-F, q² is 1, B2′ is 2′-OMe or 2′-F, q³ is 4, T2′ is 2′-F, q⁴ is 2, B3′ is 2′-OMe or 2′-F, q⁵ is 5, T3′ is 2′-F, q⁶ is 1, B4′ is 2′-F, and q⁷ is 1; with two phosphorothioate internucleotide linkage modifications within position 1-5 of the sense strand (counting from the 5′-end of the sense strand), and two phosphorothioate internucleotide linkage modifications at positions 1 and 2 and two phosphorothioate internucleotide linkage modifications within positions 18-23 of the antisense strand (counting from the 5′-end of the antisense strand). The RNAi agent also comprises a 5′-PS.

[0513] In one embodiment, B1 is 2′-OMe or 2′-F, n¹ is 8, T1 is 2′F, n² is 3, B2 is 2′-OMe, n³ is 7, n⁴ is 0, B3 is 2′-OMe, n⁵ is 3, B1′ is 2′-OMe or 2′-F, q¹ is 9, T1′ is 2′-F, q² is 1, B2′ is 2′-OMe or 2′-F, q³ is 4, T2′ is 2′-F, q⁴ is 2, B3′ is 2′-OMe or 2′-F, q⁵ is 5, T3′ is 2′-F, q⁶ is 1, B4′ is 2′-F, and q⁷ is 1; with two phosphorothioate internucleotide linkage modifications within position 1-5 of the sense strand (counting from the 5′-end of the sense strand), and two phosphorothioate internucleotide linkage modifications at positions 1 and 2 and two phosphorothioate internucleotide linkage modifications within positions 18-23 of the antisense strand (counting from the 5′-end of the antisense strand). The RNAi agent also comprises a 5′-VP. The 5′-VP may be 5′-E-VP, 5′-Z-VP, or combination thereof.

[0514] In one embodiment, B1 is 2′-OMe or 2′-F, n¹ is 8, T1 is 2′F, n² is 3, B2 is 2′-OMe, n³ is 7, n⁴ is 0, B3 is 2′-OMe, n⁵ is 3, B1′ is 2′-OMe or 2′-F, q¹ is 9, T1′ is 2′-F, q² is 1, B2′ is 2′-OMe or 2′-F, q³ is 4, T2′ is 2′-F, q⁴ is 2, B3′ is 2′-OMe or 2′-F, q⁵ is 5, T3′ is 2′-F, q⁶ is 1, B4′ is 2′-F, and q⁷ is 1; with two phosphorothioate internucleotide linkage modifications within position 1-5 of the sense strand (counting from the 5′-end of the sense strand), and two phosphorothioate internucleotide linkage modifications at positions 1 and 2 and two phosphorothioate internucleotide linkage modifications within positions 18-23 of the antisense strand (counting from the 5′-end of the antisense strand). The RNAi agent also comprises a 5′-PS2.

[0515] In one embodiment, B1 is 2′-OMe or 2′-F, n¹ is 8, T1 is 2′F, n² is 3, B2 is 2′-OMe, n³ is 7, n⁴ is 0, B3 is 2′-OMe, n⁵ is 3, B1′ is 2′-OMe or 2′-F, q¹ is 9, T1′ is 2′-F, q² is 1, B2′ is 2′-OMe or 2′-F, q³ is 4, T2′ is 2′-F, q⁴ is 2, B3′ is 2′-OMe or 2′-F, q⁵ is 5, T3′ is 2′-F, q⁶ is 1, B4′ is 2′-F, and q⁷ is 1; with two phosphorothioate internucleotide linkage modifications within position 1-5 of the sense strand (counting from the 5′-end of the sense strand), and two phosphorothioate internucleotide linkage modifications at positions 1 and 2 and two phosphorothioate internucleotide linkage modifications within positions 18-23 of the antisense strand (counting from the 5′-end of the antisense strand). The RNAi agent also comprises a 5′-deoxy-5′-C′-malonyl.

[0516] In one embodiment, B1 is 2′-OMe or 2′-F, n¹ is 8, T1 is 2′F, n² is 3, B2 is 2′-OMe, n³ is 7, n⁴ is 0, B3 is 2′-OMe, n⁵ is 3, B1′ is 2′-OMe or 2′-F, q¹ is 9, T1′ is 2′-F, q² is 1, B2′ is 2′-OMe or 2′-F, q³ is 4, q⁴ is 0, B3′ is 2′-OMe or 2′-F, q⁵ is 7, T3′ is 2′-F, q⁶ is 1, B4′ is 2′-F, and q⁷ is 1. The RNAi agent also comprises a 5′-P.

[0517] In one embodiment, B1 is 2′-OMe or 2′-F, n¹ is 8, T1 is 2′F, n² is 3, B2 is 2′-OMe, n³ is 7, n⁴ is 0, B3 is 2′-OMe, n⁵ is 3, B1′ is 2′-OMe or 2′-F, q¹ is 9, T1′ is 2′-F, q² is 1, B2′ is 2′-OMe or 2′-F, q³ is 4, q⁴ is 0, B3′ is 2′-OMe or 2′-F, q⁵ is 7, T3′ is 2′-F, q⁶ is 1, B4′ is 2′-F, and q⁷ is 1. The RNAi agent also comprises a 5′-PS.

[0518] In one embodiment, B1 is 2′-OMe or 2′-F, n¹ is 8, T1 is 2′F, n² is 3, B2 is 2′-OMe, n³ is 7, n⁴ is 0, B3 is 2′-OMe, n⁵ is 3, B1′ is 2′-OMe or 2′-F, q¹ is 9, T1′ is 2′-F, q² is 1, B2′ is 2′-OMe or 2′-F, q³ is 4, q⁴ is 0, B3′ is 2′-OMe or 2′-F, q⁵ is 7, T3′ is 2′-F, q⁶ is 1, B4′ is 2′-F, and q⁷ is 1. The RNAi agent also comprises a 5′-VP. The 5′-VP may be 5′-E-VP, 5′-Z-VP, or combination thereof.

[0519] In one embodiment, B1 is 2′-OMe or 2′-F, n¹ is 8, T1 is 2′F, n² is 3, B2 is 2′-OMe, n³ is 7, n⁴ is 0, B3 is 2′-OMe, n⁵ is 3, B1′ is 2′-OMe or 2′-F, q¹ is 9, T1′ is 2′-F, q² is 1, B2′ is 2′-OMe or 2′-F, q³ is 4, q⁴ is 0, B3′ is 2′-OMe or 2′-F, q⁵ is 7, T3′ is 2′-F, q⁶ is 1, B4′ is 2′-F, and q⁷ is 1. The RNAi agent also comprises a 5′-PS2.

[0520] In one embodiment, B1 is 2′-OMe or 2′-F, n¹ is 8, T1 is 2′F, n² is 3, B2 is 2′-OMe, n³ is 7, n⁴ is 0, B3 is 2′-OMe, n⁵ is 3, B1′ is 2′-OMe or 2′-F, q¹ is 9, T1′ is 2′-F, q² is 1, B2′ is 2′-OMe or 2′-F, q³ is 4, q⁴ is 0, B3′ is 2′-OMe or 2′-F, q⁵ is 7, T3′ is 2′-F, q⁶ is 1, B4′ is 2′-F, and q⁷ is 1. The RNAi agent also comprises a 5′-deoxy-5′-C′-malonyl.

[0521] In one embodiment, B1 is 2′-OMe or 2′-F, n¹ is 8, T1 is 2′F, n² is 3, B2 is 2′-OMe, n³ is 7, n⁴ is 0, B3 is 2′-OMe, n⁵ is 3, B1′ is 2′-OMe or 2′-F, q¹ is 9, T1′ is 2′-F, q² is 1, B2′ is 2′-OMe or 2′-F, q³ is 4, q⁴ is 0, B3′ is 2′-OMe or 2′-F, q⁵ is 7, T3′ is 2′-F, q⁶ is 1, B4′ is 2′-F, and q⁷ is 1; with two phosphorothioate internucleotide linkage modifications within position 1-5 of the sense strand (counting from the 5′-end of the sense strand), and two phosphorothioate internucleotide linkage modifications at positions 1 and 2 and two phosphorothioate internucleotide linkage modifications within positions 18-23 of the antisense strand (counting from the 5′-end of the antisense strand). The RNAi agent also comprises a 5′-P.

[0522] In one embodiment, B1 is 2′-OMe or 2′-F, n¹ is 8, T1 is 2′F, n² is 3, B2 is 2′-OMe, n³ is 7, n⁴ is 0, B3 is 2′-OMe, n⁵ is 3, B1′ is 2′-OMe or 2′-F, q¹ is 9, T1′ is 2′-F, q² is 1, B2′ is 2′-OMe or 2′-F, q³ is 4, q⁴ is 0, B3′ is 2′-OMe or 2′-F, q⁵ is 7, T3′ is 2′-F, q⁶ is 1, B4′ is 2′-F, and q⁷ is 1; with two phosphorothioate internucleotide linkage modifications within position 1-5 of the sense strand (counting from the 5′-end of the sense strand), and two phosphorothioate internucleotide linkage modifications at positions 1 and 2 and two phosphorothioate internucleotide linkage modifications within positions 18-23 of the antisense strand (counting from the 5′-end of the antisense strand). The RNAi agent also comprises a 5′-PS.

[0523] In one embodiment, B1 is 2′-OMe or 2′-F, n¹ is 8, T1 is 2′F, n² is 3, B2 is 2′-OMe, n³ is 7, n⁴ is 0, B3 is 2′-OMe, n⁵ is 3, B1′ is 2′-OMe or 2′-F, q¹ is 9, T1′ is 2′-F, q² is 1, B2′ is 2′-OMe or 2′-F, q³ is 4, q⁴ is 0, B3′ is 2′-OMe or 2′-F, q⁵ is 7, T3′ is 2′-F, q⁶ is 1, B4′ is 2′-F, and q⁷ is 1; with two phosphorothioate internucleotide linkage modifications within position 1-5 of the sense strand (counting from the 5′-end of the sense strand), and two phosphorothioate internucleotide linkage modifications at positions 1 and 2 and two phosphorothioate internucleotide linkage modifications within positions 18-23 of the antisense strand (counting from the 5′-end of the antisense strand). The RNAi agent also comprises a 5′-VP. The 5′-VP may be 5′-E-VP, 5′-Z-VP, or combination thereof.

[0524] In one embodiment, B1 is 2′-OMe or 2′-F, n¹ is 8, T1 is 2′F, n² is 3, B2 is 2′-OMe, n³ is 7, n⁴ is 0, B3 is 2′-OMe, n⁵ is 3, B1′ is 2′-OMe or 2′-F, q¹ is 9, T1′ is 2′-F, q² is 1, B2′ is 2′-OMe or 2′-F, q³ is 4, q⁴ is 0, B3′ is 2′-OMe or 2′-F, q⁵ is 7, T3′ is 2′-F, q⁶ is 1, B4′ is 2′-F, and q⁷ is 1; with two phosphorothioate internucleotide linkage modifications within position 1-5 of the sense strand (counting from the 5′-end of the sense strand), and two phosphorothioate internucleotide linkage modifications at positions 1 and 2 and two phosphorothioate internucleotide linkage modifications within positions 18-23 of the antisense strand (counting from the 5′-end of the antisense strand). The RNAi agent also comprises a 5′-PS2.

[0525] In one embodiment, B1 is 2′-OMe or 2′-F, n¹ is 8, T1 is 2′F, n² is 3, B2 is 2′-OMe, n³ is 7, n⁴ is 0, B3 is 2′-OMe, n⁵ is 3, B1′ is 2′-OMe or 2′-F, q¹ is 9, T1′ is 2′-F, q² is 1, B2′ is 2′-OMe or 2′-F, q³ is 4, q⁴ is 0, B3′ is 2′-OMe or 2′-F, q⁵ is 7, T3′ is 2′-F, q⁶ is 1, B4′ is 2′-F, and q⁷ is 1; with two phosphorothioate internucleotide linkage modifications within position 1-5 of the sense strand (counting from the 5′-end of the sense strand), and two phosphorothioate internucleotide linkage modifications at positions 1 and 2 and two phosphorothioate internucleotide linkage modifications within positions 18-23 of the antisense strand (counting from the 5′-end of the antisense strand). The RNAi agent also comprises a 5′-deoxy-5′-(′-malonyl.

[0526] In one embodiment, B1 is 2′-OMe or 2′-F, n¹ is 8, T1 is 2′F, n² is 3, B2 is 2′-OMe, n³ is 7, n⁴ is 0, B3 is 2′-OMe, n⁵ is 3, B1′ is 2′-OMe or 2′-F, q¹ is 9, T1′ is 2′-F, q² is 1, B2′ is 2′-OMe or 2′-F, q³ is 4, T2′ is 2′-F, q⁴ is 2, B3′ is 2′-OMe or 2′-F, q⁵ is 5, T3′ is 2′-F, q⁶ is 1, B4′ is 2′-OMe, and q⁷ is 1; with two phosphorothioate internucleotide linkage modifications within position 1-5 of the sense strand (counting from the 5′-end of the sense strand), and two phosphorothioate internucleotide linkage modifications at positions 1 and 2 and two phosphorothioate internucleotide linkage modifications within positions 18-23 of the antisense strand (counting from the 5′-end of the antisense strand). The RNAi agent also comprises a 5′-P and a targeting ligand. In one embodiment, the 5′-P is at the 5′-end of the antisense strand, and the targeting ligand is at the 3′-end of the sense strand.

[0527] In one embodiment, B1 is 2′-OMe or 2′-F, n¹ is 8, T1 is 2′F, n² is 3, B2 is 2′-OMe, n³ is 7, n⁴ is 0, B3 is 2′-OMe, n⁵ is 3, B1′ is 2′-OMe or 2′-F, q¹ is 9, T1′ is 2′-F, q² is 1, B2′ is 2′-OMe or 2′-F, q³ is 4, T2′ is 2′-F, q⁴ is 2, B3′ is 2′-OMe or 2′-F, q⁵ is 5, T3′ is 2′-F, q⁶ is 1, B4′ is 2′-OMe, and q⁷ is 1; with two phosphorothioate internucleotide linkage modifications within position 1-5 of the sense strand (counting from the 5′-end of the sense strand), and two phosphorothioate internucleotide linkage modifications at positions 1 and 2 and two phosphorothioate internucleotide linkage modifications within positions 18-23 of the antisense strand (counting from the 5′-end of the antisense strand). The RNAi agent also comprises a 5′-PS and a targeting ligand. In one embodiment, the 5′-PS is at the 5′-end of the antisense strand, and the targeting ligand is at the 3′-end of the sense strand.

[0528] In one embodiment, B1 is 2′-OMe or 2′-F, n¹ is 8, T1 is 2′F, n² is 3, B2 is 2′-OMe, n³ is 7, n⁴ is 0, B3 is 2′-OMe, n⁵ is 3, B1′ is 2′-OMe or 2′-F, q¹ is 9, T1′ is 2′-F, q² is 1, B2′ is 2′-OMe or 2′-F, q³ is 4, T2′ is 2′-F, q⁴ is 2, B3′ is 2′-OMe or 2′-F, q⁵ is 5, T3′ is 2′-F, q⁶ is 1, B4′ is 2′-OMe, and q⁷ is 1; with two phosphorothioate internucleotide linkage modifications within position 1-5 of the sense strand (counting from the 5′-end of the sense strand), and two phosphorothioate internucleotide linkage modifications at positions 1 and 2 and two phosphorothioate internucleotide linkage modifications within positions 18-23 of the antisense strand (counting from the 5′-end of the antisense strand). The RNAi agent also comprises a 5′-VP (e.g., a 5′-F-VP, 5′-Z-VP, or combination thereof), and a targeting ligand. In one embodiment, the 5′-VP is at the 5′-end of the antisense strand, and the targeting ligand is at the 3′-end of the sense strand.

[0529] In one embodiment, B1 is 2′-OMe or 2′-F, n¹ is 8, T1 is 2′F, n² is 3, B2 is 2′-OMe, n³ is 7, n⁴ is 0, B3 is 2′-OMe, n⁵ is 3, B1′ is 2′-OMe or 2′-F, q¹ is 9, T1′ is 2′-F, q² is 1, B2′ is 2′-OMe or 2′-F, q³ is 4, T2′ is 2′-F, q⁴ is 2, B3′ is 2′-OMe or 2′-F, q⁵ is 5, T3′ is 2′-F, q⁶ is 1, B4′ is 2′-OMe, and q⁷ is 1; with two phosphorothioate internucleotide linkage modifications within position 1-5 of the sense strand (counting from the 5′-end of the sense strand), and two phosphorothioate internucleotide linkage modifications at positions 1 and 2 and two phosphorothioate internucleotide linkage modifications within positions 18-23 of the antisense strand (counting from the 5′-end of the antisense strand). The RNAi agent also comprises a 5′-PS2 and a targeting ligand. In one embodiment, the 5′-PS2 is at the 5′-end of the antisense strand, and the targeting ligand is at the 3′-end of the sense strand.

[0530] In one embodiment, B1 is 2′-OMe or 2′-F, n¹ is 8, T1 is 2′F, n² is 3, B2 is 2′-OMe, n³ is 7, n⁴ is 0, B3 is 2′-OMe, n⁵ is 3, B1′ is 2′-OMe or 2′-F, q¹ is 9, T1′ is 2′-F, q² is 1, B2′ is 2′-OMe or 2′-F, q³ is 4, T2′ is 2′-F, q⁴ is 2, B3′ is 2′-OMe or 2′-F, q⁵ is 5, T3′ is 2′-F, q⁶ is 1, B4′ is 2′-OMe, and q⁷ is 1; with two phosphorothioate internucleotide linkage modifications within position 1-5 of the sense strand (counting from the 5′-end of the sense strand), and two phosphorothioate internucleotide linkage modifications at positions 1 and 2 and two phosphorothioate internucleotide linkage modifications within positions 18-23 of the antisense strand (counting from the 5′-end of the antisense strand). The RNAi agent also comprises a 5′-deoxy-5′-C′-malonyl and a targeting ligand. In one embodiment, the 5′-deoxy-5′-C′-malonyl is at the 5′-end of the antisense strand, and the targeting ligand is at the 3′-end of the sense strand.

[0531] In one embodiment, B1 is 2′-OMe or 2′-F, n¹ is 8, T1 is 2′F, n² is 3, B2 is 2′-OMe, n³ is 7, n⁴ is 0, B3 is 2′-OMe, n⁵ is 3, B1′ is 2′-OMe or 2′-F, q¹ is 9, T1′ is 2′-F, q² is 1, B2′ is 2′-OMe or 2′-F, q³ is 4, q⁴ is 0, B3′ is 2′-OMe or 2′-F, q⁵ is 7, T3′ is 2′-F, q⁶ is 1, B4′ is 2′- OMe, and q⁷ is 1; with two phosphorothioate internucleotide linkage modifications within position 1-5 of the sense strand (counting from the 5′-end), and two phosphorothioate internucleotide linkage modifications at positions 1 and 2 and two phosphorothioate internucleotide linkage modifications within positions 18-23 of the antisense strand (counting from the 5′-end). The RNAi agent also comprises a 5′-P and a targeting ligand. In one embodiment, the 5′-P is at the 5′-end of the antisense strand, and the targeting ligand is at the 3′-end of the sense strand.

[0532] In one embodiment, B1 is 2′-OMe or 2′-F, n¹ is 8, T1 is 2′F, n² is 3, B2 is 2′-OMe, n³ is 7, n⁴ is 0, B3 is 2′-OMe, n⁵ is 3, B1′ is 2′-OMe or 2′-F, q¹ is 9, T1′ is 2′-F, q² is 1, B2′ is 2′-OMe or 2′-F, q³ is 4, q⁴ is 0, B3′ is 2′-OMe or 2′-F, q′ is 7, T3′ is 2′-F, q⁶ is 1, B4′ is 2′-OMe, and q⁷ is 1; with two phosphorothioate internucleotide linkage modifications within position 1-5 of the sense strand (counting from the 5′-end), and two phosphorothioate internucleotide linkage modifications at positions 1 and 2 and two phosphorothioate internucleotide linkage modifications within positions 18-23 of the antisense strand (counting from the 5′-end). The RNAi agent also comprises a 5′-PS and a targeting ligand. In one embodiment, the 5′-PS is at the 5′-end of the antisense strand, and the targeting ligand is at the 3′-end of the sense strand.

[0533] In one embodiment, B1 is 2′-OMe or 2′-F, n¹ is 8, T1 is 2′F, n² is 3, B2 is 2′-OMe, n³ is 7, n⁴ is 0, B3 is 2′-OMe, n⁵ is 3, B1′ is 2′-OMe or 2′-F, q¹ is 9, T1′ is 2′-F, q² is 1, B2′ is 2′-OMe or 2′-F, q³ is 4, q⁴ is 0, B3′ is 2′-OMe or 2′-F, q⁵ is 7, T3′ is 2′-F, q⁶ is 1, B4′ is 2′- OMe, and q⁷ is 1; with two phosphorothioate internucleotide linkage modifications within position 1-5 of the sense strand (counting from the 5′-end), and two phosphorothioate internucleotide linkage modifications at positions 1 and 2 and two phosphorothioate internucleotide linkage modifications within positions 18-23 of the antisense strand (counting from the 5′-end). The RNAi agent also comprises a 5′-VP (e.g., a 5′-E-VP, 5′-Z-VP, or combination thereof) and a targeting ligand. In one embodiment, the 5′-VP is at the 5′-end of the antisense strand, and the targeting ligand is at the 3′-end of the sense strand.

[0534] In one embodiment, B1 is 2′-OMe or 2′-F, n¹ is 8, T1 is 2′F, n² is 3, B2 is 2′-OMe, n³ is 7, n⁴ is 0, B3 is 2′-OMe, n⁵ is 3, B1′ is 2′-OMe or 2′-F, q¹ is 9, T1′ is 2′-F, q² is 1, B2′ is 2′-OMe or 2′-F, q³ is 4, q⁴ is 0, B3′ is 2′-OMe or 2′-F, q⁵ is 7, T3′ is 2′-F, q⁶ is 1, B4′ is 2′- OMe, and q⁷ is 1; with two phosphorothioate internucleotide linkage modifications within position 1-5 of the sense strand (counting from the 5′-end), and two phosphorothioate internucleotide linkage modifications at positions 1 and 2 and two phosphorothioate internucleotide linkage modifications within positions 18-23 of the antisense strand (counting from the 5′-end). The RNAi agent also comprises a 5′-PS2 and a targeting ligand. In one embodiment, the 5′-PS2 is at the 5′-end of the antisense strand, and the targeting ligand is at the 3′-end of the sense strand.

[0535] In one embodiment, B1 is 2′-OMe or 2′-F, n¹ is 8, T1 is 2′F, n² is 3, B2 is 2′-OMe, n³ is 7, n⁴ is 0, B3 is 2′-OMe, n⁵ is 3, B1′ is 2′-OMe or 2′-F, q¹ is 9, T1′ is 2′-F, q² is 1, B2′ is 2′-OMe or 2′-F, q³ is 4, q⁴ is 0, B3′ is 2′-OMe or 2′-F, q⁵ is 7, T3′ is 2′-F, q⁶ is 1, B4′ is 2′- OMe, and q⁷ is 1; with two phosphorothioate internucleotide linkage modifications within position 1-5 of the sense strand (counting from the 5′-end), and two phosphorothioate internucleotide linkage modifications at positions 1 and 2 and two phosphorothioate internucleotide linkage modifications within positions 18-23 of the antisense strand (counting from the 5′-end). The RNAi agent also comprises a 5′-deoxy-5′-C′-malonyl and a targeting ligand. In one embodiment, the 5′-deoxy-5′-C′-malonyl is at the 5′-end of the antisense strand, and the targeting ligand is at the 3′-end of the sense strand.

[0536] In one embodiment, B1 is 2′-OMe or 2′-F, n¹ is 8, T1 is 2′F, n² is 3, B2 is 2′-OMe, n³ is 7, n⁴ is 0, B3 is 2′-OMe, n⁵ is 3, B1′ is 2′-OMe or 2′-F, q¹ is 9, T1′ is 2′-F, q² is 1, B2′ is 2′-OMe or 2′-F, q³ is 4, T2′ is 2′-F, q⁴ is 2, B3′ is 2′-OMe or 2′-F, q⁵ is 5, T3′ is 2′-F, q⁶ is 1, B4′ is 2′-F, and q⁷ is 1; with two phosphorothioate internucleotide linkage modifications within position 1-5 of the sense strand (counting from the 5′-end of the sense strand), and two phosphorothioate internucleotide linkage modifications at positions 1 and 2 and two phosphorothioate internucleotide linkage modifications within positions 18-23 of the antisense strand (counting from the 5′-end of the antisense strand). The RNAi agent also comprises a 5′-P and a targeting ligand. In one embodiment, the 5′-P is at the 5′-end of the antisense strand, and the targeting ligand is at the 3′-end of the sense strand.

[0537] In one embodiment, B1 is 2′-OMe or 2′-F, n¹ is 8, T1 is 2′F, n² is 3, B2 is 2′-OMe, n³ is 7, n⁴ is 0, B3 is 2′-OMe, n⁵ is 3, B1′ is 2′-OMe or 2′-F, q¹ is 9, T1′ is 2′-F, q² is 1, B2′ is 2′-OMe or 2′-F, q³ is 4, T2′ is 2′-F, q⁴ is 2, B3′ is 2′-OMe or 2′-F, q⁵ is 5, T3′ is 2′-F, q⁶ is 1, B4′ is 2′-F, and q⁷ is 1; with two phosphorothioate internucleotide linkage modifications within position 1-5 of the sense strand (counting from the 5′-end of the sense strand), and two phosphorothioate internucleotide linkage modifications at positions 1 and 2 and two phosphorothioate internucleotide linkage modifications within positions 18-23 of the antisense strand (counting from the 5′-end of the antisense strand). The RNAi agent also comprises a 5′-PS and a targeting ligand. In one embodiment, the 5′-PS is at the 5′-end of the antisense strand, and the targeting ligand is at the 3′-end of the sense strand.

[0538] In one embodiment, B1 is 2′-OMe or 2′-F, n¹ is 8, T1 is 2′F, n² is 3, B2 is 2′-OMe, n³ is 7, n⁴ is 0, B3 is 2′-OMe, n⁵ is 3, B1′ is 2′-OMe or 2′-F, q¹ is 9, T1′ is 2′-F, q² is 1, B2′ is 2′-OMe or 2′-F, q³ is 4, T2′ is 2′-F, q⁴ is 2, B3′ is 2′-OMe or 2′-F, q⁵ is 5, T3′ is 2′-F, q⁶ is 1, B4′ is 2′-F, and q⁷ is 1; with two phosphorothioate internucleotide linkage modifications within position 1-5 of the sense strand (counting from the 5′-end of the sense strand), and two phosphorothioate internucleotide linkage modifications at positions 1 and 2 and two phosphorothioate internucleotide linkage modifications within positions 18-23 of the antisense strand (counting from the 5′-end of the antisense strand). The RNAi agent also comprises a 5′-VP (e.g., a 5′-F-VP, 5′-Z-VP, or combination thereof) and a targeting ligand. In one embodiment, the 5′-VP is at the 5′-end of the antisense strand, and the targeting ligand is at the 3′-end of the sense strand.

[0539] In one embodiment, B1 is 2′-OMe or 2′-F, n¹ is 8, T1 is 2′F, n² is 3, B2 is 2′-OMe, n³ is 7, n⁴ is 0, B3 is 2′-OMe, n⁵ is 3, B1′ is 2′-OMe or 2′-F, q¹ is 9, T1′ is 2′-F, q² is 1, B2′ is 2′-OMe or 2′-F, q³ is 4, T2′ is 2′-F, q⁴ is 2, B3′ is 2′-OMe or 2′-F, q⁵ is 5, T3′ is 2′-F, q⁶ is 1, B4′ is 2′-F, and q⁷ is 1; with two phosphorothioate internucleotide linkage modifications within position 1-5 of the sense strand (counting from the 5′-end of the sense strand), and two phosphorothioate internucleotide linkage modifications at positions 1 and 2 and two phosphorothioate internucleotide linkage modifications within positions 18-23 of the antisense strand (counting from the 5′-end of the antisense strand). The RNAi agent also comprises a 5′-PS2 and a targeting ligand. In one embodiment, the 5′-PS2 is at the 5′-end of the antisense strand, and the targeting ligand is at the 3′-end of the sense strand.

[0540] In one embodiment, B1 is 2′-OMe or 2′-F, n¹ is 8, T1 is 2′F, n² is 3, B2 is 2′-OMe, n³ is 7, n⁴ is 0, B3 is 2′-OMe, n⁵ is 3, B1′ is 2′-OMe or 2′-F, q¹ is 9, T1′ is 2′-F, q² is 1, B2′ is 2′-OMe or 2′-F, q³ is 4, T2′ is 2′-F, q⁴ is 2, B3′ is 2′-OMe or 2′-F, q⁵ is 5, T3′ is 2′-F, q⁶ is 1, B4′ is 2′-F, and q⁷ is 1; with two phosphorothioate internucleotide linkage modifications within position 1-5 of the sense strand (counting from the 5′-end of the sense strand), and two phosphorothioate internucleotide linkage modifications at positions 1 and 2 and two phosphorothioate internucleotide linkage modifications within positions 18-23 of the antisense strand (counting from the 5′-end of the antisense strand). The RNAi agent also comprises a 5′-deoxy-5′-C′-malonyl and a targeting ligand. In one embodiment, the 5′-deoxy-5′-C′-malonyl is at the 5′-end of the antisense strand, and the targeting ligand is at the 3′-end of the sense strand.

[0541] In one embodiment, B1 is 2′-OMe or 2′-F, n¹ is 8, T1 is 2′F, n² is 3, B2 is 2′-OMe, n³ is 7, n⁴ is 0, B3 is 2′-OMe, n⁵ is 3, B1′ is 2′-OMe or 2′-F, q¹ is 9, T1′ is 2′-F, q² is 1, B2′ is 2′-OMe or 2′-F, q³ is 4, q⁴ is 0, B3′ is 2′-OMe or 2′-F, q⁵ is 7, T3′ is 2′-F, q⁶ is 1, B4′ is 2′-F, and q⁷ is 1; with two phosphorothioate internucleotide linkage modifications within position 1-5 of the sense strand (counting from the 5′-end of the sense strand), and two phosphorothioate internucleotide linkage modifications at positions 1 and 2 and two phosphorothioate internucleotide linkage modifications within positions 18-23 of the antisense strand (counting from the 5′-end of the antisense strand). The RNAi agent also comprises a 5′-P and a targeting ligand. In one embodiment, the 5′-P is at the 5′-end of the antisense strand, and the targeting ligand is at the 3′-end of the sense strand.

[0542] In one embodiment, B1 is 2′-OMe or 2′-F, n¹ is 8, T1 is 2′F, n² is 3, B2 is 2′-OMe, n³ is 7, n⁴ is 0, B3 is 2′-OMe, n⁵ is 3, B1′ is 2′-OMe or 2′-F, q¹ is 9, T1′ is 2′-F, q² is 1, B2′ is 2′-OMe or 2′-F, q³ is 4, q⁴ is 0, B3′ is 2′-OMe or 2′-F, q⁵ is 7, T3′ is 2′-F, q⁶ is 1, B4′ is 2′-F, and q⁷ is 1; with two phosphorothioate internucleotide linkage modifications within position 1-5 of the sense strand (counting from the 5′-end of the sense strand), and two phosphorothioate internucleotide linkage modifications at positions 1 and 2 and two phosphorothioate internucleotide linkage modifications within positions 18-23 of the antisense strand (counting from the 5′-end of the antisense strand). The RNAi agent also comprises a 5′-PS and a targeting ligand. In one embodiment, the 5′-PS is at the 5′-end of the antisense strand, and the targeting ligand is at the 3′-end of the sense strand.

[0543] In one embodiment, B1 is 2′-OMe or 2′-F, n¹ is 8, T1 is 2′F, n² is 3, B2 is 2′-OMe, n³ is 7, n⁴ is 0, B3 is 2′-OMe, n⁵ is 3, B1′ is 2′-OMe or 2′-F, q¹ is 9, T1′ is 2′-F, q² is 1, B2′ is 2′-OMe or 2′-F, q³ is 4, q⁴ is 0, B3′ is 2′-OMe or 2′-F, q⁵ is 7, T3′ is 2′-F, q⁶ is 1, B4′ is 2′-F, and q⁷ is 1; with two phosphorothioate internucleotide linkage modifications within position 1-5 of the sense strand (counting from the 5′-end of the sense strand), and two phosphorothioate internucleotide linkage modifications at positions 1 and 2 and two phosphorothioate internucleotide linkage modifications within positions 18-23 of the antisense strand (counting from the 5′-end of the antisense strand). The RNAi agent also comprises a 5′-VP (e.g., a 5′-E-VP, 5′-Z-VP, or combination thereof) and a targeting ligand. In one embodiment, the 5′-VP is at the 5′-end of the antisense strand, and the targeting ligand is at the 3′-end of the sense strand.

[0544] In one embodiment, B1 is 2′-OMe or 2′-F, n¹ is 8, T1 is 2′F, n² is 3, B2 is 2′-OMe, n³ is 7, n⁴ is 0, B3 is 2′-OMe, n⁵ is 3, B1′ is 2′-OMe or 2′-F, q¹ is 9, T1′ is 2′-F, q² is 1, B2′ is 2′-OMe or 2′-F, q³ is 4, q⁴ is 0, B3′ is 2′-OMe or 2′-F, q⁵ is 7, T3′ is 2′-F, q⁶ is 1, B4′ is 2′-F, and q⁷ is 1; with two phosphorothioate internucleotide linkage modifications within position 1-5 of the sense strand (counting from the 5′-end of the sense strand), and two phosphorothioate internucleotide linkage modifications at positions 1 and 2 and two phosphorothioate internucleotide linkage modifications within positions 18-23 of the antisense strand (counting from the 5′-end of the antisense strand). The RNAi agent also comprises a 5′-PS2 and a targeting ligand. In one embodiment, the 5′-PS2 is at the 5′-end of the antisense strand, and the targeting ligand is at the 3′-end of the sense strand.

[0545] In one embodiment, B1 is 2′-OMe or 2′-F, n¹ is 8, T1 is 2′F, n² is 3, B2 is 2′-OMe, n³ is 7, n⁴ is 0, B3 is 2′-OMe, n⁵ is 3, B1′ is 2′-OMe or 2′-F, q¹ is 9, T1′ is 2′-F, q² is 1, B2′ is 2′-OMe or 2′-F, q³ is 4, q⁴ is 0, B3′ is 2′-OMe or 2′-F, q⁵ is 7, T3′ is 2′-F, q⁶ is 1, B4′ is 2′-F, and q⁷ is 1; with two phosphorothioate internucleotide linkage modifications within position 1-5 of the sense strand (counting from the 5′-end of the sense strand), and two phosphorothioate internucleotide linkage modifications at positions 1 and 2 and two phosphorothioate internucleotide linkage modifications within positions 18-23 of the antisense strand (counting from the 5′-end of the antisense strand). The RNAi agent also comprises a 5′-deoxy-5′-C′-malonyl and a targeting ligand. In one embodiment, the 5′-deoxy-5′-C′-malonyl is at the 5′-end of the antisense strand, and the targeting ligand is at the 3′-end of the sense strand.

[0546] In a particular embodiment, an RNAi agent of the present invention comprises:
[0547] (a) a sense strand having:
   [0548] (i) a length of 21 nucleotides;
   [0549] (ii) an ASGPR ligand attached to the 3′-end, wherein said ASGPR ligand comprises three GalNAc derivatives attached through a trivalent branched linker; and
   [0550] (iii) 2′-F modifications at positions 1, 3, 5, 7, 9 to 11, 13, 17, 19, and 21, and 2′-OMe modifications at positions 2, 4, 6, 8, 12, 14 to 16, 18, and 20 (counting from the 5′ end);
      [0551] and
[0552] (b) an antisense strand having:
   [0553] (i) a length of 23 nucleotides;
   [0554] (ii) 2′-OMe modifications at positions 1, 3, 5, 9, 11 to 13, 15, 17, 19, 21, and 23, and 2′F modifications at positions 2, 4, 6 to 8, 10, 14, 16, 18, 20, and 22 (counting from the 5′ end); and
   [0555] (iii) phosphorothioate internucleotide linkages between nucleotide positions 21 and 22, and between nucleotide positions 22 and 23 (counting from the 5′ end);
      [0556] wherein the dsRNA agents have a two nucleotide overhang at the 3′-end of the antisense strand, and a blunt end at the 5′-end of the antisense strand.

[0557] In another particular embodiment, an RNAi agent of the present invention comprises:
[0558] (a) a sense strand having:
   [0559] (i) a length of 21 nucleotides;
   [0560] (ii) an ASGPR ligand attached to the 3′-end, wherein said ASGPR ligand comprises three GalNAc derivatives attached through a trivalent branched linker;
   [0561] (iii) 2′-F modifications at positions 1, 3, 5, 7, 9 to 11, 13, 15, 17, 19, and 21, and 2′-OMe modifications at positions 2, 4, 6, 8, 12, 14, 16, 18, and 20 (counting from the 5′ end); and
   [0562] (iv) phosphorothioate internucleotide linkages between nucleotide positions 1 and 2, and between nucleotide positions 2 and 3 (counting from the 5′ end);
      [0563] and
[0564] (b) an antisense strand having:
   [0565] (i) a length of 23 nucleotides;
   [0566] (ii) 2′-OMe modifications at positions 1, 3, 5, 7, 9, 11 to 13, 15, 17, 19, and 21 to 23, and 2′F modifications at positions 2, 4, 6, 8, 10, 14, 16, 18, and 20 (counting from the 5′ end); and
   [0567] (iii) phosphorothioate internucleotide linkages between nucleotide positions 1 and 2, between nucleotide positions 2 and 3, between nucleotide positions 21 and 22, and between nucleotide positions 22 and 23 (counting from the 5′ end);
   [0568] wherein the RNAi agents have a two nucleotide overhang at the 3′-end of the antisense strand, and a blunt end at the 5′-end of the antisense strand.

[0569] In another particular embodiment, a RNAi agent of the present invention comprises:
[0570] (a) a sense strand having:
   [0571] (i) a length of 21 nucleotides;
   [0572] (ii) an ASGPR ligand attached to the 3′-end, wherein said ASGPR ligand comprises three GalNAc derivatives attached through a trivalent branched linker;
   [0573] (iii) 2′-OMe modifications at positions 1 to 6, 8, 10, and 12 to 21, 2′-F modifications at positions 7, and 9, and a desoxy-nucleotide (e.g. dT) at position 11 (counting from the 5′ end); and
   [0574] (iv) phosphorothioate internucleotide linkages between nucleotide positions 1 and 2, and between nucleotide positions 2 and 3 (counting from the 5′ end);
      [0575] and
[0576] (b) an antisense strand having:
   [0577] (i) a length of 23 nucleotides;
   [0578] (ii) 2′-OMe modifications at positions 1, 3, 7, 9, 11, 13, 15, 17, and 19 to 23, and 2′-F modifications at positions 2, 4 to 6, 8, 10, 12, 14, 16, and 18 (counting from the 5′ end); and
   [0579] (iii) phosphorothioate internucleotide linkages between nucleotide positions 1 and 2, between nucleotide positions 2 and 3, between nucleotide positions 21 and 22, and between nucleotide positions 22 and 23 (counting from the 5′ end);
   [0580] wherein the RNAi agents have a two nucleotide overhang at the 3′-end of the antisense strand, and a blunt end at the 5′-end of the antisense strand.

[0581] In another particular embodiment, aRNAi agent of the present invention comprises:
[0582] (a) a sense strand having:
   [0583] (i) a length of 21 nucleotides;
   [0584] (ii) an ASGPR ligand attached to the 3′-end, wherein said ASGPR ligand comprises three GalNAc derivatives attached through a trivalent branched linker;
   [0585] (iii) 2′-OMe modifications at positions 1 to 6, 8, 10, 12, 14, and 16 to 21, and 2′-F modifications at positions 7, 9, 11, 13, and 15; and
   [0586] (iv) phosphorothioate internucleotide linkages between nucleotide positions 1 and 2, and between nucleotide positions 2 and 3 (counting from the 5′ end);
      [0587] and
[0588] (b) an antisense strand having:
   [0589] (i) a length of 23 nucleotides;
   [0590] (ii) 2′-OMe modifications at positions 1, 5, 7, 9, 11, 13, 15, 17, 19, and 21 to 23, and 2′-F modifications at positions 2 to 4, 6, 8, 10, 12, 14, 16, 18, and 20 (counting from the 5′ end); and
   [0591] (iii) phosphorothioate internucleotide linkages between nucleotide positions 1 and 2, between nucleotide positions 2 and 3, between nucleotide positions 21 and 22, and between nucleotide positions 22 and 23 (counting from the 5′ end);
   [0592] wherein the RNAi agents have a two nucleotide overhang at the 3′-end of the antisense strand, and a blunt end at the 5′-end of the antisense strand.

[0593] In another particular embodiment, a RNAi agent of the present invention comprises:
[0594] (a) a sense strand having:
   [0595] (i) a length of 21 nucleotides;
   [0596] (ii) an ASGPR ligand attached to the 3′-end, wherein said ASGPR ligand comprises three GalNAc derivatives attached through a trivalent branched linker;
   [0597] (iii) 2′-OMe modifications at positions 1 to 9, and 12 to 21, and 2′-F modifications at positions 10, and 11; and
   [0598] (iv) phosphorothioate internucleotide linkages between nucleotide positions 1 and 2, and between nucleotide positions 2 and 3 (counting from the 5′ end);
      [0599] and
[0600] (b) an antisense strand having:
   [0601] (i) a length of 23 nucleotides;
   [0602] (ii) 2′-OMe modifications at positions 1, 3, 5, 7, 9, 11 to 13, 15, 17, 19, and 21 to 23, and 2′-F modifications at positions 2, 4, 6, 8, 10, 14, 16, 18, and 20 (counting from the 5′ end); and
   [0603] (iii) phosphorothioate internucleotide linkages between nucleotide positions 1 and 2, between nucleotide positions 2 and 3, between nucleotide positions 21 and 22, and between nucleotide positions 22 and 23 (counting from the 5′ end);
   [0604] wherein the RNAi agents have a two nucleotide overhang at the 3′-end of the antisense strand, and a blunt end at the 5′-end of the antisense strand.

[0605] In another particular embodiment, a RNAi agent of the present invention comprises:
[0606] (a) a sense strand having:
   [0607] (i) a length of 21 nucleotides;
   [0608] (ii) an ASGPR ligand attached to the 3′-end, wherein said ASGPR ligand comprises three GalNAc derivatives attached through a trivalent branched linker;
   [0609] (iii) 2′-F modifications at positions 1, 3, 5, 7, 9 to 11, and 13, and 2′-OMe modifications at positions 2, 4, 6, 8, 12, and 14 to 21; and
   [0610] (iv) phosphorothioate internucleotide linkages between nucleotide positions 1 and 2, and between nucleotide positions 2 and 3 (counting from the 5′ end);
      [0611] and
[0612] (b) an antisense strand having:
   [0613] (i) a length of 23 nucleotides;
   [0614] (ii) 2′-OMe modifications at positions 1, 3, 5 to 7, 9, 11 to 13, 15, 17 to 19, and 21 to 23, and 2′-F modifications at positions 2, 4, 8, 10, 14, 16, and 20 (counting from the 5′ end); and
   [0615] (iii) phosphorothioate internucleotide linkages between nucleotide positions 1 and 2, between nucleotide positions 2 and 3, between nucleotide positions 21 and 22, and between nucleotide positions 22 and 23 (counting from the 5′ end);
   [0616] wherein the RNAi agents have a two nucleotide overhang at the 3′-end of the antisense strand, and a blunt end at the 5′-end of the antisense strand.

[0617] In another particular embodiment, a RNAi agents of the present invention comprises:
[0618] (a) a sense strand having:
   [0619] (i) a length of 21 nucleotides;
   [0620] (ii) an ASGPR ligand attached to the 3′-end, wherein said ASGPR ligand comprises three GalNAc derivatives attached through a trivalent branched linker;
   [0621] (iii) 2′-OMe modifications at positions 1, 2, 4, 6, 8, 12, 14, 15, 17, and 19 to 21, and 2′-F modifications at positions 3, 5, 7, 9 to 11, 13, 16, and 18; and
   [0622] (iv) phosphorothioate internucleotide linkages between nucleotide positions 1 and 2, and between nucleotide positions 2 and 3 (counting from the 5′ end);
      [0623] and
[0624] (b) an antisense strand having:
   [0625] (i) a length of 25 nucleotides;
   [0626] (ii) 2′-OMe modifications at positions 1, 4, 6, 7, 9, 11 to 13, 15, 17, and 19 to 23, 2′-F modifications at positions 2, 3, 5, 8, 10, 14, 16, and 18, and desoxy-nucleotides (e.g. dT) at positions 24 and 25 (counting from the 5′ end); and
   [0627] (iii) phosphorothioate internucleotide linkages between nucleotide positions 1 and 2, between nucleotide positions 2 and 3, between nucleotide positions 21 and 22, and between nucleotide positions 22 and 23 (counting from the 5′ end);
   [0628] wherein the RNAi agents have a four nucleotide overhang at the 3′-end of the antisense strand, and a blunt end at the 5′-end of the antisense strand.

[0629] In another particular embodiment, a RNAi agent of the present invention comprises:
[0630] (a) a sense strand having:
   [0631] (i) a length of 21 nucleotides;
   [0632] (ii) an ASGPR ligand attached to the 3′-end, wherein said ASGPR ligand comprises three GalNAc derivatives attached through a trivalent branched linker;
   [0633] (iii) 2′-OMe modifications at positions 1 to 6, 8, and 12 to 21, and 2′-F modifications at positions 7, and 9 to 11; and
   [0634] (iv) phosphorothioate internucleotide linkages between nucleotide positions 1 and 2, and between nucleotide positions 2 and 3 (counting from the 5′ end);
      [0635] and
[0636] (b) an antisense strand having:
   [0637] (i) a length of 23 nucleotides;
   [0638] (ii) 2′-OMe modifications at positions 1, 3 to 5, 7, 8, 10 to 13, 15, and 17 to 23, and 2′-F modifications at positions 2, 6, 9, 14, and 16 (counting from the 5′ end); and
   [0639] (iii) phosphorothioate internucleotide linkages between nucleotide positions 1 and 2, between nucleotide positions 2 and 3, between nucleotide positions 21 and 22, and between nucleotide positions 22 and 23 (counting from the 5′ end);
   [0640] wherein the RNAi agents have a two nucleotide overhang at the 3′-end of the antisense strand, and a blunt end at the 5′-end of the antisense strand.

[0641] In another particular embodiment, a RNAi agent of the present invention comprises:
[0642] (a) a sense strand having:
   [0643] (i) a length of 21 nucleotides;
   [0644] (ii) an ASGPR ligand attached to the 3′-end, wherein said ASGPR ligand comprises three GalNAc derivatives attached through a trivalent branched linker;
   [0645] (iii) 2′-OMe modifications at positions 1 to 6, 8, and 12 to 21, and 2′-F modifications at positions 7, and 9 to 11; and
   [0646] (iv) phosphorothioate internucleotide linkages between nucleotide positions 1 and 2, and between nucleotide positions 2 and 3 (counting from the 5′ end);
      [0647] and
[0648] (b) an antisense strand having:
   [0649] (i) a length of 23 nucleotides;
   [0650] (ii) 2′-OMe modifications at positions 1, 3 to 5, 7, 10 to 13, 15, and 17 to 23, and 2′-F modifications at positions 2, 6, 8, 9, 14, and 16 (counting from the 5′ end); and
   [0651] (iii) phosphorothioate internucleotide linkages between nucleotide positions 1 and 2, between nucleotide positions 2 and 3, between nucleotide positions 21 and 22, and between nucleotide positions 22 and 23 (counting from the 5′ end);
   [0652] wherein the RNAi agents have a two nucleotide overhang at the 3′-end of the antisense strand, and a blunt end at the 5′-end of the antisense strand.

[0653] In another particular embodiment, a RNAi agent of the present invention comprises:
[0654] (a) a sense strand having:
   [0655] (i) a length of 19 nucleotides;
   [0656] (ii) an ASGPR ligand attached to the 3′-end, wherein said ASGPR ligand comprises three GalNAc derivatives attached through a trivalent branched linker;
   [0657] (iii) 2′-OMe modifications at positions 1 to 4, 6, and 10 to 19, and 2′-F modifications at positions 5, and 7 to 9; and
   [0658] (iv) phosphorothioate internucleotide linkages between nucleotide positions 1 and 2, and between nucleotide positions 2 and 3 (counting from the 5′ end);
      [0659] and
[0660] (b) an antisense strand having:
   [0661] (i) a length of 21 nucleotides;
   [0662] (ii) 2′-OMe modifications at positions 1, 3 to 5, 7, 10 to 13, 15, and 17 to 21, and 2′-F modifications at positions 2, 6, 8, 9, 14, and 16 (counting from the 5′ end); and
   [0663] (iii) phosphorothioate internucleotide linkages between nucleotide positions 1 and 2, between nucleotide positions 2 and 3, between nucleotide positions 19 and 20, and between nucleotide positions 20 and 21 (counting from the 5′ end);
   [0664] wherein the RNAi agents have a two nucleotide overhang at the 3′-end of the antisense strand, and a blunt end at the 5′-end of the antisense strand.

### IV. iRNAs Conjugated to Ligands

[0665] Another modification of the RNA of an iRNA of the invention involves chemically linking to the RNA one or more ligands, moieties or conjugates that enhance the activity, cellular distribution or cellular uptake of the iRNA. Such moieties include but are not limited to lipid moieties such as a cholesterol moiety (Letsinger et al., (1989) Proc. Natl. Acid. Sci. USA, 86:6553-6556), cholic acid (Manoharan et al., (1994) Biorg. Med. Chem. Let., 4:1053-1060), a thioether, e.g., beryl-S-tritylthiol (Manoharan et al., (1992) Ann. N.Y. Acad. Sci., 660:306-309; Manoharan et al., (1993) Biorg. Med. Chem. Let., 3:2765-2770), a thiocholesterol (Oberhauser et al., (1992) Nucl. Acids Res., 20:533-538), an aliphatic chain, e.g., dodecandiol or undecyl residues (Saison-Behmoaras et al., (1991) EMBO J, 10:1111-1118; Kabanov et al., (1990) FEBS Lett., 259:327-330; Svinarchuk et al., (1993) Biochimie, 75:49-54), a phospholipid, e.g., di-hexadecyl-rac-glycerol or triethyl-ammonium 1,2-di-O-hexadecyl-rac-glycero-3-phosphonate (Manoharan et al., (1995) Tetrahedron Lett., 36:3651-3654; Shea et al., (1990) Nucl. Acids Res., 18:3777-3783), a polyamine or a polyethylene glycol chain (Manoharan et al., (1995) Nucleosides & Nucleotides, 14:969-973), or adamantane acetic acid (Manoharan et al., (1995) Tetrahedron Lett., 36:3651-3654), a palmityl moiety (Mishra et al., (1995) Biochim. Biophys. Acta, 1264:229-237), or an octadecylamine or hexylamino-carbonyloxycholesterol moiety (Crooke et al., (1996) J. Pharmacol. Exp. Ther., 277:923-937).

[0666] In embodiments in which a first dsRNA agent targeting LDHA and a second dsRNA agent targeting HAO1 are covalently attached (i.e., a dual targeting RNAi agent described herein), one or both of the dsRNA agents may independently comprise one or more ligands.

[0667] In one embodiment, a ligand alters the distribution, targeting or lifetime of an iRNA agent into which it is incorporated. In preferred embodiments a ligand provides an enhanced affinity for a selected target, e.g., molecule, cell or cell type, compartment, e.g., a cellular or organ compartment, tissue, organ or region of the body, as, e.g., compared to a species absent such a ligand. Preferred ligands will not take part in duplex pairing in a duplexed nucleic acid.

[0668] Ligands can include a naturally occurring substance, such as a protein (e.g., human serum albumin (HSA), low-density lipoprotein (LDL), or globulin); carbohydrate (e.g., a dextran, pullulan, chitin, chitosan, inulin, cyclodextrin, N-acetylglucosamine, N-acetylgalactosamine or hyaluronic acid); or a lipid. The ligand can also be a recombinant or synthetic molecule, such as a synthetic polymer, e.g., a synthetic polyamino acid. Examples of polyamino acids include polyamino acid is a polylysine (PLL), poly L-aspartic acid, poly L-glutamic acid, styrene-maleic acid anhydride copolymer, poly(L-lactide-co-glycolied) copolymer, divinyl ether-maleic anhydride copolymer, N-(2-hydroxypropyl) methacrylamide copolymer (HMPA), polyethylene glycol (PEG), polyvinyl alcohol (PVA), polyurethane, poly(2-ethylacryllic acid), N-isopropylacrylamide polymers, or polyphosphazine. Example of polyamines include: polyethylenimine, polylysine (PLL), spermine, spermidine, polyamine, pseudopeptide-polyamine, peptidomimetic polyamine, dendrimer polyamine, arginine, amidine, protamine, cationic lipid, cationic porphyrin, quaternary salt of a polyamine, or an alpha helical peptide.

[0669] Ligands can also include targeting groups, e.g., a cell or tissue targeting agent, e.g., a lectin, glycoprotein, lipid or protein, e.g., an antibody, that binds to a specified cell type such as a kidney cell. A targeting group can be a thyrotropin, melanotropin, lectin, glycoprotein, surfactant protein A, Mucin carbohydrate, multivalent lactose, multivalent galactose, N-acetyl-galactosamine, N-acetyl-gulucosamine multivalent mannose, multivalent fucose, glycosylated polyaminoacids, multivalent galactose, transferrin, bisphosphonate, polyglutamate, polyaspartate, a lipid, cholesterol, a steroid, bile acid, folate, vitamin B12, vitamin A, biotin, or an RGD peptide or RGD peptide mimetic.

[0670] Other examples of ligands include dyes, intercalating agents (e.g. acridines), cross-linkers (e.g. psoralene, mitomycin C), porphyrins (TPPC4, texaphyrin, Sapphyrin), polycyclic aromatic hydrocarbons (e.g., phenazine, dihydrophenazine), artificial endonucleases (e.g. EDTA), lipophilic molecules, e.g., cholesterol, cholic acid, adamantane acetic acid, 1-pyrene butyric acid, dihydrotestosterone, 1,3-Bis-O (hexadecyl) glycerol, geranyloxyhexyl group, hexadecylglycerol, borneol, menthol, 1,3-propanediol, heptadecyl group, palmitic acid, myristic acid, O3-(oleoyl) lithocholic acid, O3-(oleoyl) cholenic acid, dimethoxytrityl, or phenoxazine) and peptide conjugates (e.g., antennapedia peptide, Tat peptide), alkylating agents, phosphate, amino, mercapto, PEG (e.g., PEG-40K), MPEG, [MPEG] 2, polyamino, alkyl, substituted alkyl, radiolabeled markers, enzymes, haptens (e.g. biotin), transport/absorption facilitators (e.g., aspirin, vitamin E, folic acid), synthetic ribonucleases (e.g., imidazole, bisimidazole, histamine, imidazole clusters, acridine-imidazole conjugates, Eu3+ complexes of tetraazamacrocycles), dinitrophenyl, HRP, or AP.

[0671] Ligands can be proteins, e.g., glycoproteins, or peptides, e.g., molecules having a specific affinity for a co-ligand, or antibodies e.g., an antibody, that binds to a specified cell type such as a hepatic cell. Ligands can also include hormones and hormone receptors. They can also include non-peptidic species, such as lipids, lectins, carbohydrates, vitamins, cofactors, multivalent lactose, multivalent galactose, N-acetyl-galactosamine, N-acetyl-gulucosamine multivalent mannose, or multivalent fucose. The ligand can be, for example, a lipopolysaccharide, an activator of p38 MAP kinase, or an activator of NF-κB.

[0672] The ligand can be a substance, e.g., a drug, which can increase the uptake of the iRNA agent into the cell, for example, by disrupting the cell's cytoskeleton, e.g., by disrupting the cell's microtubules, microfilaments, and/or intermediate filaments. The drug can be, for example, taxon, vincristine, vinblastine, cytochalasin, nocodazole, japlakinolide, latrunculin A, phalloidin, swinholide A, indanocine, or myoservin.

[0673] In some embodiments, a ligand attached to an iRNA as described herein acts as a pharmacokinetic modulator (PK modulator). PK modulators include lipophiles, bile acids, steroids, phospholipid analogues, peptides, protein binding agents, PEG, vitamins etc. Exemplary PK modulators include, but are not limited to, cholesterol, fatty acids, cholic acid, lithocholic acid, dialkylglycerides, diacylglyceride, phospholipids, sphingolipids, naproxen, ibuprofen, vitamin E, biotin etc. Oligonucleotides that comprise a number of phosphorothioate linkages are also known to bind to serum protein, thus short oligonucleotides, e.g., oligonucleotides of about 5 bases, 10 bases, 15 bases or 20 bases, comprising multiple of phosphorothioate linkages in the backbone are also amenable to the present invention as ligands (e.g. as PK modulating ligands). In addition, aptamers that bind serum components (e.g. serum proteins) are also suitable for use as PK modulating ligands in the embodiments described herein.

[0674] Ligand-conjugated oligonucleotides of the invention may be synthesized by the use of an oligonucleotide that bears a pendant reactive functionality, such as that derived from the attachment of a linking molecule onto the oligonucleotide (described below). This reactive oligonucleotide may be reacted directly with commercially-available ligands, ligands that are synthesized bearing any of a variety of protecting groups, or ligands that have a linking moiety attached thereto.

[0675] The oligonucleotides used in the conjugates of the present invention may be conveniently and routinely made through the well-known technique of solid-phase synthesis. Equipment for such synthesis is sold by several vendors including, for example, Applied Biosystems (Foster City, Calif.). Any other means for such synthesis known in the art may additionally or alternatively be employed. It is also known to use similar techniques to prepare other oligonucleotides, such as the phosphorothioates and alkylated derivatives.

[0676] In the ligand-conjugated oligonucleotides and ligand-molecule bearing sequence-specific linked nucleosides of the present invention, the oligonucleotides and oligonucleosides may be assembled on a suitable DNA synthesizer utilizing standard nucleotide or nucleoside precursors, or nucleotide or nucleoside conjugate precursors that already bear the linking moiety, ligand-nucleotide or nucleoside-conjugate precursors that already bear the ligand molecule, or non-nucleoside ligand-bearing building blocks.

[0677] When using nucleotide-conjugate precursors that already bear a linking moiety, the synthesis of the sequence-specific linked nucleosides is typically completed, and the ligand molecule is then reacted with the linking moiety to form the ligand-conjugated oligonucleotide. In some embodiments, the oligonucleotides or linked nucleosides of the present invention are synthesized by an automated synthesizer using phosphoramidites derived from ligand-nucleoside conjugates in addition to the standard phosphoramidites and non-standard phosphoramidites that are commercially available and routinely used in oligonucleotide synthesis.

### A. Lipid Conjugates

[0678] In one embodiment, the ligand or conjugate is a lipid or lipid-based molecule. Such a lipid or lipid-based molecule preferably binds a serum protein, e.g., human serum albumin (HSA). An HSA binding ligand allows for distribution of the conjugate to a target tissue, e.g., a non-kidney target tissue of the body. For example, the target tissue can be the liver, including parenchymal cells of the liver. Other molecules that can bind HSA can also be used as ligands. For example, neproxin or aspirin can be used. A lipid or lipid-based ligand can (a) increase resistance to degradation of the conjugate, (b) increase targeting or transport into a target cell or cell membrane, and/or (c) can be used to adjust binding to a serum protein, e.g., HSA.

[0679] A lipid based ligand can be used to inhibit, e.g., control the binding of the conjugate to a target tissue. For example, a lipid or lipid-based ligand that binds to HSA more strongly will be less likely to be targeted to the kidney and therefore less likely to be cleared from the body. A lipid or lipid-based ligand that binds to HSA less strongly can be used to target the conjugate to the kidney.

[0680] In a preferred embodiment, the lipid based ligand binds HSA. Preferably, it binds HSA with a sufficient affinity such that the conjugate will be preferably distributed to a non-kidney tissue. However, it is preferred that the affinity not be so strong that the HSA-ligand binding cannot be reversed.

[0681] In another preferred embodiment, the lipid based ligand binds HSA weakly or not at all, such that the conjugate will be preferably distributed to the kidney. Other moieties that target to kidney cells can also be used in place of or in addition to the lipid based ligand.

[0682] In another aspect, the ligand is a moiety, e.g., a vitamin, which is taken up by a target cell, e.g., a proliferating cell. These are particularly useful for treating disorders characterized by unwanted cell proliferation, e.g., of the malignant or non-malignant type, e.g., cancer cells. Exemplary vitamins include vitamin A, E, and K. Other exemplary vitamins include are B vitamin, e.g., folic acid, B12, riboflavin, biotin, pyridoxal or other vitamins or nutrients taken up by target cells such as liver cells. Also included are HSA and low density lipoprotein (LDL).

### B. Cell Permeation Agents

[0683] In another aspect, the ligand is a cell-permeation agent, preferably a helical cell-permeation agent. Preferably, the agent is amphipathic. An exemplary agent is a peptide such as tat or antennopedia. If the agent is a peptide, it can be modified, including a peptidylmimetic, invertomers, non-peptide or pseudo-peptide linkages, and use of D-amino acids. The helical agent is preferably an alpha-helical agent, which preferably has a lipophilic and a lipophobic phase.

[0684] The ligand can be a peptide or peptidomimetic. A peptidomimetic (also referred to herein as an oligopeptidomimetic) is a molecule capable of folding into a defined three-dimensional structure similar to a natural peptide. The attachment of peptide and peptidomimetics to iRNA agents can affect pharmacokinetic distribution of the iRNA, such as by enhancing cellular recognition and absorption. The peptide or peptidomimetic moiety can be about 5-50 amino acids long, e.g., about 5, 10, 15, 20, 25, 30, 35, 40, 45, or 50 amino acids long.

[0685] A peptide or peptidomimetic can be, for example, a cell permeation peptide, cationic peptide, amphipathic peptide, or hydrophobic peptide (e.g., consisting primarily of Tyr, Trp or Phe). The peptide moiety can be a dendrimer peptide, constrained peptide or crosslinked peptide. In another alternative, the peptide moiety can include a hydrophobic membrane translocation sequence (MTS). An exemplary hydrophobic MTS-containing peptide is RFGF having the amino acid sequence AAVALLPAVLLALLAP (SEQ ID NO: 2986). An RFGF analogue (e.g., amino acid sequence AALLPVLLAAP (SEQ ID NO: 2987) containing a hydrophobic MTS can also be a targeting moiety. The peptide moiety can be a “delivery” peptide, which can carry large polar molecules including peptides, oligonucleotides, and protein across cell membranes. For example, sequences from the HIV Tat protein (GRKKRRQRRRPPQ (SEQ ID NO: 2988) and the Drosophila Antennapedia protein (RQIKIWFQNRRMKWKK (SEQ ID NO: 2989) have been found to be capable of functioning as delivery peptides. A peptide or peptidomimetic can be encoded by a random sequence of DNA, such as a peptide identified from a phage-display library, or one-bead-one-compound (OBOC) combinatorial library (Lam et al., Nature, 354:82-84, 1991). Examples of a peptide or peptidomimetic tethered to a dsRNA agent via an incorporated monomer unit for cell targeting purposes is an arginine-glycine-aspartic acid (RGD)-peptide, or RGD mimic. A peptide moiety can range in length from about 5 amino acids to about 40 amino acids. The peptide moieties can have a structural modification, such as to increase stability or direct conformational properties. Any of the structural modifications described below can be utilized.

[0686] An RGD peptide for use in the compositions and methods of the invention may be linear or cyclic, and may be modified, e.g., glyciosylated or methylated, to facilitate targeting to a specific tissue(s). RGD-containing peptides and peptidiomimemtics may include D-amino acids, as well as synthetic RGD mimics. In addition to RGD, one can use other moieties that target the integrin ligand. Preferred conjugates of this ligand target PECAM-1 or VEGF.

[0687] A “cell permeation peptide” is capable of permeating a cell, e.g., a microbial cell, such as a bacterial or fungal cell, or a mammalian cell, such as a human cell. A microbial cell-permeating peptide can be, for example, a α-helical linear peptide (e.g., LL-37 or Ceropin P1), a disulfide bond-containing peptide (e.g., α-defensin, β-defensin or bactenecin), or a peptide containing only one or two dominating amino acids (e.g., PR-39 or indolicidin). A cell permeation peptide can also include a nuclear localization signal (NLS). For example, a cell permeation peptide can be a bipartite amphipathic peptide, such as MPG, which is derived from the fusion peptide domain of HIV-1 gp41 and the NLS of SV40 large T antigen (Simeoni et al., Nucl. Acids Res. 31:2717-2724, 2003).

### C. Carbohydrate Conjugates

[0688] In some embodiments of the compositions and methods of the invention, an iRNA oligonucleotide further comprises a carbohydrate. The carbohydrate conjugated iRNA are advantageous for the in vivo delivery of nucleic acids, as well as compositions suitable for in vivo therapeutic use, as described herein. As used herein, “carbohydrate” refers to a compound which is either a carbohydrate per se made up of one or more monosaccharide units having at least 6 carbon atoms (which can be linear, branched or cyclic) with an oxygen, nitrogen or sulfur atom bonded to each carbon atom; or a compound having as a part thereof a carbohydrate moiety made up of one or more monosaccharide units each having at least six carbon atoms (which can be linear, branched or cyclic), with an oxygen, nitrogen or sulfur atom bonded to each carbon atom. Representative carbohydrates include the sugars (mono-, di-, tri- and oligosaccharides containing from about 4, 5, 6, 7, 8, or 9 monosaccharide units), and polysaccharides such as starches, glycogen, cellulose and polysaccharide gums. Specific monosaccharides include C5 and above (e.g., C5, C6, C7, or C8) sugars; di- and trisaccharides include sugars having two or three monosaccharide units (e.g., C5, C6, C7, or C8).

[0689] In embodiments in which a first dsRNA agent targeting LDHA and a second dsRNA agent targeting HAO1 are covalently attached (i.e., a dual targeting RNAi agent), one or both of the dsRNA agents may independently comprise one or more carbohydrate ligands.

[0690] In one embodiment, a carbohydrate conjugate for use in the compositions and methods of the invention is selected from the group consisting of:

[chemical structure]

[chemical structure]

[chemical structure]

[chemical structure]

[chemical structure]

[chemical structure]

[0691] In another embodiment, a carbohydrate conjugate for use in the compositions and methods of the invention is a monosaccharide. In one embodiment, the monosaccharide is an N-acetylgalactosamine, such as

[chemical structure]

[0692] Another representative carbohydrate conjugate for use in the embodiments described herein includes, but is not limited to,

[chemical structure]

when one of X or Y is an oligonucleotide, the other is a hydrogen.

[0693] In embodiments in which a first dsRNA agent targeting LDHA and a second dsRNA agent targeting HAO1 are covalently attached (i.e., a dual targeting RNAi agent), one or both of the dsRNA agents may independently comprise a GalNAc or GalNAc derivative ligand.

[0694] In certain embodiments of the invention, the GalNAc or GalNAc derivative is attached to an iRNA agent of the invention via a monovalent linker. In some embodiments, the GalNAc or GalNAc derivative is attached to an iRNA agent of the invention via a bivalent linker. In yet other embodiments of the invention, the GalNAc or GalNAc derivative is attached to an iRNA agent of the invention via a trivalent linker.

[0695] In one embodiment, the double stranded RNAi agents of the invention comprise one GalNAc or GalNAc derivative attached to the iRNA agent, e.g., the 5′end of the sense strand of a dsRNA agent, or the 5′ end of one or both sense strands of a dual targeting RNAi agent as described herein. In another embodiment, the double stranded RNAi agents of the invention, or one or both dsRNA agents of a dual targeting RNAi agent as described herein, comprise a plurality (e.g., 2, 3, 4, 5, or 6) GalNAc or GalNAc derivatives, each independently attached to a plurality of nucleotides of the double stranded RNAi agent through a plurality of monovalent linkers.

[0696] In some embodiments, for example, when the two strands of an iRNA agent of the invention are part of one larger molecule connected by an uninterrupted chain of nucleotides between the 3′-end of one strand and the 5′-end of the respective other strand forming a hairpin loop comprising, a plurality of unpaired nucleotides, each unpaired nucleotide within the hairpin loop may independently comprise a GalNAc or GalNAc derivative attached via a monovalent linker.

[0697] In some embodiments, the carbohydrate conjugate further comprises one or more additional ligands as described above, such as, but not limited to, a PK modulator and/or a cell permeation peptide.

[0698] Additional carbohydrate conjugates (and linkers) suitable for use in the present invention include those described in PCT Publication Nos. WO 2014/179620 and WO 2014/179627, the entire contents of each of which are incorporated herein by reference.

### D. Linkers

[0699] In some embodiments, the conjugate or ligand described herein can be attached to an iRNA oligonucleotide with various linkers that can be cleavable or non cleavable.

[0700] The term “linker” or “linking group” means an organic moiety that connects two parts of a compound, e.g., covalently attaches two parts of a compound. Linkers typically comprise a direct bond or an atom such as oxygen or sulfur, a unit such as NR8, C(O), C(O) NH, SO, SO₂, SO₂NH or a chain of atoms, such as, but not limited to, substituted or unsubstituted alkyl, substituted or unsubstituted alkenyl, substituted or unsubstituted alkynyl, arylalkyl, arylalkenyl, arylalkynyl, heteroarylalkyl, heteroarylalkenyl, heteroarylalkynyl, heterocyclylalkyl, heterocyclylalkenyl, heterocyclylalkynyl, aryl, heteroaryl, heterocyclyl, cycloalkyl, cycloalkenyl, alkylarylalkyl, alkylarylalkenyl, alkylarylalkynyl, alkenylarylalkyl, alkenylarylalkenyl, alkenylarylalkynyl, alkynylarylalkyl, alkynylarylalkenyl, alkynylarylalkynyl, alkylheteroarylalkyl, alkylheteroarylalkenyl, alkylheteroarylalkynyl, alkenylheteroarylalkyl, alkenylheteroarylalkenyl, alkenylheteroarylalkynyl, alkynylheteroarylalkyl, alkynylheteroarylalkenyl, alkynylheteroarylalkynyl, alkylheterocyclylalkyl, alkylheterocyclylalkenyl, alkylhererocyclylalkynyl, alkenylheterocyclylalkyl, alkenylheterocyclylalkenyl, alkenylheterocyclylalkynyl, alkynylheterocyclylalkyl, alkynylheterocyclylalkenyl, alkynylheterocyclylalkynyl, alkylaryl, alkenylaryl, alkynylaryl, alkylheteroaryl, alkenylheteroaryl, alkynylhereroaryl, which one or more methylenes can be interrupted or terminated by O, S, S(O), SO₂, N(R8), C(O), substituted or unsubstituted aryl, substituted or unsubstituted heteroaryl, substituted or unsubstituted heterocyclic; where R8 is hydrogen, acyl, aliphatic or substituted aliphatic. In one embodiment, the linker is between about 1-24 atoms, 2-24, 3-24, 4-24, 5-24, 6-24, 6-18, 7-18, 8-18 atoms, 7-17, 8-17, 6-16, 7-17, or 8-16 atoms.

[0701] A cleavable linking group is one which is sufficiently stable outside the cell, but which upon entry into a target cell is cleaved to release the two parts the linker is holding together. In a preferred embodiment, the cleavable linking group is cleaved at least about 10 times, 20, times, 30 times, 40 times, 50 times, 60 times, 70 times, 80 times, 90 times or more, or at least about 100 times faster in a target cell or under a first reference condition (which can, e.g., be selected to mimic or represent intracellular conditions) than in the blood of a subject, or under a second reference condition (which can, e.g., be selected to mimic or represent conditions found in the blood or serum).

[0702] Cleavable linking groups are susceptible to cleavage agents, e.g., pH, redox potential or the presence of degradative molecules. Generally, cleavage agents are more prevalent or found at higher levels or activities inside cells than in serum or blood. Examples of such degradative agents include: redox agents which are selected for particular substrates or which have no substrate specificity, including, e.g., oxidative or reductive enzymes or reductive agents such as mercaptans, present in cells, that can degrade a redox cleavable linking group by reduction; esterases; endosomes or agents that can create an acidic environment, e.g., those that result in a pH of five or lower; enzymes that can hydrolyze or degrade an acid cleavable linking group by acting as a general acid, peptidases (which can be substrate specific), and phosphatases.

[0703] A cleavable linkage group, such as a disulfide bond can be susceptible to pH. The pH of human serum is 7.4, while the average intracellular pH is slightly lower, ranging from about 7.1-7.3. Endosomes have a more acidic pH, in the range of 5.5-6.0, and lysosomes have an even more acidic pH at around 5.0. Some linkers will have a cleavable linking group that is cleaved at a preferred pH, thereby releasing a cationic lipid from the ligand inside the cell, or into the desired compartment of the cell.

[0704] A linker can include a cleavable linking group that is cleavable by a particular enzyme. The type of cleavable linking group incorporated into a linker can depend on the cell to be targeted. For example, a liver-targeting ligand can be linked to a cationic lipid through a linker that includes an ester group. Liver cells are rich in esterases, and therefore the linker will be cleaved more efficiently in liver cells than in cell types that are not esterase-rich. Other cell-types rich in esterases include cells of the lung, renal cortex, and testis.

[0705] Linkers that contain peptide bonds can be used when targeting cell types rich in peptidases, such as liver cells and synoviocytes.

[0706] In general, the suitability of a candidate cleavable linking group can be evaluated by testing the ability of a degradative agent (or condition) to cleave the candidate linking group. It will also be desirable to also test the candidate cleavable linking group for the ability to resist cleavage in the blood or when in contact with other non-target tissue. Thus, one can determine the relative susceptibility to cleavage between a first and a second condition, where the first is selected to be indicative of cleavage in a target cell and the second is selected to be indicative of cleavage in other tissues or biological fluids, e.g., blood or serum. The evaluations can be carried out in cell free systems, in cells, in cell culture, in organ or tissue culture, or in whole animals. It can be useful to make initial evaluations in cell-free or culture conditions and to confirm by further evaluations in whole animals. In preferred embodiments, useful candidate compounds are cleaved at least about 2, 4, 10, 20, 30, 40, 50, 60, 70, 80, 90, or about 100 times faster in the cell (or under in vitro conditions selected to mimic intracellular conditions) as compared to blood or serum (or under in vitro conditions selected to mimic extracellular conditions).

i. Redox Cleavable Linking Groups

[0707] In one embodiment, a cleavable linking group is a redox cleavable linking group that is cleaved upon reduction or oxidation. An example of reductively cleavable linking group is a disulphide linking group (—S—S—). To determine if a candidate cleavable linking group is a suitable “reductively cleavable linking group,” or for example is suitable for use with a particular iRNA moiety and particular targeting agent one can look to methods described herein. For example, a candidate can be evaluated by incubation with dithiothreitol (DTT), or other reducing agent using reagents know in the art, which mimic the rate of cleavage which would be observed in a cell, e.g., a target cell. The candidates can also be evaluated under conditions which are selected to mimic blood or serum conditions. In one, candidate compounds are cleaved by at most about 10% in the blood. In other embodiments, useful candidate compounds are degraded at least about 2, 4, 10, 20, 30, 40, 50, 60, 70, 80, 90, or about 100 times faster in the cell (or under in vitro conditions selected to mimic intracellular conditions) as compared to blood (or under in vitro conditions selected to mimic extracellular conditions). The rate of cleavage of candidate compounds can be determined using standard enzyme kinetics assays under conditions chosen to mimic intracellular media and compared to conditions chosen to mimic extracellular media.

[0708] ii. Phosphate-based cleavable linking groups In another embodiment, a cleavable linker comprises a phosphate-based cleavable linking group. A phosphate-based cleavable linking group is cleaved by agents that degrade or hydrolyze the phosphate group. An example of an agent that cleaves phosphate groups in cells are enzymes such as phosphatases in cells. Examples of phosphate-based linking groups are —O—P(O)(ORk)-O—, —O—P(S)(ORk)-O—, —O—P(S)(SRk)-O—, —S—P(O)(ORk)-O—, —O—P(O)(ORk)-S—, —S—P(O)(ORk)-S—, —O—P(S)(ORk)-S—, —S—P(S)(ORk)-O—, —O—P(O)(Rk)-O—, —O—P(S)(Rk)-O—, —S—P(O)(Rk)-O—, —S—P(S)(Rk)-O—, —S—P(O)(Rk)-S—, —O—P(S)(Rk)-S—. Preferred embodiments are —O—P(O)(OH)—O—, —O—P(S)(OH)—O—, —O—P(S)(SH)—O—, —S—P(O)(OH)—O—, —O—P(O)(OH)—S—, —S—P(O)(OH)—S—, —O—P(S)(OH)—S—, —S—P(S)(OH)—O—, —O—P(O)(H)—O—, —O—P(S)(H)—O—, —S—P(O)(H)—O—, —S—P(S)(H)—O—, —S—P(O)(H)—S—, —O—P(S)(H)—S—. A preferred embodiment is —O—P(O)(OH)—O—. These candidates can be evaluated using methods analogous to those described above.

iii. Acid Cleavable Linking Groups

[0709] In another embodiment, a cleavable linker comprises an acid cleavable linking group. An acid cleavable linking group is a linking group that is cleaved under acidic conditions. In preferred embodiments acid cleavable linking groups are cleaved in an acidic environment with a pH of about 6.5 or lower (e.g., about 6.0, 5.75, 5.5, 5.25, 5.0, or lower), or by agents such as enzymes that can act as a general acid. In a cell, specific low pH organelles, such as endosomes and lysosomes can provide a cleaving environment for acid cleavable linking groups. Examples of acid cleavable linking groups include but are not limited to hydrazones, esters, and esters of amino acids. Acid cleavable groups can have the general formula —C═NN—, C(O)O, or —OC(O).

[0710] A preferred embodiment is when the carbon attached to the oxygen of the ester (the alkoxy group) is an aryl group, substituted alkyl group, or tertiary alkyl group such as dimethyl pentyl or t-butyl. These candidates can be evaluated using methods analogous to those described above.

[0711] iv. Ester-based linking groups In another embodiment, a cleavable linker comprises an ester-based cleavable linking group. An ester-based cleavable linking group is cleaved by enzymes such as esterases and amidases in cells. Examples of ester-based cleavable linking groups include but are not limited to esters of alkylene, alkenylene and alkynylene groups. Ester cleavable linking groups have the general formula —C(O)O—, or —OC(O)—. These candidates can be evaluated using methods analogous to those described above.

v. Peptide-Based Cleaving Groups

[0712] In yet another embodiment, a cleavable linker comprises a peptide-based cleavable linking group. A peptide-based cleavable linking group is cleaved by enzymes such as peptidases and proteases in cells. Peptide-based cleavable linking groups are peptide bonds formed between amino acids to yield oligopeptides (e.g., dipeptides, tripeptides etc.) and polypeptides. Peptide-based cleavable groups do not include the amide group (—C(O) NH—). The amide group can be formed between any alkylene, alkenylene or alkynelene. A peptide bond is a special type of amide bond formed between amino acids to yield peptides and proteins. The peptide based cleavage group is generally limited to the peptide bond (i.e., the amide bond) formed between amino acids yielding peptides and proteins and does not include the entire amide functional group. Peptide-based cleavable linking groups have the general formula —NHCHRAC(O)NHCHRBC(O)—, where RA and RB are the R groups of the two adjacent amino acids. These candidates can be evaluated using methods analogous to those described above.

[0713] In one embodiment, an iRNA of the invention is conjugated to a carbohydrate through a linker. Non-limiting examples of iRNA carbohydrate conjugates with linkers of the compositions and methods of the invention include, but are not limited to,

[chemical structure]

[chemical structure]

[chemical structure]

[chemical structure]

when one of X or Y is an oligonucleotide, the other is a hydrogen.

[0714] In certain embodiments of the compositions and methods of the invention, a ligand is one or more GalNAc (N-acetylgalactosamine) derivatives attached through a bivalent or trivalent branched linker.

[0715] In embodiments in which a first dsRNA agent targeting LDHA and a second dsRNA agent targeting HAO1 are covalently attached (i.e., a dual targeting RNAi agent), one or both of the dsRNA agents may independently a ligand comprising one or more GalNAc (N-acetylgalactosamine) derivatives attached through a bivalent or trivalent branched linker.

[0716] In one embodiment, a dsRNA of the invention is conjugated to a bivalent or trivalent branched linker selected from the group of structures shown in any of formula (XLV)-(XLVI):

[chemical structure]

[0717] wherein:
[0718] q2A, q2B, q3A, q3B, q4A, q4B, q5A, q5B and q5C represent independently for each occurrence 0-20 and wherein the repeating unit can be the same or different;
[0719] p^{2A}, p^{2B}, p^{3A}, p^{3B}, p^{4A}, p^{4B}, p^{5A}, p^{5B}, p^{5C}, T^{2A}, T^{2B}, T^{3A}, T^{3B}, T^{4A}, T^{4B}, T^{4A}, T^{5B}, T^{5C} are each independently for each occurrence absent, CO, NH, O, S, OC(O), NHC(O), CH₂, CH₂NH or CH₂O;
   Q^{2A}, Q^{2B}, Q^{3A}, Q^{3B}, Q^{4A}, Q^{4B}, Q^{5A}, Q^{5B}, Q^{5C} are independently for each occurrence absent, alkylene, substituted alkylene wherein one or more methylenes can be interrupted or terminated by one or more of O, S, S(O), SO₂, N(R^{N}), C(R′)═C(R″), C═C or C(O);
   R^{2A}, R^{2B}, R^{3A}, R^{3B}, R^{4A}, R^{4B}, R^{5A}, R^{5B}, R^{5C} are each independently for each occurrence absent, NH, O, S, CH₂, C(O)O, C(O) NH, NHCH(R^{a})C(O), —C(O)—CH(R^{a})—NH—, CO, CH═N—O,

[chemical structure]

or heterocyclyl;
[0720] L^{2A}, L^{2B}, L^{3A}, L^{3B}, L^{4A}, L^{4B}, L^{5A}, L^{5B} and L^{5C} represent the ligand; i.e. each independently for each occurrence a monosaccharide (such as GalNAc), disaccharide, trisaccharide, tetrasaccharide, oligosaccharide, or polysaccharide; and R^{a} is H or amino acid side chain. Trivalent conjugating GalNAc derivatives are particularly useful for use with RNAi agents for inhibiting the expression of a target gene, such as those of formula (XLIX):

[chemical structure]

[0721] wherein L^{5A}, L^{5B} and L^{5C} represent a monosaccharide, such as GalNAc derivative.

[0722] Examples of suitable bivalent and trivalent branched linker groups conjugating GalNAc derivatives include, but are not limited to, the structures recited above as formulas II, VII, XI, X, and XIII.

[0723] Representative U.S. patents that teach the preparation of RNA conjugates include, but are not limited to, U.S. Pat. Nos. 4,828,979; 4,948,882; 5,218,105; 5,525,465; 5,541,313; 5,545,730; 5,552,538; 5,578,717, 5,580,731; 5,591,584; 5,109,124; 5,118,802; 5,138,045; 5,414,077; 5,486,603; 5,512,439; 5,578,718; 5,608,046; 4,587,044; 4,605,735; 4,667,025; 4,762,779; 4,789,737; 4,824,941; 4,835,263; 4,876,335; 4,904,582; 4,958,013; 5,082,830; 5,112,963; 5,214,136; 5,082,830; 5,112,963; 5,214,136; 5,245,022; 5,254,469; 5,258,506; 5,262,536; 5,272,250; 5,292,873; 5,317,098; 5,371,241, 5,391,723; 5,416,203, 5,451,463; 5,510,475; 5,512,667; 5,514,785; 5,565,552; 5,567,810; 5,574,142; 5,585,481; 5,587,371; 5,595,726; 5,597,696; 5,599,923; 5,599,928 and 5,688,941; 6,294,664; 6,320,017; 6,576,752; 6,783,931; 6,900,297; 7,037,646; 8,106,022, the entire contents of each of which are hereby incorporated herein by reference.

[0724] It is not necessary for all positions in a given compound to be uniformly modified, and in fact more than one of the aforementioned modifications can be incorporated in a single compound or even at a single nucleoside within an iRNA. The present invention also includes iRNA compounds that are chimeric compounds.

[0725] “Chimeric” iRNA compounds or “chimeras,” in the context of this invention, are iRNA compounds, preferably dsRNAs, which contain two or more chemically distinct regions, each made up of at least one monomer unit, i.e., a nucleotide in the case of a dsRNA compound. These iRNAs typically contain at least one region wherein the RNA is modified so as to confer upon the iRNA increased resistance to nuclease degradation, increased cellular uptake, and/or increased binding affinity for the target nucleic acid. An additional region of the iRNA can serve as a substrate for enzymes capable of cleaving RNA:DNA or RNA:RNA hybrids. By way of example, RNase H is a cellular endonuclease which cleaves the RNA strand of an RNA:DNA duplex. Activation of RNase H, therefore, results in cleavage of the RNA target, thereby greatly enhancing the efficiency of iRNA inhibition of gene expression. Consequently, comparable results can often be obtained with shorter iRNAs when chimeric dsRNAs are used, compared to phosphorothioate deoxy dsRNAs hybridizing to the same target region. Cleavage of the RNA target can be routinely detected by gel electrophoresis and, if necessary, associated nucleic acid hybridization techniques known in the art.

[0726] In certain instances, the RNA of an iRNA can be modified by a non-ligand group. A number of non-ligand molecules have been conjugated to iRNAs in order to enhance the activity, cellular distribution or cellular uptake of the iRNA, and procedures for performing such conjugations are available in the scientific literature. Such non-ligand moieties have included lipid moieties, such as cholesterol (Kubo, T. et al., Biochem. Biophys. Res. Comm., 2007, 365 (1): 54-61; Letsinger et al., Proc. Natl. Acad. Sci. USA, 1989, 86:6553), cholic acid (Manoharan et al., Bioorg. Med. Chem. Lett., 1994, 4:1053), a thioether, e.g., hexyl-S-tritylthiol (Manoharan et al., Ann. N.Y. Acad. Sci., 1992, 660:306; Manoharan et al., Bioorg. Med. Chem. Let., 1993, 3:2765), a thiocholesterol (Oberhauser et al., Nucl. Acids Res., 1992, 20:533), an aliphatic chain, e.g., dodecandiol or undecyl residues (Saison-Behmoaras et al., EMBO J., 1991, 10:111; Kabanov et al., FEBS Lett., 1990, 259:327; Svinarchuk et al., Biochimie, 1993, 75:49), a phospholipid, e.g., di-hexadecyl-rac-glycerol or triethylammonium 1,2-di-O-hexadecyl-rac-glycero-3-H-phosphonate (Manoharan et al., Tetrahedron Lett., 1995, 36:3651; Shea et al., Nucl. Acids Res., 1990, 18:3777), a polyamine or a polyethylene glycol chain (Manoharan et al., Nucleosides & Nucleotides, 1995, 14:969), or adamantane acetic acid (Manoharan et al., Tetrahedron Lett., 1995, 36:3651), a palmityl moiety (Mishra et al., Biochim. Biophys. Acta, 1995, 1264:229), or an octadecylamine or hexylamino-carbonyl-oxycholesterol moiety (Crooke et al., J. Pharmacol. Exp. Ther., 1996, 277:923). Representative United States patents that teach the preparation of such RNA conjugates have been listed above. Typical conjugation protocols involve the synthesis of an RNAs bearing an amino linker at one or more positions of the sequence. The amino group is then reacted with the molecule being conjugated using appropriate coupling or activating reagents. The conjugation reaction can be performed either with the RNA still bound to the solid support or following cleavage of the RNA, in solution phase. Purification of the RNA conjugate by HPLC typically affords the pure conjugate.

### IV. Delivery of an iRNA of the Invention

[0727] The delivery of an iRNA of the invention to a cell e.g., a cell within a subject, such as a human subject (e.g., a subject in need thereof, such as a subject having a disorder of lipid metabolism) can be achieved in a number of different ways. For example, delivery may be performed by contacting a cell with an iRNA of the invention either in vitro or in vivo. In vivo delivery may also be performed directly by administering a composition comprising an iRNA, e.g., a dsRNA, to a subject. Alternatively, in vivo delivery may be performed indirectly by administering one or more vectors that encode and direct the expression of the iRNA. These alternatives are discussed further below.

[0728] In the methods of the invention which include a first dsRNA agent targeting LDHA and a second dsRNA agent targeting HAO1 are covalently attached (i.e., a dual targeting RNAi agent), the delivery of the first agent may be the same or different than the delivery of the second agent.

[0729] In general, any method of delivering a nucleic acid molecule (in vitro or in vivo) can be adapted for use with an iRNA of the invention (see e.g., Akhtar S. and Julian RL., (1992) Trends Cell. Biol. 2 (5): 139-144 and WO94/02595, which are incorporated herein by reference in their entireties). For in vivo delivery, factors to consider in order to deliver an iRNA molecule include, for example, biological stability of the delivered molecule, prevention of non-specific effects, and accumulation of the delivered molecule in the target tissue. The non-specific effects of an iRNA can be minimized by local administration, for example, by direct injection or implantation into a tissue or topically administering the preparation. Local administration to a treatment site maximizes local concentration of the agent, limits the exposure of the agent to systemic tissues that can otherwise be harmed by the agent or that can degrade the agent, and permits a lower total dose of the iRNA molecule to be administered. Several studies have shown successful knockdown of gene products when an iRNA is administered locally. For example, intraocular delivery of a VEGF dsRNA by intravitreal injection in cynomolgus monkeys (Tolentino, M J. et al., (2004) Retina 24:132-138) and subretinal injections in mice (Reich, S J. et al. (2003) Mol. Vis. 9:210-216) were both shown to prevent neovascularization in an experimental model of age-related macular degeneration. In addition, direct intratumoral injection of a dsRNA in mice reduces tumor volume (Pille, J. et al. (2005) Mol. Ther. 11:267-274) and can prolong survival of tumor-bearing mice (Kim, W J. et al., (2006) Mol. Ther. 14:343-350; Li, S. et al., (2007) Mol. Ther. 15:515-523). RNA interference has also shown success with local delivery to the CNS by direct injection (Dorn, G. et al., (2004) Nucleic Acids 32: e49; Tan, P H. et al. (2005) Gene Ther. 12:59-66; Makimura, H. et al. (2002) BMC Neurosci. 3:18; Shishkina, G T., et al. (2004) Neuroscience 129:521-528; Thakker, E R., et al. (2004) Proc. Natl. Acad. Sci. U.S.A. 101:17270-17275; Akaneya, Y., et al. (2005) J. Neurophysiol. 93:594-602) and to the lungs by intranasal administration (Howard, K A. et al., (2006) Mol. Ther. 14:476-484; Zhang, X. et al., (2004) J. Biol. Chem. 279:10677-10684; Bitko, V. et al., (2005) Nat. Med. 11:50-55). For administering an iRNA systemically for the treatment of a disease, the RNA can be modified or alternatively delivered using a drug delivery system; both methods act to prevent the rapid degradation of the dsRNA by endo- and exo-nucleases in vivo. Modification of the RNA or the pharmaceutical carrier can also permit targeting of the iRNA composition to the target tissue and avoid undesirable off-target effects. iRNA molecules can be modified by chemical conjugation to lipophilic groups such as cholesterol to enhance cellular uptake and prevent degradation. For example, an iRNA directed against ApoB conjugated to a lipophilic cholesterol moiety was injected systemically into mice and resulted in knockdown of apoB mRNA in both the liver and jejunum (Soutschek, J. et al., (2004) Nature 432:173-178). Conjugation of an iRNA to an aptamer has been shown to inhibit tumor growth and mediate tumor regression in a mouse model of prostate cancer (McNamara, J O. et al., (2006) Nat. Biotechnol. 24:1005-1015). In an alternative embodiment, the iRNA can be delivered using drug delivery systems such as a nanoparticle, a dendrimer, a polymer, liposomes, or a cationic delivery system. Positively charged cationic delivery systems facilitate binding of an iRNA molecule (negatively charged) and also enhance interactions at the negatively charged cell membrane to permit efficient uptake of an iRNA by the cell. Cationic lipids, dendrimers, or polymers can either be bound to an iRNA, or induced to form a vesicle or micelle (see e.g., Kim S H. et al., (2008) Journal of Controlled Release 129 (2): 107-116) that encases an iRNA. The formation of vesicles or micelles further prevents degradation of the iRNA when administered systemically. Methods for making and administering cationic-iRNA complexes are well within the abilities of one skilled in the art (see e.g., Sorensen, D R., et al. (2003) J. Mol. Biol 327:761-766; Verma, U N. et al., (2003) Clin. Cancer Res. 9:1291-1300; Arnold, A S et al., (2007) J. Hypertens. 25:197-205, which are incorporated herein by reference in their entirety). Some non-limiting examples of drug delivery systems useful for systemic delivery of iRNAs include DOTAP (Sorensen, D R., et al (2003), supra; Verma, U N. et al., (2003), supra), Oligofectamine, “solid nucleic acid lipid particles” (Zimmermann, T S. et al., (2006) Nature 441:111-114), cardiolipin (Chien, P Y. et al., (2005) Cancer Gene Ther. 12:321-328; Pal, A. et al., (2005) Int J. Oncol. 26:1087-1091), polyethyleneimine (Bonnet M E. et al., (2008) Pharm. Res. August 16 Epub ahead of print; Aigner, A. (2006) J. Biomed. Biotechnol. 71659), Arg-Gly-Asp (RGD) peptides (Liu, S. (2006) Mol. Pharm. 3:472-487), and polyamidoamines (Tomalia, D A. et al., (2007) Biochem. Soc. Trans. 35:61-67; Yoo, H. et al., (1999) Pharm. Res. 16:1799-1804). In some embodiments, an iRNA forms a complex with cyclodextrin for systemic administration. Methods for administration and pharmaceutical compositions of iRNAs and cyclodextrins can be found in U.S. Pat. No. 7,427,605, which is herein incorporated by reference in its entirety.

A. Vector Encoded iRNAs of the Invention

[0730] iRNA targeting the LDHA gene and iRNA targeting LDHA and HAO1 can be expressed from transcription units inserted into DNA or RNA vectors (see, e.g., Couture, A, et al., TIG. (1996), 12:5-10; Skillern, A., et al., International PCT Publication No. WO 00/22113, Conrad, International PCT Publication No. WO 00/22114, and Conrad, U.S. Pat. No. 6,054,299). Expression can be transient (on the order of hours to weeks) or sustained (weeks to months or longer), depending upon the specific construct used and the target tissue or cell type. These transgenes can be introduced as a linear construct, a circular plasmid, or a viral vector, which can be an integrating or non-integrating vector. The transgene can also be constructed to permit it to be inherited as an extrachromosomal plasmid (Gassmann, et al., (1995) Proc. Natl. Acad. Sci. USA 92:1292).

[0731] The individual strand or strands of an iRNA can be transcribed from a promoter on an expression vector. Where two separate strands are to be expressed to generate, for example, a dsRNA, two separate expression vectors can be co-introduced (e.g., by transfection or infection) into a target cell. Alternatively each individual strand of a dsRNA can be transcribed by promoters both of which are located on the same expression plasmid. In one embodiment, a dsRNA is expressed as inverted repeat polynucleotides joined by a linker polynucleotide sequence such that the dsRNA has a stem and loop structure.

[0732] iRNA expression vectors are generally DNA plasmids or viral vectors. Expression vectors compatible with eukaryotic cells, preferably those compatible with vertebrate cells, can be used to produce recombinant constructs for the expression of an iRNA as described herein. Eukaryotic cell expression vectors are well known in the art and are available from a number of commercial sources. Typically, such vectors are provided containing convenient restriction sites for insertion of the desired nucleic acid segment. Delivery of iRNA expressing vectors can be systemic, such as by intravenous or intramuscular administration, by administration to target cells ex-planted from the patient followed by reintroduction into the patient, or by any other means that allows for introduction into a desired target cell.

[0733] Viral vector systems which can be utilized with the methods and compositions described herein include, but are not limited to, (a) adenovirus vectors; (b) retrovirus vectors, including but not limited to lentiviral vectors, moloney murine leukemia virus, etc.; (c) adeno-associated virus vectors; (d) herpes simplex virus vectors; (e) SV 40 vectors; (f) polyoma virus vectors; (g) papilloma virus vectors; (h) picornavirus vectors; (i) pox virus vectors such as an orthopox, e.g., vaccinia virus vectors or avipox, e.g. canary pox or fowl pox; and (j) a helper-dependent or gutless adenovirus. Replication-defective viruses can also be advantageous. Different vectors will or will not become incorporated into the cells' genome. The constructs can include viral sequences for transfection, if desired. Alternatively, the construct can be incorporated into vectors capable of episomal replication, e.g. EPV and EBV vectors. Constructs for the recombinant expression of an iRNA will generally require regulatory elements, e.g., promoters, enhancers, etc., to ensure the expression of the iRNA in target cells. Other aspects to consider for vectors and constructs are known in the art.

### V. Pharmaceutical Compositions of the Invention

[0734] The present invention also includes pharmaceutical compositions and formulations which include the iRNAs of the invention. Accordingly, in one embodiment, provided herein are pharmaceutical compositions comprising a double stranded ribonucleic acid (dsRNA) agent that inhibits expression of lactic acid dehydrogenase A (LDHA) in a cell, such as a liver cell, wherein the dsRNA agent comprises a sense strand and an antisense strand, wherein the sense strand comprises at least 15 contiguous nucleotides differing by no more than 3 nucleotides from the nucleotide sequence of SEQ ID NO:1, and said antisense strand comprises at least 15 contiguous nucleotides differing by no more than 3 nucleotides from the nucleotide sequence of SEQ ID NO: 2; and a pharmaceutically acceptable carrier.

[0735] In another embodiment, provided herein are pharmaceutical compositions comprising a dsRNA agent that inhibits expression of lactic acid dehydrogenase A (LDHA) in a cell, such as a liver cell, wherein the dsRNA agent comprises a sense strand and an antisense strand, the antisense strand comprising a region of complementarity which comprises at least 15 contiguous nucleotides differing by no more than 3 nucleotides from any one of the antisense sequences listed in any one of Tables 2-5; and a pharmaceutically acceptable carrier.

[0736] In one embodiment, provided herein are pharmaceutical compositions comprising a first double stranded ribonucleic acid (dsRNA) agent that inhibits expression of lactic acid dehydrogenase A (LDHA) in a cell, such as a liver cell, comprising a sense strand and an antisense strand, wherein the sense strand comprises at least 15 contiguous nucleotides differing by no more than 3 nucleotides from the nucleotide sequence of SEQ ID NO: 1, and the antisense strand comprises at least 15 contiguous nucleotides differing by no more than 3 nucleotides from the nucleotide sequence of SEQ ID NO:2; and a second double stranded ribonucleic acid (dsRNA) agent that inhibits expression of hydroxyacid oxidase 1 (glycolate oxidase) (HAO1) in a cell, such as a liver cell, comprising a sense strand and an antisense strand, wherein the sense strand comprises at least 15 contiguous nucleotides differing by no more than 3 nucleotides from the nucleotide sequence of SEQ ID NO:21, and the antisense strand comprises at least 15 contiguous nucleotides differing by no more than 3 nucleotides from the nucleotide sequence of SEQ ID NO:22; and a pharmaceutically acceptable carrier.

[0737] In another embodiment, provided herein are pharmaceutical compositions a first double stranded ribonucleic acid (dsRNA) agent that inhibits expression of lactic acid dehydrogenase A (LDHA) in a cell, such as a liver cell, comprising a sense strand and an antisense strand, the antisense strand comprising a region of complementarity which comprises at least 15 contiguous nucleotides differing by no more than 3 nucleotides from any one of the antisense sequences listed in any one of Tables 2-5; and a second double stranded ribonucleic acid (dsRNA) agent that inhibits expression of hydroxyacid oxidase 1 (glycolate oxidase) (HAO1) in a cell, such as a liver cell, comprising a sense strand and an antisense strand, the antisense strand comprising a region of complementarity which comprises at least 15 contiguous nucleotides differing by no more than 3 nucleotides from any one of the antisense sequences listed in any one of Tables 7-14.

[0738] In yet another embodiment, the present invention provides pharmaceutical compositions and formulations comprising a dual targeting RNAi agent of the invention, and a pharmaceutically acceptable carrier.

[0739] The pharmaceutical compositions containing the iRNA of the invention are useful for treating a disease or disorder associated with the expression or activity of an LDHA gene or an LDHA gene and an HAO1 gene, e.g., an oxalate pathway-associated disease, disorder, or condition.

[0740] Such pharmaceutical compositions are formulated based on the mode of delivery. One example is compositions that are formulated for systemic administration via parenteral delivery, e.g., by intravenous (IV) or for subcutaneous delivery. Another example is compositions that are formulated for direct delivery into the liver, e.g., by infusion into the liver, such as by continuous pump infusion.

[0741] The pharmaceutical compositions of the invention may be administered in dosages sufficient to inhibit expression of an LDHA gene or an LDHA gene and an HAO1 gene. In general, a suitable dose of an iRNA of the invention will be in the range of about 0.001 to about 200.0 milligrams per kilogram body weight of the recipient per day, generally in the range of about 1 to 50 mg per kilogram body weight per day. Typically, a suitable dose of an iRNA of the invention will be in the range of about 0.1 mg/kg to about 5.0 mg/kg, preferably about 0.3 mg/kg and about 3.0 mg/kg.

[0742] In the methods of the invention which include a first dsRNA agent targeting LDHA and a second dsRNA agent targeting HAO1, the first agent and the second agent may be present in the same pharmaceutical formulation or separate pharmaceutical formulations.

[0743] A repeat-dose regimine may include administration of a therapeutic amount of iRNA on a regular basis, such as every other day to once a year. In certain embodiments, the iRNA is administered about once per month to about once per quarter (i.e., about once every three months).

[0744] After an initial treatment regimen, the treatments can be administered on a less frequent basis.

[0745] The skilled artisan will appreciate that certain factors can influence the dosage and timing required to effectively treat a subject, including but not limited to the severity of the disease or disorder, previous treatments, the general health and/or age of the subject, and other diseases present. Moreover, treatment of a subject with a therapeutically effective amount of a composition can include a single treatment or a series of treatments. Estimates of effective dosages and in vivo half-lives for the individual iRNAs encompassed by the invention can be made using conventional methodologies or on the basis of in vivo testing using an appropriate animal model, as described elsewhere herein.

[0746] Advances in mouse genetics have generated a number of mouse models for the study of various human diseases, such as an oxalate pathway-associated disease, disorder, or condition that would benefit from reduction in the expression of LDHA and/or LDHA and HAO1. Such models can be used for in vivo testing of iRNA, as well as for determining a therapeutically effective dose. Suitable mouse models are known in the art and include, for example, mouse models which may include mutations or deletions in the AGXT or GRHPR genes (see, e.g., Salido E C, et al. (2006) PNAS 103 (48): 18249-18254 and Knight J, et al. (2012) Am. J. Physiol. Renal Physiol. 302: F688-F693); a PH3 mouse model (see, e.g., Li, et al. (2015) biochem Biophys Acta 1852 (12): 2700); and the ethylene glycol urolithiasis mouse model.

[0747] The pharmaceutical compositions of the present invention can be administered in a number of ways depending upon whether local or systemic treatment is desired and upon the area to be treated. Administration can be topical (e.g., by a transdermal patch), pulmonary, e.g., by inhalation or insufflation of powders or aerosols, including by nebulizer; intratracheal, intranasal, epidermal and transdermal, oral or parenteral. Parenteral administration includes intravenous, intraarterial, subcutaneous, intraperitoneal or intramuscular injection or infusion; subdermal, e.g., via an implanted device; or intracranial, e.g., by intraparenchymal, intrathecal or intraventricular, administration.

[0748] The iRNA can be delivered in a manner to target a particular cell or tissue, such as the liver (e.g., the hepatocytes of the liver).

[0749] Pharmaceutical compositions and formulations for topical administration can include transdermal patches, ointments, lotions, creams, gels, drops, suppositories, sprays, liquids and powders. Conventional pharmaceutical carriers, aqueous, powder or oily bases, thickeners and the like can be necessary or desirable. Coated condoms, gloves and the like can also be useful. Suitable topical formulations include those in which the iRNAs featured in the invention are in admixture with a topical delivery agent such as lipids, liposomes, fatty acids, fatty acid esters, steroids, chelating agents and surfactants. Suitable lipids and liposomes include neutral (e.g., dioleoylphosphatidyl DOPE ethanolamine, dimyristoylphosphatidyl choline DMPC, distearolyphosphatidyl choline) negative (e.g., dimyristoylphosphatidyl glycerol DMPG) and cationic (e.g., dioleoyltetramethylaminopropyl DOTAP and dioleoylphosphatidyl ethanolamine DOTMA). iRNAs featured in the invention can be encapsulated within liposomes or can form complexes thereto, in particular to cationic liposomes. Alternatively, iRNAs can be complexed to lipids, in particular to cationic lipids. Suitable fatty acids and esters include but are not limited to arachidonic acid, oleic acid, eicosanoic acid, lauric acid, caprylic acid, capric acid, myristic acid, palmitic acid, stearic acid, linoleic acid, linolenic acid, dicaprate, tricaprate, monoolein, dilaurin, glyceryl 1-monocaprate, 1-dodecylazacycloheptan-2-one, an acylcarnitine, an acylcholine, or a C1-20 alkyl ester (e.g., isopropylmyristate IPM), monoglyceride, diglyceride or pharmaceutically acceptable salt thereof. Topical formulations are described in detail in U.S. Pat. No. 6,747,014, which is incorporated herein by reference.

[0750] Compositions and formulations for oral administration include powders or granules, microparticulates, nanoparticulates, suspensions or solutions in water or non-aqueous media, capsules, gel capsules, sachets, tablets or minitablets. Thickeners, flavoring agents, diluents, emulsifiers, dispersing aids or binders can be desirable. In some embodiments, oral formulations are those in which dsRNAs featured in the invention are administered in conjunction with one or more penetration enhancer surfactants and chelators. Suitable surfactants include fatty acids and/or esters or salts thereof, bile acids and/or salts thereof. Suitable bile acids/salts include chenodeoxycholic acid (CDCA) and ursodeoxychenodeoxycholic acid (UDCA), cholic acid, dehydrocholic acid, deoxycholic acid, glucholic acid, glycholic acid, glycodeoxycholic acid, taurocholic acid, taurodeoxycholic acid, sodium tauro-24,25-dihydro-fusidate and sodium glycodihydrofusidate. Suitable fatty acids include arachidonic acid, undecanoic acid, oleic acid, lauric acid, caprylic acid, capric acid, myristic acid, palmitic acid, stearic acid, linoleic acid, linolenic acid, dicaprate, tricaprate, monoolein, dilaurin, glyceryl 1-monocaprate, 1-dodecylazacycloheptan-2-one, an acylcarnitine, an acylcholine, or a monoglyceride, a diglyceride or a pharmaceutically acceptable salt thereof (e.g., sodium). In some embodiments, combinations of penetration enhancers are used, for example, fatty acids/salts in combination with bile acids/salts. One exemplary combination is the sodium salt of lauric acid, capric acid and UDCA. Further penetration enhancers include polyoxyethylene-9-lauryl ether, polyoxyethylene-20-cetyl ether. DsRNAs featured in the invention can be delivered orally, in granular form including sprayed dried particles, or complexed to form micro or nanoparticles. DsRNA complexing agents include poly-amino acids; polyimines; polyacrylates; polyalkylacrylates, polyoxethanes, polyalkylcyanoacrylates; cationized gelatins, albumins, starches, acrylates, polyethyleneglycols (PEG) and starches; polyalkylcyanoacrylates; DEAE-derivatized polyimines, pollulans, celluloses and starches. Suitable complexing agents include chitosan, N-trimethylchitosan, poly-L-lysine, polyhistidine, polyornithine, polyspermines, protamine, polyvinylpyridine, polythiodiethylaminomethylethylene P(TDAE), polyaminostyrene (e.g., p-amino), poly(methylcyanoacrylate), poly(ethylcyanoacrylate), poly(butylcyanoacrylate), poly(isobutylcyanoacrylate), poly(isohexylcynaoacrylate), DEAE-methacrylate, DEAE-hexylacrylate, DEAE-acrylamide, DEAE-albumin and DEAE-dextran, polymethylacrylate, polyhexylacrylate, poly(D,L-lactic acid), poly(DL-lactic-co-glycolic acid (PLGA), alginate, and polyethyleneglycol (PEG). Oral formulations for dsRNAs and their preparation are described in detail in U.S. Pat. No. 6,887,906, US Publn. No. 20030027780, and U.S. Pat. No. 6,747,014, each of which is incorporated herein by reference.

[0751] Compositions and formulations for parenteral, intraparenchymal (into the brain), intrathecal, intraventricular or intrahepatic administration can include sterile aqueous solutions which can also contain buffers, diluents and other suitable additives such as, but not limited to, penetration enhancers, carrier compounds and other pharmaceutically acceptable carriers or excipients.

[0752] Pharmaceutical compositions of the present invention include, but are not limited to, solutions, emulsions, and liposome-containing formulations. These compositions can be generated from a variety of components that include, but are not limited to, preformed liquids, self-emulsifying solids and self-emulsifying semisolids. Particularly preferred are formulations that target the liver when treating hepatic disorders such as hepatic carcinoma.

[0753] The pharmaceutical formulations of the present invention, which can conveniently be presented in unit dosage form, can be prepared according to conventional techniques well known in the pharmaceutical industry. Such techniques include the step of bringing into association the active ingredients with the pharmaceutical carrier(s) or excipient(s). In general, the formulations are prepared by uniformly and intimately bringing into association the active ingredients with liquid carriers or finely divided solid carriers or both, and then, if necessary, shaping the product.

[0754] The compositions of the present invention can be formulated into any of many possible dosage forms such as, but not limited to, tablets, capsules, gel capsules, liquid syrups, soft gels, suppositories, and enemas. The compositions of the present invention can also be formulated as suspensions in aqueous, non-aqueous or mixed media. Aqueous suspensions can further contain substances which increase the viscosity of the suspension including, for example, sodium carboxymethylcellulose, sorbitol and/or dextran. The suspension can also contain stabilizers.

### A. Additional Formulations

i. Emulsions

[0755] The compositions of the present invention can be prepared and formulated as emulsions. Emulsions are typically heterogeneous systems of one liquid dispersed in another in the form of droplets usually exceeding 0.1 μm in diameter (see e.g., Ansel's Pharmaceutical Dosage Forms and Drug Delivery Systems, Allen, L V., Popovich N G., and Ansel H C., 2004, Lippincott Williams & Wilkins (8th ed.), New York, NY; Idson, in Pharmaceutical Dosage Forms, Lieberman, Rieger and Banker (Eds.), 1988, Marcel Dekker, Inc., New York, N.Y., volume 1, p. 199; Rosoff, in Pharmaceutical Dosage Forms, Lieberman, Rieger and Banker (Eds.), 1988, Marcel Dekker, Inc., New York, N.Y., Volume 1, p. 245; Block in Pharmaceutical Dosage Forms, Lieberman, Rieger and Banker (Eds.), 1988, Marcel Dekker, Inc., New York, N.Y., volume 2, p. 335; Higuchi et al., in Remington's Pharmaceutical Sciences, Mack Publishing Co., Easton, Pa., 1985, p. 301). Emulsions are often biphasic systems comprising two immiscible liquid phases intimately mixed and dispersed with each other. In general, emulsions can be of either the water-in-oil (w/o) or the oil-in-water (o/w) variety. When an aqueous phase is finely divided into and dispersed as minute droplets into a bulk oily phase, the resulting composition is called a water-in-oil (w/o) emulsion. Alternatively, when an oily phase is finely divided into and dispersed as minute droplets into a bulk aqueous phase, the resulting composition is called an oil-in-water (o/w) emulsion. Emulsions can contain additional components in addition to the dispersed phases, and the active drug which can be present as a solution in either aqueous phase, oily phase or itself as a separate phase. Pharmaceutical excipients such as emulsifiers, stabilizers, dyes, and anti-oxidants can also be present in emulsions as needed. Pharmaceutical emulsions can also be multiple emulsions that are comprised of more than two phases such as, for example, in the case of oil-in-water-in-oil (o/w/o) and water-in-oil-in-water (w/o/w) emulsions. Such complex formulations often provide certain advantages that simple binary emulsions do not. Multiple emulsions in which individual oil droplets of an o/w emulsion enclose small water droplets constitute a w/o/w emulsion. Likewise a system of oil droplets enclosed in globules of water stabilized in an oily continuous phase provides an o/w/o emulsion.

[0756] Emulsions are characterized by little or no thermodynamic stability. Often, the dispersed or discontinuous phase of the emulsion is well dispersed into the external or continuous phase and maintained in this form through the means of emulsifiers or the viscosity of the formulation. Either of the phases of the emulsion can be a semisolid or a solid, as is the case of emulsion-style ointment bases and creams. Other means of stabilizing emulsions entail the use of emulsifiers that can be incorporated into either phase of the emulsion. Emulsifiers can broadly be classified into four categories: synthetic surfactants, naturally occurring emulsifiers, absorption bases, and finely dispersed solids (see e.g., Ansel's Pharmaceutical Dosage Forms and Drug Delivery Systems, Allen, L V., Popovich N G., and Ansel H C., 2004, Lippincott Williams & Wilkins (8th ed.), New York, NY; Idson, in Pharmaceutical Dosage Forms, Lieberman, Rieger and Banker (Eds.), 1988, Marcel Dekker, Inc., New York, N.Y., volume 1, p. 199).

[0757] Synthetic surfactants, also known as surface active agents, have found wide applicability in the formulation of emulsions and have been reviewed in the literature (see e.g., Ansel's Pharmaceutical Dosage Forms and Drug Delivery Systems, Allen, L V., Popovich N G., and Ansel H C., 2004, Lippincott Williams & Wilkins (8th ed.), New York, NY; Rieger, in Pharmaceutical Dosage Forms, Lieberman, Rieger and Banker (Eds.), 1988, Marcel Dekker, Inc., New York, N.Y., volume 1, p. 285; Idson, in Pharmaceutical Dosage Forms, Lieberman, Rieger and Banker (Eds.), Marcel Dekker, Inc., New York, N.Y., 1988, volume 1, p. 199). Surfactants are typically amphiphilic and comprise a hydrophilic and a hydrophobic portion. The ratio of the hydrophilic to the hydrophobic nature of the surfactant has been termed the hydrophile/lipophile balance (HLB) and is a valuable tool in categorizing and selecting surfactants in the preparation of formulations. Surfactants can be classified into different classes based on the nature of the hydrophilic group: nonionic, anionic, cationic and amphoteric (see e.g., Ansel's Pharmaceutical Dosage Forms and Drug Delivery Systems, Allen, L V., Popovich N G., and Ansel H C., 2004, Lippincott Williams & Wilkins (8th ed.), New York, NY Rieger, in Pharmaceutical Dosage Forms, Lieberman, Rieger and Banker (Eds.), 1988, Marcel Dekker, Inc., New York, N.Y., volume 1, p. 285).

[0758] Naturally occurring emulsifiers used in emulsion formulations include lanolin, beeswax, phosphatides, lecithin and acacia. Absorption bases possess hydrophilic properties such that they can soak up water to form w/o emulsions yet retain their semisolid consistencies, such as anhydrous lanolin and hydrophilic petrolatum. Finely divided solids have also been used as good emulsifiers especially in combination with surfactants and in viscous preparations. These include polar inorganic solids, such as heavy metal hydroxides, nonswelling clays such as bentonite, attapulgite, hectorite, kaolin, montmorillonite, colloidal aluminum silicate and colloidal magnesium aluminum silicate, pigments and nonpolar solids such as carbon or glyceryl tristearate.

[0759] A large variety of non-emulsifying materials are also included in emulsion formulations and contribute to the properties of emulsions. These include fats, oils, waxes, fatty acids, fatty alcohols, fatty esters, humectants, hydrophilic colloids, preservatives and antioxidants (Block, in Pharmaceutical Dosage Forms, Lieberman, Rieger and Banker (Eds.), 1988, Marcel Dekker, Inc., New York, N.Y., volume 1, p. 335; Idson, in Pharmaceutical Dosage Forms, Lieberman, Rieger and Banker (Eds.), 1988, Marcel Dekker, Inc., New York, N.Y., volume 1, p. 199).

[0760] Hydrophilic colloids or hydrocolloids include naturally occurring gums and synthetic polymers such as polysaccharides (for example, acacia, agar, alginic acid, carrageenan, guar gum, karaya gum, and tragacanth), cellulose derivatives (for example, carboxymethylcellulose and carboxypropylcellulose), and synthetic polymers (for example, carbomers, cellulose ethers, and carboxyvinyl polymers). These disperse or swell in water to form colloidal solutions that stabilize emulsions by forming strong interfacial films around the dispersed-phase droplets and by increasing the viscosity of the external phase.

[0761] Since emulsions often contain a number of ingredients such as carbohydrates, proteins, sterols and phosphatides that can readily support the growth of microbes, these formulations often incorporate preservatives. Commonly used preservatives included in emulsion formulations include methyl paraben, propyl paraben, quaternary ammonium salts, benzalkonium chloride, esters of p-hydroxybenzoic acid, and boric acid. Antioxidants are also commonly added to emulsion formulations to prevent deterioration of the formulation. Antioxidants used can be free radical scavengers such as tocopherols, alkyl gallates, butylated hydroxyanisole, butylated hydroxytoluene, or reducing agents such as ascorbic acid and sodium metabisulfite, and antioxidant synergists such as citric acid, tartaric acid, and lecithin.

[0762] The application of emulsion formulations via dermatological, oral and parenteral routes and methods for their manufacture have been reviewed in the literature (see e.g., Ansel's Pharmaceutical Dosage Forms and Drug Delivery Systems, Allen, L V., Popovich N G., and Ansel H C., 2004, Lippincott Williams & Wilkins (8th ed.), New York, NY; Idson, in Pharmaceutical Dosage Forms, Lieberman, Rieger and Banker (Eds.), 1988, Marcel Dekker, Inc., New York, N.Y., volume 1, p. 199). Emulsion formulations for oral delivery have been very widely used because of ease of formulation, as well as efficacy from an absorption and bioavailability standpoint (see e.g., Ansel's Pharmaceutical Dosage Forms and Drug Delivery Systems, Allen, L V., Popovich N G., and Ansel H C., 2004, Lippincott Williams & Wilkins (8th ed.), New York, NY; Rosoff, in Pharmaceutical Dosage Forms, Lieberman, Rieger and Banker (Eds.), 1988, Marcel Dekker, Inc., New York, N.Y., volume 1, p. 245; Idson, in Pharmaceutical Dosage Forms, Lieberman, Rieger and Banker (Eds.), 1988, Marcel Dekker, Inc., New York, N.Y., volume 1, p. 199). Mineral-oil base laxatives, oil-soluble vitamins and high fat nutritive preparations are among the materials that have commonly been administered orally as o/w emulsions.

ii. Microemulsions

[0763] In one embodiment of the present invention, the compositions of iRNAs and nucleic acids are formulated as microemulsions. A microemulsion can be defined as a system of water, oil and amphiphile which is a single optically isotropic and thermodynamically stable liquid solution (see e.g., Ansel's Pharmaceutical Dosage Forms and Drug Delivery Systems, Allen, L V., Popovich N G., and Ansel H C., 2004, Lippincott Williams & Wilkins (8th ed.), New York, NY; Rosoff, in Pharmaceutical Dosage Forms, Lieberman, Rieger and Banker (Eds.), 1988, Marcel Dekker, Inc., New York, N.Y., volume 1, p. 245). Typically microemulsions are systems that are prepared by first dispersing an oil in an aqueous surfactant solution and then adding a sufficient amount of a fourth component, generally an intermediate chain-length alcohol to form a transparent system. Therefore, microemulsions have also been described as thermodynamically stable, isotropically clear dispersions of two immiscible liquids that are stabilized by interfacial films of surface-active molecules (Leung and Shah, in: Controlled Release of Drugs: Polymers and Aggregate Systems, Rosoff, M., Ed., 1989, VCH Publishers, New York, pages 185-215). Microemulsions commonly are prepared via a combination of three to five components that include oil, water, surfactant, cosurfactant and electrolyte. Whether the microemulsion is of the water-in-oil (w/o) or an oil-in-water (o/w) type is dependent on the properties of the oil and surfactant used and on the structure and geometric packing of the polar heads and hydrocarbon tails of the surfactant molecules (Schott, in Remington's Pharmaceutical Sciences, Mack Publishing Co., Easton, Pa., 1985, p. 271).

[0764] The phenomenological approach utilizing phase diagrams has been extensively studied and has yielded a comprehensive knowledge, to one skilled in the art, of how to formulate microemulsions (see e.g., Ansel's Pharmaceutical Dosage Forms and Drug Delivery Systems, Allen, L V., Popovich N G., and Ansel H C., 2004, Lippincott Williams & Wilkins (8th ed.), New York, NY; Rosoff, in Pharmaceutical Dosage Forms, Lieberman, Rieger and Banker (Eds.), 1988, Marcel Dekker, Inc., New York, N.Y., volume 1, p. 245; Block, in Pharmaceutical Dosage Forms, Lieberman, Rieger and Banker (Eds.), 1988, Marcel Dekker, Inc., New York, N.Y., volume 1, p. 335). Compared to conventional emulsions, microemulsions offer the advantage of solubilizing water-insoluble drugs in a formulation of thermodynamically stable droplets that are formed spontaneously.

[0765] Surfactants used in the preparation of microemulsions include, but are not limited to, ionic surfactants, non-ionic surfactants, Brij 96, polyoxyethylene oleyl ethers, polyglycerol fatty acid esters, tetraglycerol monolaurate (ML310), tetraglycerol monooleate (MO310), hexaglycerol monooleate (PO310), hexaglycerol pentaoleate (PO500), decaglycerol monocaprate (MCA750), decaglycerol monooleate (MO750), decaglycerol sequioleate (SO750), decaglycerol decaoleate (DAO750), alone or in combination with cosurfactants. The cosurfactant, usually a short-chain alcohol such as ethanol, 1-propanol, and 1-butanol, serves to increase the interfacial fluidity by penetrating into the surfactant film and consequently creating a disordered film because of the void space generated among surfactant molecules. Microemulsions can, however, be prepared without the use of cosurfactants and alcohol-free self-emulsifying microemulsion systems are known in the art. The aqueous phase can typically be, but is not limited to, water, an aqueous solution of the drug, glycerol, PEG300, PEG400, polyglycerols, propylene glycols, and derivatives of ethylene glycol. The oil phase can include, but is not limited to, materials such as Captex 300, Captex 355, Capmul MCM, fatty acid esters, medium chain (C8-C12) mono, di, and tri-glycerides, polyoxyethylated glyceryl fatty acid esters, fatty alcohols, polyglycolized glycerides, saturated polyglycolized C8-C10 glycerides, vegetable oils and silicone oil.

[0766] Microemulsions are particularly of interest from the standpoint of drug solubilization and the enhanced absorption of drugs. Lipid based microemulsions (both o/w and w/o) have been proposed to enhance the oral bioavailability of drugs, including peptides (see e.g., U.S. Pat. Nos. 6,191,105; 7,063,860; 7,070,802; 7,157,099; Constantinides et al., Pharmaceutical Research, 1994, 11, 1385-1390; Ritschel, Meth. Find. Exp. Clin. Pharmacol., 1993, 13, 205). Microemulsions afford advantages of improved drug solubilization, protection of drug from enzymatic hydrolysis, possible enhancement of drug absorption due to surfactant-induced alterations in membrane fluidity and permeability, ease of preparation, ease of oral administration over solid dosage forms, improved clinical potency, and decreased toxicity (see e.g., U.S. Pat. Nos. 6,191,105; 7,063,860; 7,070,802; 7,157,099; Constantinides et al., Pharmaceutical Research, 1994, 11, 1385; Ho et al., J. Pharm. Sci., 1996, 85, 138-143). Often microemulsions can form spontaneously when their components are brought together at ambient temperature. This can be particularly advantageous when formulating thermolabile drugs, peptides or iRNAs. Microemulsions have also been effective in the transdermal delivery of active components in both cosmetic and pharmaceutical applications. It is expected that the microemulsion compositions and formulations of the present invention will facilitate the increased systemic absorption of iRNAs and nucleic acids from the gastrointestinal tract, as well as improve the local cellular uptake of iRNAs and nucleic acids.

[0767] Microemulsions of the present invention can also contain additional components and additives such as sorbitan monostearate (Grill 3), Labrasol, and penetration enhancers to improve the properties of the formulation and to enhance the absorption of the iRNAs and nucleic acids of the present invention. Penetration enhancers used in the microemulsions of the present invention can be classified as belonging to one of five broad categories—surfactants, fatty acids, bile salts, chelating agents, and non-chelating non-surfactants (Lee et al., Critical Reviews in Therapeutic Drug Carrier Systems, 1991, p. 92). Each of these classes has been discussed above.

iii. Microparticles

[0768] an RNAi agent of the invention may be incorporated into a particle, e.g., a microparticle. Microparticles can be produced by spray-drying, but may also be produced by other methods including lyophilization, evaporation, fluid bed drying, vacuum drying, or a combination of these techniques.

iv. Penetration Enhancers

[0769] In one embodiment, the present invention employs various penetration enhancers to effect the efficient delivery of nucleic acids, particularly iRNAs, to the skin of animals. Most drugs are present in solution in both ionized and nonionized forms. However, usually only lipid soluble or lipophilic drugs readily cross cell membranes. It has been discovered that even non-lipophilic drugs can cross cell membranes if the membrane to be crossed is treated with a penetration enhancer. In addition to aiding the diffusion of non-lipophilic drugs across cell membranes, penetration enhancers also enhance the permeability of lipophilic drugs.

[0770] Penetration enhancers can be classified as belonging to one of five broad categories, i.e., surfactants, fatty acids, bile salts, chelating agents, and non-chelating non-surfactants (see e.g., Malmsten, M. Surfactants and polymers in drug delivery, Informa Health Care, New York, NY, 2002; Lee et al., Critical Reviews in Therapeutic Drug Carrier Systems, 1991, p. 92). Each of the above mentioned classes of penetration enhancers are described below in greater detail.

[0771] Surfactants (or “surface-active agents”) are chemical entities which, when dissolved in an aqueous solution, reduce the surface tension of the solution or the interfacial tension between the aqueous solution and another liquid, with the result that absorption of iRNAs through the mucosa is enhanced. In addition to bile salts and fatty acids, these penetration enhancers include, for example, sodium lauryl sulfate, polyoxyethylene-9-lauryl ether and polyoxyethylene-20-cetyl ether) (see e.g., Malmsten, M. Surfactants and polymers in drug delivery, Informa Health Care, New York, NY, 2002; Lee et al., Critical Reviews in Therapeutic Drug Carrier Systems, 1991, p. 92); and perfluorochemical emulsions, such as FC-43. Takahashi et al., J. Pharm. Pharmacol., 1988, 40, 252).

[0772] Various fatty acids and their derivatives which act as penetration enhancers include, for example, oleic acid, lauric acid, capric acid (n-decanoic acid), myristic acid, palmitic acid, stearic acid, linoleic acid, linolenic acid, dicaprate, tricaprate, monoolein (1-monooleoyl-rac-glycerol), dilaurin, caprylic acid, arachidonic acid, glycerol 1-monocaprate, 1-dodecylazacycloheptan-2-one, acylcarnitines, acylcholines, C1-20 alkyl esters thereof (e.g., methyl, isopropyl and t-butyl), and mono- and di-glycerides thereof (i.e., oleate, laurate, caprate, myristate, palmitate, stearate, linoleate, etc.) (see e.g., Touitou, E., et al. Enhancement in Drug Delivery, CRC Press, Danvers, MA, 2006; Lee et al., Critical Reviews in Therapeutic Drug Carrier Systems, 1991, p. 92; Muranishi, Critical Reviews in Therapeutic Drug Carrier Systems, 1990, 7, 1-33; El Hariri et al., J. Pharm. Pharmacol., 1992, 44, 651-654).

[0773] The physiological role of bile includes the facilitation of dispersion and absorption of lipids and fat-soluble vitamins (see e.g., Malmsten, M. Surfactants and polymers in drug delivery, Informa Health Care, New York, NY, 2002; Brunton, Chapter 38 in: Goodman & Gilman's The Pharmacological Basis of Therapeutics, 9th Ed., Hardman et al. Eds., McGraw-Hill, New York, 1996, pp. 934-935). Various natural bile salts, and their synthetic derivatives, act as penetration enhancers. Thus the term “bile salts” includes any of the naturally occurring components of bile as well as any of their synthetic derivatives. Suitable bile salts include, for example, cholic acid (or its pharmaceutically acceptable sodium salt, sodium cholate), dehydrocholic acid (sodium dehydrocholate), deoxycholic acid (sodium deoxycholate), glucholic acid (sodium glucholate), glycholic acid (sodium glycocholate), glycodeoxycholic acid (sodium glycodeoxycholate), taurocholic acid (sodium taurocholate), taurodeoxycholic acid (sodium taurodeoxycholate), chenodeoxycholic acid (sodium chenodeoxycholate), ursodeoxycholic acid (UDCA), sodium tauro-24,25-dihydro-fusidate (STDHF), sodium glycodihydrofusidate and polyoxyethylene-9-lauryl ether (POE) (see e.g., Malmsten, M. Surfactants and polymers in drug delivery, Informa Health Care, New York, NY, 2002; Lee et al., Critical Reviews in Therapeutic Drug Carrier Systems, 1991, page 92; Swinyard, Chapter 39 In: Remington's Pharmaceutical Sciences, 18th Ed., Gennaro, ed., Mack Publishing Co., Easton, Pa., 1990, pages 782-783; Muranishi, Critical Reviews in Therapeutic Drug Carrier Systems, 1990, 7, 1-33; Yamamoto et al., J. Pharm. Exp. Ther., 1992, 263, 25; Yamashita et al., J. Pharm. Sci., 1990, 79, 579-583).

[0774] Chelating agents, as used in connection with the present invention, can be defined as compounds that remove metallic ions from solution by forming complexes therewith, with the result that absorption of iRNAs through the mucosa is enhanced. With regards to their use as penetration enhancers in the present invention, chelating agents have the added advantage of also serving as DNase inhibitors, as most characterized DNA nucleases require a divalent metal ion for catalysis and are thus inhibited by chelating agents (Jarrett, J. Chromatogr., 1993, 618, 315-339). Suitable chelating agents include but are not limited to disodium ethylenediaminetetraacetate (EDTA), citric acid, salicylates (e.g., sodium salicylate, 5-methoxysalicylate and homovanilate), N-acyl derivatives of collagen, laureth-9 and N-amino acyl derivatives of beta-diketones (enamines) (see e.g., Katdare, A. et al., Excipient development for pharmaceutical, biotechnology, and drug delivery, CRC Press, Danvers, MA, 2006; Lee et al., Critical Reviews in Therapeutic Drug Carrier Systems, 1991, page 92; Muranishi, Critical Reviews in Therapeutic Drug Carrier Systems, 1990, 7, 1-33; Buur et al., J. Control Rel., 1990, 14, 43-51).

[0775] As used herein, non-chelating non-surfactant penetration enhancing compounds can be defined as compounds that demonstrate insignificant activity as chelating agents or as surfactants but that nonetheless enhance absorption of iRNAs through the alimentary mucosa (see e.g., Muranishi, Critical Reviews in Therapeutic Drug Carrier Systems, 1990, 7, 1-33). This class of penetration enhancers includes, for example, unsaturated cyclic ureas, 1-alkyl- and 1-alkenylazacyclo-alkanone derivatives (Lee et al., Critical Reviews in Therapeutic Drug Carrier Systems, 1991, page 92); and non-steroidal anti-inflammatory agents such as diclofenac sodium, indomethacin and phenylbutazone (Yamashita et al., J. Pharm. Pharmacol., 1987, 39, 621-626). Agents that enhance uptake of iRNAs at the cellular level can also be added to the pharmaceutical and other compositions of the present invention. For example, cationic lipids, such as lipofectin (Junichi et al, U.S. Pat. No. 5,705,188), cationic glycerol derivatives, and polycationic molecules, such as polylysine (Lollo et al., PCT Application WO 97/30731), are also known to enhance the cellular uptake of dsRNAs. Examples of commercially available transfection reagents include, for example Lipofectamine™ (Invitrogen; Carlsbad, CA), Lipofectamine 2000™ (Invitrogen; Carlsbad, CA), 293Fectin™ (Invitrogen; Carlsbad, CA), Cellfectin™ (Invitrogen; Carlsbad, CA), DMRIE-C™ (Invitrogen; Carlsbad, CA), FreeStyle™ MAX (Invitrogen; Carlsbad, CA), Lipofectamine™ 2000 CD (Invitrogen; Carlsbad, CA),

[0776] Lipofectamine™ (Invitrogen; Carlsbad, CA), RNAiMAX (Invitrogen; Carlsbad, CA), Oligofectamine™ (Invitrogen; Carlsbad, CA), Optifect™ (Invitrogen; Carlsbad, CA), X-tremeGENE Q2 Transfection Reagent (Roche; Grenzacherstrasse, Switzerland), DOTAP Liposomal Transfection Reagent (Grenzacherstrasse, Switzerland), DOSPER Liposomal Transfection Reagent (Grenzacherstrasse, Switzerland), or Fugene (Grenzacherstrasse, Switzerland), Transfectam® Reagent (Promega; Madison, WI), TransFast™ Transfection Reagent (Promega; Madison, WI), Tfx™-20 Reagent (Promega; Madison, WI), Tfx™-50 Reagent (Promega; Madison, WI), DreamFect™ (OZ Biosciences; Marseille, France), EcoTransfect (OZ Biosciences; Marseille, France), TransPassª D1 Transfection Reagent (New England Biolabs; Ipswich, MA, USA), LyoVec™/LipoGen™ (Invitrogen; San Diego, CA, USA), PerFectin Transfection Reagent (Genlantis; San Diego, CA, USA), NeuroPORTER Transfection Reagent (Genlantis; San Diego, CA, USA), GenePORTER Transfection reagent (Genlantis; San Diego, CA, USA), GenePORTER 2 Transfection reagent (Genlantis; San Diego, CA, USA), Cytofectin Transfection Reagent (Genlantis; San Diego, CA, USA), BaculoPORTER Transfection Reagent (Genlantis; San Diego, CA, USA), TroganPORTER™ transfection Reagent (Genlantis; San Diego, CA, USA), RiboFect (Bioline; Taunton, MA, USA), PlasFect (Bioline; Taunton, MA, USA), UniFECTOR (B-Bridge International; Mountain View, CA, USA), SureFECTOR (B-Bridge International; Mountain View, CA, USA), or HiFect™ (B-Bridge International, Mountain View, CA, USA), among others.

[0777] Other agents can be utilized to enhance the penetration of the administered nucleic acids, including glycols such as ethylene glycol and propylene glycol, pyrrols such as 2-pyrrol, azones, and terpenes such as limonene and menthone.

v. Carriers

[0778] Certain compositions of the present invention also incorporate carrier compounds in the formulation. As used herein, “carrier compound” or “carrier” can refer to a nucleic acid, or analog thereof, which is inert (i.e., does not possess biological activity per se) but is recognized as a nucleic acid by in vivo processes that reduce the bioavailability of a nucleic acid having biological activity by, for example, degrading the biologically active nucleic acid or promoting its removal from circulation. The coadministration of a nucleic acid and a carrier compound, typically with an excess of the latter substance, can result in a substantial reduction of the amount of nucleic acid recovered in the liver, kidney or other extracirculatory reservoirs, presumably due to competition between the carrier compound and the nucleic acid for a common receptor. For example, the recovery of a partially phosphorothioate dsRNA in hepatic tissue can be reduced when it is coadministered with polyinosinic acid, dextran sulfate, polycytidic acid or 4-acetamido-4′isothiocyano-stilbene-2,2′-disulfonic acid (Miyao et al., DsRNA Res. Dev., 1995, 5, 115-121; Takakura et al., DsRNA & Nucl. Acid Drug Dev., 1996, 6, 177-183.

vi. Excipients

[0779] In contrast to a carrier compound, a “pharmaceutical carrier” or “excipient” is a pharmaceutically acceptable solvent, suspending agent or any other pharmacologically inert vehicle for delivering one or more nucleic acids to an animal. The excipient can be liquid or solid and is selected, with the planned manner of administration in mind, so as to provide for the desired bulk, consistency, etc., when combined with a nucleic acid and the other components of a given pharmaceutical composition. Typical pharmaceutical carriers include, but are not limited to, binding agents (e.g., pregelatinized maize starch, polyvinylpyrrolidone or hydroxypropyl methylcellulose, etc.); fillers (e.g., lactose and other sugars, microcrystalline cellulose, pectin, gelatin, calcium sulfate, ethyl cellulose, polyacrylates or calcium hydrogen phosphate, etc.); lubricants (e.g., magnesium stearate, talc, silica, colloidal silicon dioxide, stearic acid, metallic stearates, hydrogenated vegetable oils, corn starch, polyethylene glycols, sodium benzoate, sodium acetate, etc.); disintegrants (e.g., starch, sodium starch glycolate, etc.); and wetting agents (e.g., sodium lauryl sulphate, etc).

[0780] Pharmaceutically acceptable organic or inorganic excipients suitable for non-parenteral administration which do not deleteriously react with nucleic acids can also be used to formulate the compositions of the present invention. Suitable pharmaceutically acceptable carriers include, but are not limited to, water, salt solutions, alcohols, polyethylene glycols, gelatin, lactose, amylose, magnesium stearate, talc, silicic acid, viscous paraffin, hydroxymethylcellulose, polyvinylpyrrolidone and the like.

[0781] Formulations for topical administration of nucleic acids can include sterile and non-sterile aqueous solutions, non-aqueous solutions in common solvents such as alcohols, or solutions of the nucleic acids in liquid or solid oil bases. The solutions can also contain buffers, diluents and other suitable additives. Pharmaceutically acceptable organic or inorganic excipients suitable for non-parenteral administration which do not deleteriously react with nucleic acids can be used.

[0782] Suitable pharmaceutically acceptable excipients include, but are not limited to, water, salt solutions, alcohol, polyethylene glycols, gelatin, lactose, amylose, magnesium stearate, talc, silicic acid, viscous paraffin, hydroxymethylcellulose, polyvinylpyrrolidone and the like.

vii. Other Components

[0783] The compositions of the present invention can additionally contain other adjunct components conventionally found in pharmaceutical compositions, at their art-established usage levels. Thus, for example, the compositions can contain additional, compatible, pharmaceutically-active materials such as, for example, antipruritics, astringents, local anesthetics or anti-inflammatory agents, or can contain additional materials useful in physically formulating various dosage forms of the compositions of the present invention, such as dyes, flavoring agents, preservatives, antioxidants, opacifiers, thickening agents and stabilizers. However, such materials, when added, should not unduly interfere with the biological activities of the components of the compositions of the present invention. The formulations can be sterilized and, if desired, mixed with auxiliary agents, e.g., lubricants, preservatives, stabilizers, wetting agents, emulsifiers, salts for influencing osmotic pressure, buffers, colorings, flavorings and/or aromatic substances and the like which do not deleteriously interact with the nucleic acid(s) of the formulation.

[0784] Aqueous suspensions can contain substances which increase the viscosity of the suspension including, for example, sodium carboxymethylcellulose, sorbitol and/or dextran. The suspension can also contain stabilizers.

[0785] In some embodiments, pharmaceutical compositions featured in the invention include (a) one or more iRNA compounds and (b) one or more agents which function by a non-RNAi mechanism and which are useful in treating an oxalate pathway-associated disease, disorder, or condition. Examples of such agents include, but are not limited to pyridoxine, an ACE inhibitor (angiotensin converting enzyme inhibitors), e.g., benazepril (Lotensin); an angiotensin II receptor antagonist (ARB) (e.g., losartan potassium, such as Merck & Co.'s Cozaar®), e.g., Candesartan (Atacand); an HMG-COA reductase inhibitor (e.g., a statin); dietary oxalate degrading compounds, e.g., Oxalate decarboxylase (Oxazyme); calcium binding agents, e.g., Sodium cellulose phosphate (Calcibind); diuretics, e.g., thiazide diuretics, such as hydrochlorothiazide (Microzide); phosphate binders, e.g., Sevelamer (Renagel); magnesium and Vitamin B6 supplements; potassium citrate; orthophosphates, bisphosphonates; oral phosphate and citrate solutions; high fluid intake, urinary tract endoscopy; extracorporeal shock wave lithotripsy; kidney dialysis; kidney stone removal (e.g., surgery); and kidney/liver transplant; or a combination of any of the foregoing.

[0786] Toxicity and therapeutic efficacy of such compounds can be determined by standard pharmaceutical procedures in cell cultures or experimental animals, e.g., for determining the LD₅₀ (the dose lethal to 50% of the population) and the ED₅₀ (the dose therapeutically effective in 50% of the population). The dose ratio between toxic and therapeutic effects is the therapeutic index and it can be expressed as the ratio LD₅₀/ED₅₀. Compounds that exhibit high therapeutic indices are preferred.

[0787] The data obtained from cell culture assays and animal studies can be used in formulating a range of dosage for use in humans. The dosage of compositions featured herein in the invention lies generally within a range of circulating concentrations that include the ED₅₀ with little or no toxicity. The dosage can vary within this range depending upon the dosage form employed and the route of administration utilized. For any compound used in the methods featured in the invention, the therapeutically effective dose can be estimated initially from cell culture assays. A dose can be formulated in animal models to achieve a circulating plasma concentration range of the compound or, when appropriate, of the polypeptide product of a target sequence (e.g., achieving a decreased concentration of the polypeptide) that includes the IC50 (i.e., the concentration of the test compound which achieves a half-maximal inhibition of symptoms) as determined in cell culture. Such information can be used to more accurately determine useful doses in humans. Levels in plasma can be measured, for example, by high performance liquid chromatography.

[0788] In addition to their administration, as discussed above, the iRNAs featured in the invention can be administered in combination with other known agents effective in treatment of pathological processes mediated by LDHA or LDHA and HAO1 expression. In any event, the administering physician can adjust the amount and timing of iRNA administration on the basis of results observed using standard measures of efficacy known in the art or described herein.

### VI. Methods of the Invention

[0789] The present invention also provides methods of using an iRNA of the invention and/or a composition of the invention to reduce and/or inhibit LDHA or LDHA and HAO1 expression in a cell, such as a cell in a subject. The methods include contacting the cell with a RNAi agent (or pharmaceutical composition comprising an iRNA agent) or pharmaceutical composition of the invention. In some embodiments, the cell is maintained for a time sufficient to obtain degradation of the mRNA transcript of an LDHA gene. In other embodiments, the cell is maintained for a time sufficient to obtain degradation of the mRNA transcript of an LDHA gene and an HAO1 gene in the cell.

[0790] It should be noted that, although the compositions of the invention target LDHA, an enzyme involved in numerous cellular processes (see, e.g., FIGS. 1A and 1B), as demonstrated in the Examples below, contacting a cell with a composition of the invention, or administering a composition of the invention to a subject, does not result in adverse effects in either wild-type or diseased subjects, thereby demonstrating the safety of the compostions of the invention.

[0791] Reduction in gene expression can be assessed by any methods known in the art. For example, a reduction in the expression of LDHA, and/or HAO1, and/or glycolate may be determined by determining the mRNA expression level of LDHA, and/or HAO1, and/or glycolate using methods routine to one of ordinary skill in the art, e.g., Northern blotting, qRT-PCR; by determining the protein level of LDHA, and/or HAO1, and/or glycolate using methods routine to one of ordinary skill in the art, such as Western blotting, immunological techniques. A reduction in the expression of LDHA, and/or HAO1, and/or glycolate may also be assessed indirectly by measuring a decrease in biological activity of LDHA, and/or HAO1, and/or glycolate, e.g., a decrease in the enzymatic activity of LDHA and/or a decrease in tissue or plasma oxalate, or urinary oxalate and/or glycolate excretion.

[0792] In the methods of the invention the cell may be contacted in vitro or in vivo, i.e., the cell may be within a subject.

[0793] A cell suitable for treatment using the methods of the invention may be any cell that expresses an LDHA gene, a cell that expresses an HAO1 gene, a cell that expresses a glycolate gene, a cell that expresses, an LDHA gene and a glycolate gene, a cell that expresses an HAO1gene and a glycolate gene, a cell that expresses an LDHA gene and an HAO1 gene, or a cell that expresses an LDHA gene, an HAO1 gene, and a glycolate gene. A cell suitable for use in the methods of the invention may be a mammalian cell, e.g., a primate cell (such as a human cell or a non-human primate cell, e.g., a monkey cell or a chimpanzee cell), a non-primate cell (such as a cow cell, a pig cell, a camel cell, a llama cell, a horse cell, a goat cell, a rabbit cell, a sheep cell, a hamster, a guinea pig cell, a cat cell, a dog cell, a rat cell, a mouse cell, a lion cell, a tiger cell, a bear cell, or a buffalo cell), a bird cell (e.g., a duck cell or a goose cell), or a whale cell. In one embodiment, the cell is a human cell, e.g., a human liver cell.

[0794] LDHA expression is inhibited in the cell by at least about 5, 6, 7, 8, 9, 10, 11, 12, 13, 14, 15, 16, 17, 18, 19, 20, 21, 22, 23, 24, 25, 26, 27, 28, 29, 30, 31, 32, 33, 34, 35, 36, 37, 38, 39, 40, 41, 42, 43, 45, 46, 47, 48, 49, 50, 51, 52, 53, 54, 55, 56, 57, 58, 59, 60, 61, 62, 63, 64, 65, 66, 67, 68, 69, 70, 71, 72, 73, 74, 75, 76, 77, 78, 79, 80, 81, 82, 83, 84, 85, 86, 87, 88, 89, 90, 91, 92, 93, 94, 95, 96, 97, 98, 99, or about 100%. In preferred embodiments, LDHA expression is inhibited by at least 20%.

[0795] HAO1 expression may be inhibited in the cell by at least about 5, 6, 7, 8, 9, 10, 11, 12, 13, 14, 15, 16, 17, 18, 19, 20, 21, 22, 23, 24, 25, 26, 27, 28, 29, 30, 31, 32, 33, 34, 35, 36, 37, 38, 39, 40, 41, 42, 43, 45, 46, 47, 48, 49, 50, 51, 52, 53, 54, 55, 56, 57, 58, 59, 60, 61, 62, 63, 64, 65, 66, 67, 68, 69, 70, 71, 72, 73, 74, 75, 76, 77, 78, 79, 80, 81, 82, 83, 84, 85, 86, 87, 88, 89, 90, 91, 92, 93, 94, 95, 96, 97, 98, 99, or about 100%. In preferred embodiments, HAO1 expression is inhibited by at least 20%.

[0796] In embodiments in which a cell is contacted with a dual targeting RNAi agent of the invention, the level of inhibition of LDHA may be the same or different than the level of HAO1.

[0797] In one embodiment, the in vivo methods of the invention may include administering to a subject a composition containing an iRNA, where the iRNA includes a nucleotide sequence that is complementary to at least a part of an RNA transcript of the LDHA gene of the mammal to be treated. In another embodiment, the in vivo methods of the invention may include administering to a subject a composition containing an iRNA, where the iRNA includes a nucleotide sequence that is complementary to at least a part of an RNA transcript of the LDHA gene and a nucleotide sequence that is complementary to at least a part of an RNA transcript of the HAO1 gene of the mammal to be treated.

[0798] When the organism to be treated is a mammal such as a human, the composition can be administered by any means known in the art including, but not limited to oral, intraperitoneal, or parenteral routes, including intracranial (e.g., intraventricular, intraparenchymal and intrathecal), intravenous, intramuscular, subcutaneous, transdermal, airway (aerosol), nasal, rectal, and topical (including buccal and sublingual) administration. In certain embodiments, the compositions are administered by intravenous infusion or injection. In certain embodiments, the compositions are administered by subcutaneous injection.

[0799] In some embodiments, the administration is via a depot injection. A depot injection may release the iRNA in a consistent way over a prolonged time period. Thus, a depot injection may reduce the frequency of dosing needed to obtain a desired effect, e.g., a desired inhibition of LDHA, or a desired inhibition of both LDHA and HAO1, or a therapeutic or prophylactic effect. A depot injection may also provide more consistent serum concentrations. Depot injections may include subcutaneous injections or intramuscular injections. In preferred embodiments, the depot injection is a subcutaneous injection.

[0800] In some embodiments, the administration is via a pump. The pump may be an external pump or a surgically implanted pump. In certain embodiments, the pump is a subcutaneously implanted osmotic pump. In other embodiments, the pump is an infusion pump. An infusion pump may be used for intravenous, subcutaneous, arterial, or epidural infusions. In preferred embodiments, the infusion pump is a subcutaneous infusion pump. In other embodiments, the pump is a surgically implanted pump that delivers the iRNA to the liver.

[0801] An iRNA of the invention may be present in a pharmaceutical composition, such as in a suitable buffer solution. The buffer solution may comprise acetate, citrate, prolamine, carbonate, or phosphate, or any combination thereof. In one embodiment, the buffer solution is phosphate buffered saline (PBS). The pH and osmolarity of the buffer solution containing the iRNA can be adjusted such that it is suitable for administering to a subject.

[0802] Alternatively, an iRNA of the invention may be administered as a pharmaceutical composition, such as a dsRNA liposomal formulation.

[0803] The mode of administration may be chosen based upon whether local or systemic treatment is desired and based upon the area to be treated. The route and site of administration may be chosen to enhance targeting.

[0804] In one aspect, the present invention also provides methods for inhibiting the expression of an LDHA gene in a mammal. The methods include administering to the mammal a composition comprising a dsRNA that targets an LDHA gene in a cell of the mammal, thereby inhibiting expression of the LDHA gene in the cell.

[0805] In another aspect, the present invention also provides methods for inhibiting the expression of an LDHA gene and an HAO1 gene in a mammal. The methods include administering to the mammal a pharmaceutical composition comprising a dsRNA agent that targets an LDHA gene and a dsRNA agent that targets an HAO1 gene in a cell of the mammal, thereby inhibiting expression of the LDHA gene and the HAO1 gene in the mammal. In one aspect, the present invention provides methods for inhibiting the expression of an LDHA gene and an HAO1 gene in a mammal. The methods include administering to the mammal a dual targeting RNAi agent (or pharmaceutical composition comprising a dual targeting agent) that targets an LDHA gene and an HAO1 gene in a cell of the mammal, thereby inhibiting expression of the LDHA gene and the HAO1 gene in the subject.

[0806] Reduction in gene expression can be assessed by any methods known it the art and by methods, e.g. qRT-PCR, described herein. Reduction in protein production can be assessed by any methods known it the art and by methods, e.g. ELISA, enzymatic activity, described herein.

[0807] The present invention also provides therapeutic and prophylactic methods which include administering to a subject having, or prone to developing an oxalate-associate disease, disorder, or condition, the iRNA agents, pharmaceutical compositions comprising an iRNA agent, or vectors comprising an iRNA of the invention.

[0808] In one aspect, the present invention provides methods of treating a subject having a disorder that would benefit from reduction in LDHA expression, e.g., an oxalate pathway-associated disease, disorder, or condition.

[0809] The treatment methods (and uses) of the invention include administering to the subject, e.g., a human, a therapeutically effective amount of a dsRNA agent, a dual targeting iRNA agent or a pharmaceutical composition comprising a dsRNA, a pharmaceutical compositions comprising a dual targeting RNAi agent or pharmaceutical composition of the invention comprising a first dsRNA agent that inhibits expression of LDHA and a second dsRNA agent that inhibits expression of HAO1, thereby treating the subject.

[0810] In one aspect, the invention provides methods of preventing at least one symptom in a subject having a disorder that would benefit from reduction in LDHA expression, e.g., an oxalate pathway-associated disease, disorder, or condition. The methods include administering to the subject a prophylactically effective amount of dsRNA agent, a dual targeting iRNA agent or a pharmaceutical composition comprising a dsRNA, a pharmaceutical compositions comprising a dual targeting RNAi agent or pharmaceutical composition of the invention comprising a first dsRNA agent that inhibits expression of LDHA and a second dsRNA agent that inhibits expression of HAO1, thereby preventing at least one symptom in the subject.

[0811] Subjects that would benefit from a reduction and/or inhibition of an LDHA gene expression include subjects that would benefit from reduction in both LDHA and HAO1 gene expression.

[0812] Therefore, in one embodiment, a subject that would benefit from reduction in the expression level of LDHA or a reduction in the expression of LDHA and HAO1, has normal urinary oxalate excretion levels, e.g., less than about 40 mg (440 μmol) in 24 hours (e.g., men have a normal urinary oxalate excretion level of less than about 43 mg/day and women have a normal urinary oxalate excretion level of less than about 32 mg/day). In another embodiment, a subject that would benefit from a reduction in the expression level of LDHA or a reduction in the expression of LDHA and HAO1 has mild hyperoxaluria (a urinary oxalate excretion level of about 40 to about 60 mg/day). In another embodiment, a subject that would benefit from reduction in the expression level of LDHA or a reduction in the expression of LDHA and HAO1 has high hyperoxaluria (a urinary oxalate excretion level of greater than about 60 mg/day).

[0813] In one embodiment, a subject that would benefit from reduction in LDHA expression or LDHA and HAO1 expression is a human at risk of developing an oxalate pathway-associated disease, disorder, or condition. In one embodiment, a subject that would benefit from reduction in LDHA expression or LDHA and HAO1 expression is a human having an oxalate pathway-associated disease, disorder, or condition. In yet another embodiment, a subject that would benefit from reduction in LDHA expression or LDHA and HAO1 expression is a human being treated for an oxalate pathway-associated disease, disorder, or condition.

[0814] In one embodiment, a subject having an oxalate pathway-associated disease, disorder, or condition has an oxalate-associated disease, disorder, or condition. Non-limiting examples of oxalate-associated disease, disorder, or condition include a kidney stone formation disease, disorder, or condition, or a calcium oxalate tissue deposition disease, disorder, or condition. The kidney stone formation disease, disorder, or condition may be a calcium oxalate stone formation disease, disorder, or condition or a non-calcium oxalate stone formation disease, disorder, or condition. The calcium oxalate stone formation disease, disorder, or condition may be a hyperoxaluria disease, disorder, or condition (e.g., mild hyperoxaluria (a urinary oxalate excretion level of about 40 to about 60 mg/day) or high hyperoxaluria (a urinary oxalate excretion level of greater than about 60 mg/day)); or a non-hyperoxaluria disease, disorder, or condition (i.e., a calcium oxalate stone formation disease without hyperoxaluria, e.g., normal urinary oxalate excretion levels, e.g., less than about 40 mg (440 μmol) in 24 hours (e.g., men have a normal urinary oxalate excretion level of less than about 43 mg/day and women have a normal urinary oxalate excretion level of less than about 32 mg/day).

[0815] In one embodiment, the hyperoxaluria disease, disorder, or condition is selected from the group consisting of primary hyperoxaluria, enteric hyperoxaluria, dietary hyperoxaluria, and idiopathic hyperoxaluria.

[0816] In one embodiment, the non-hyperoxaluria stone formation disease, disorder, or condition is hypercalciuria and/or hypocitraturia. In another embodiment, the non-hyperoxaluria stone formation disease, disorder, or condition is calcium oxalate or non-calcium oxalate kidney stone formation disease.

[0817] In one embodiment, the calcium oxalate stone formation disease, disorder, or condition is an inherited disorder, such as a Primary Hyperoxaluria (PH), e.g., Primary Hyperoxaluria Type 1 (PH1); Primary Hyperoxaluria Type 2 (PH2); Primary Hyperoxaluria Type 3 (PH3); or Primary Hyperoxaluria Non-Type 1, Non-Type 2, Non-Type 3 (PH-Non-Type 1, Non-Type 2, Non-Type 3). PHI is a hereditary disorder caused by mutations in alanine glyoxylate aminotransferase (AGT), PH2 is due to mutations in glyoxylate reductase/hydroxypyruvate reductase (GRHPR), and PH3 is caused by mutations in HOGA1 (formerly DHDPSL). Subjects having PH-Non-Type 1, Non-Type 2, Non-Type 3 have clinical characteristics indistinguishable from type 1, 2, and 3, but with normal AGT, GRHPR, and HOGA1 liver enzyme activity, yet the etiology of the marked hyperoxaluria in such subjects remains to be elucidated.

[0818] A deficiency in either AGT or GRHPR activities results in an excess of glyoxylate and oxalate (see, e.g., Knight et al., (2011) Am J Physiol Renal Physiol 302 (6): F688-F693). Therefore, inhibition of LDHA expression and/or activity will decrease the level of excess oxalate. In addition, the inhibition of glycolate oxidase (HAO1) will further reduce the level of glyoxylate. The buildup of oxalate in subjects having PH causes increased excretion of oxalate, which in turn results in renal and bladder stones. Stones cause urinary obstruction (often with severe and acute pain), secondary infection of urine and eventually kidney damage. Oxalate stones tend to be severe, resulting in relatively early kidney damage (e.g., onset in teenage years to early adulthood), which impairs the excretion of oxalate, leading to a further acceleration in accumulation of oxalate in the body. After the development of renal failure, patients may get deposits of oxalate in the bones, joints and bone marrow. Severe cases may develop haematological problems such as anaemia and thrombocytopaenia. The deposition of oxalate in the body is sometimes called “oxalosis” to be distinguished from “oxaluria” which refers to oxalate in the urine. Renal failure is a serious complication requiring treatment in its own right. Dialysis can control renal failure but tends to be inadequate to dispose of excess oxalate. Renal transplant is more effective and this is the primary treatment of severe hyperoxaluria. Liver transplantation (often in addition to renal transplant) may be able to control the disease by correcting the metabolic defect. In a proportion of patients with primary hyperoxaluria type 1, pyridoxine treatment (vitamin B6) may also decrease oxalate excretion and prevent kidney stone formation.

[0819] As exemplified in Example 3, the level of endogenous oxalate excreted in the urine of an art recognized animal model of PH1, e.g., an Agxt deficient mouse, was reduced following administration of an LDHA-specific siRNA (see, e.g., FIG. 6). Accordingly, in one aspect, the present invention provides methods for treating a subject having PH1. The methods include administering to the subject a therapeutically effective amount of a dsRNA targeting an LDHA gene and/or an HAO1 gene, a pharmaceutical composition comprising a dsRNA agent that targets an LDHA gene and/or a dsRNA agent that targets an HAO1 gene.

[0820] As also exemplified in Example 3, the level of endogenous oxalate excreted in the urine of an art recognized animal model of PH2, e.g., a Grhpr deficient mouse, was reduced following administration of an LDHA-specific siRNA (see, e.g., FIG. 6). Accordingly, in one aspect, the present invention provides methods for treating a subject having PH2. The methods include administering to the subject a therapeutically effective amount of a dsRNA targeting an LDHA gene and/or an HAO1 gene, a pharmaceutical composition comprising a dsRNA agent that targets an LDHA gene and/or a dsRNA agent that targets an HAO1 gene in a cell of the subject.

[0821] In some embodiment, the methods for treating a subject having PH2 further include altering the diet of the subject (e.g., decreasing protein intake, decreasing sodium intake, decreasing ascorbic acid intake, moderating calcium intake, supplementing phosphate, supplementing magnesium, or pyridoxine treatment; or a combination of any of the foregoing) and/or transplanting a kidney in the subject

[0822] In another embodiment, the calcium oxalate stone formation disease, disorder, or condition is enteric hyperoxaluria. Enteric hyperoxaluria is the formation of calcium oxalate calculi in the urinary tract due to excessive absorption of oxalate from the colon, occurring as a result of intestinal bacterial overgrowth syndromes, fat malabsorption, chronic biliary or pancreatic disease, various intestinal surgical procedures, gastric bypass surgery, inflammatory bowel disease, or any medical condition that causes chronic diarrhea, e.g., Crohn's disease or ulcerative colitis).

[0823] In another embodiment, the calcium oxalate stone formation disease, disorder, or condition is dietary hyperoxaluria, e.g., hyperoxaluria as a result of too much oxalate in the diet, e.g., from too much spinach, rhubarb, almonds, bulgur, millet, corn grits, soy flour, cornmeal, navy beans, etc.

[0824] In another embodiment, the calcium oxalate stone formation disease, disorder, or condition is idiopathic hyperoxaluria. Subjects having idiopathic hyperoxaluria have above normal levels of urinary oxalate of unknown cause, but still develop stones. Subjects at risk of developing idiopathic hyperoxaluria include diabetics and obese subjects. For example, epidemiological data has demonstrated that as body mass index (BMI) increases, urinary oxalate excretion increases and subjects having diabetes have increases urinary oxalate levels.

[0825] In one embodiment, the non-calcium oxalate stone formation disease, disorder, or condition is hypercalciuria (hypercalcinuria). Hypercalciuria is a condition of elevated calcium in the urine. Chronic hypercalcinuria may lead to impairment of renal function, nephrocalcinosis, and renal insufficiency. Subjects at risk of developing hypercalciuria include subjects having Dent's disease, absorptive hypercalciuria, and primary hyperparathyroid.

[0826] In another embodiment, the non-calcium oxalate stone formation disease, disorder, or condition is hypocitraturia. In one embodiment, the hypocitraturia is severe hypocitraturia, e.g., citrate excretion of less than 100 mg per day. In another embodiment, the hypocitraturia is mild to moderate hypocitraturi, e.g., citrate excretion of 100-320 mg per day.

[0827] In one embodiment, a non-calcium oxalate stone formation disease, disorder, or condition is a disease, disorder, or condition, such as a ureterolithiasis or a nephrocalcinosis, of calcium stones; struvite (magnesium ammonium phosphate) stones; uric acid stones; or cystine stones. Although the primary component of the stones in such diseases, disorders, and conditions is other than oxalate, oxalate may still be present and form a nidus for further growth of the stones. Accordingly, subjects having a disease, disorder, or condition of calcium stones, struvite (magnesium ammonium phosphate) stones, uric acid stones, or cystine stones would benefit from the methods of the invention.

[0828] In one embodiment, an oxalate-associated disease, disorder, or condition is a calcium oxalate tissue deposition disease, disorder, or condition. For example, when glomerular filtration rate (GFR) drops below about 30-40 mL/min per 1.73 m2, renal capacity to excrete calcium oxalate is significantly impaired. At this stage, calcium oxalate starts to deposit in extrarenal tissues. Calcium oxalate deposits may occur in the thyroid, breasts, kidneys, bones, and bone marrow, myocardium, cardiac conduction system. This leads to cardiomyopathy, heart block and other cardiac conduction defects, vascular disease, retinopathy, synovitis, oxalate osteopathy and anemia that is noted to be resistant to treatment. The deposition of calcium oxalate mat be systemic or tissue specific. For example, subjects having arthritis, sarcoidosis, end-stage renal disease are at risk of developing systemic calcium oxalate tissue deposition disease, disorder, or condition. Subjects at risk of developing tissue specific depositions in the kidney, for example, include subjects having medullary sponge kidney, nephrocalcinosis, renal tubular acidosis (RTA), and transplant recipients, e.g., kidney transplant recipients.

[0829] In one embodiment, an oxalate pathway-associated disease, disorder, or condition is a lactate dehydrogenase-associated disease, disorder, or condition. Non-limiting examples of lactate dehydrogenase-associated diseases, disorders, or conditions include cancer, e.g., cancer, e.g., hepatocellular carcinoma, fatty liver (steatosis), nonalcoholic steatohepatitis (NASH), cirrhosis of the liver, accumulation of fat in the liver, inflammation of the liver, hepatocellular necrosis, liver fibrosis, and nonalcoholic fatty liver disease (NAFLD).

[0830] A diagnosis of nonalcoholic fatty liver disease (NAFLD) requires that (a) there is evidence of hepatic steatosis, either by imaging or by histology and (b) there are no causes for secondary hepatic fat accumulation such as significant alcohol consumption, use of steatogenic medication or hereditary disorders. In the majority of patients, NAFLD is associated with metabolic risk factors such as obesity, diabetes mellitus, and dyslipidemia. NAFLD is histologically further categorized into nonalcoholic fatty liver (NAFL) and nonalcoholic steatohepatitis (NASH). NAFL is defined as the presence of hepatic steatosis with no evidence of hepatocellular injury in the form of ballooning of the hepatocytes. NASH is defined as the presence of hepatic steatosis and inflammation with hepatocyte injury (ballooning) with or without fibrosis (Chalasani et al., Hepatol. 55:2005-2023, 2012). It is generally agreed that patients with simple steatosis have very slow, if any, histological progression, while patients with NASH can exhibit histological progression to cirrhotic-stage disease. The long term outcomes of patients with NAFLD and NASH have been reported in several studies.

[0831] LHDA is required for the initiation, maintenance and progression of tumors (Shi and Pinto, PLOS ONE 2014, 9 (1), e86365; Le et al. Proc Natl Acad Sci USA 107:2037-2042) and up-regulation of LDHA is a characteristic of many cancer types (Goldman R D et al., Cancer Res 24:389-399.; Koukourakis M I, et al, Br J Cancer 89:877-885.; Koukourakis M I, et al, LJ Clin Oncol 24:4301-4308.; Kolev Y, et al, Ann Surg Oncol 15:2336-2344.; Zhuang L, et al, Mod Pathol 23:45-53), including, e.g., breast cancer, lymphoma, renal cancer (including renal cell cancer tumors), hereditary leiomyomatosis, pancreatic cancer, liver cancer (including hepatocellular carcinoma), and other forms of cancer.

[0832] In another aspect, the present invention provides uses of a therapeutically effective amount of a dsRNA agent, a dual targeting iRNA agent or a pharmaceutical composition comprising a dsRNA, a pharmaceutical compositions comprising a dual targeting RNAi agent or pharmaceutical composition of the invention comprising a first dsRNA agent that inhibits expression of LDHA and a second dsRNA agent that inhibits expression of HAO1 for treating a subject, e.g., a subject that would benefit from a reduction and/or inhibition of LDHA expression or LDHA and HAO1 expression, e.g., an oxalate pathway-associated disease, disorder, or condition.

[0833] In a further aspect, the present invention provides uses of a dual targeting iRNA agent or a pharmaceutical composition comprising of a dsRNA agent, a dual targeting iRNA agent or a pharmaceutical composition comprising a dsRNA, a pharmaceutical composition comprising a dual targeting RNAi agent or pharmaceutical composition of the invention comprising a first dsRNA agent that inhibits expression of LDHA and a second dsRNA agent that inhibits expression of HAO1 in the manufacture of a medicament for treating a subject, e.g., a subject that would benefit from a reduction and/or inhibition of LDHA expression or LDHA and HAO1 expression, e.g., an oxalate pathway-associated disease, disorder, or condition.

[0834] In the methods (and uses) of the invention which comprise administering to a subject a first dsRNA agent targeting LDHA and a second dsRNA agent targeting HAO1, the first and second dsRNA agents may be formulated in the same composition or different compositions and may administered to the subject in the same composition or in separate compositions.

[0835] The dsRNA agent may be administered to the subject at a dose of about 0.1 mg/kg to about 50 mg/kg. Typically, a suitable dose will be in the range of about 0.1 mg/kg to about 5.0 mg/kg, preferably about 0.3 mg/kg and about 3.0 mg/kg. In addition, the

[0836] The dual targeting RNAi agent may be administered to the subject at a dose of about 0.1 mg/kg to about 50 mg/kg. Typically, a suitable dose will be in the range of about 0.1 mg/kg to about 5.0 mg/kg, preferably about 0.3 mg/kg and about 3.0 mg/kg. In addition, the first dsRNA agent and the second dsRNA agent may be each independently administered to the subject at a dose of about 0.5 mg/kg to about 50 mg/kg, e.g., in the range of about 0.1 mg/kg to about 5.0 mg/kg, preferably about 0.3 mg/kg and about 3.0 mg/kg.

[0837] In the methods (and uses) of the invention which comprise administering to a subject a first dsRNA agent targeting LDHA and a second dsRNA agent targeting HAO1, the first and second dsRNA agents may be administered to a subject at the same dose or different doses.

[0838] The iRNA can be administered by intravenous infusion over a period of time, on a regular basis. In certain embodiments, after an initial treatment regimen, the treatments can be administered on a less frequent basis.

[0839] Administration of the iRNA can reduce LDHA levels, e.g., in a cell, tissue, blood, urine or other compartment of the patient by at least about 5%, 6, 7, 8, 9, 10, 11, 12, 13, 14, 15, 16, 17, 18, 19, 20, 21, 22, 23, 24, 25, 26, 27, 28, 29, 30, 31, 32, 33, 34, 35, 36, 37, 38, 39, 40, 41, 42, 43, 44, 45, 46, 47, 48, 39, 50, 51, 52, 53, 54, 55, 56, 57, 58, 59, 60, 61, 62, 63, 64, 65, 66, 67, 68, 69, 70, 71, 72, 73, 74, 75, 76, 77, 78, 79, 80, 81, 82, 83, 84, 85, 86, 87, 88, 89, 90, 91, 92, 93, 94, 95, 96, 97, 98, or at least about 99% or more. In a preferred embodiment, administration of the iRNA can reduce LDHA levels, e.g., in a cell, tissue, blood, urine or other compartment of the patient by at least 20%.

[0840] Administration of the iRNA can reduce HAO1 levels, e.g., in a cell, tissue, blood, urine or other compartment of the patient by at least about 5%, 6, 7, 8, 9, 10, 11, 12, 13, 14, 15, 16, 17, 18, 19, 20, 21, 22, 23, 24, 25, 26, 27, 28, 29, 30, 31, 32, 33, 34, 35, 36, 37, 38, 39, 40, 41, 42, 43, 44, 45, 46, 47, 48, 39, 50, 51, 52, 53, 54, 55, 56, 57, 58, 59, 60, 61, 62, 63, 64, 65, 66, 67, 68, 69, 70, 71, 72, 73, 74, 75, 76, 77, 78, 79, 80, 81, 82, 83, 84, 85, 86, 87, 88, 89, 90, 91, 92, 93, 94, 95, 96, 97, 98, or at least about 99% or more. In a preferred embodiment, administration of the iRNA can reduce HAO1 levels, e.g., in a cell, tissue, blood, urine or other compartment of the patient by at least 20%.

[0841] In the methods (and uses) of the invention which comprise administering to a subject a first dsRNA agent targeting LDHA and a second dsRNA agent targeting HAO1, the level of inhibition of LDHA may be the same or different that the level of inhibition of HAO1.

[0842] In the methods (and uses) of the invention which comprise administering to a subject a dual targeting RNAi agent, the dual targeting RNAi agent may inhibit expression of the LDHA gene and the HAO1 gene to a level substantially the same as the level of inhibition of expression obtained by the contacting of a cell with both dsRNA agents individually, or the dual targeting RNAi agent may inhibit expression of the LDHA gene and the HAO1 gene to a level higher than the level of inhibition of expression obtained by the contacting of a cell with both dsRNA agents individually.

[0843] Before administration of a full dose of the iRNA, patients can be administered a smaller dose, such as a 5% infusion reaction, and monitored for adverse effects, such as an allergic reaction. In another example, the patient can be monitored for unwanted immunostimulatory effects, such as increased cytokine (e.g., TNF-alpha or INF-alpha) levels.

[0844] Alternatively, the iRNA can be administered subcutaneously, i.e., by subcutaneous injection. One or more injections may be used to deliver the desired daily dose of iRNA to a subject. The injections may be repeated over a period of time. The administration may be repeated on a regular basis. In certain embodiments, after an initial treatment regimen, the treatments can be administered on a less frequent basis. A repeat-dose regimine may include administration of a therapeutic amount of iRNA on a regular basis, such as every other day or to once a year. In certain embodiments, the iRNA is administered about once per month to about once per quarter (i.e., about once every three months).

[0845] In one embodiment, the method includes administering a composition featured herein such that expression of the target LDHA gene and/or the target HAO1 gene is decreased, such as for about 1, 2, 3, 4, 5, 6, 7, 8, 12, 16, 18, 24 hours, 28, 32, or about 36 hours. In one embodiment, expression of the target LDHA gene and the HAO1 gene is decreased for an extended duration, e.g., at least about two, three, four days or more, e.g., about one week, two weeks, three weeks, or four weeks or longer.

[0846] Preferably, the iRNAs useful for the methods and compositions featured herein specifically target RNAs (primary or processed) of the target LDHA and HAO1 genes. Compositions and methods for inhibiting the expression of these genes using iRNAs can be prepared and performed as described herein.

[0847] Administration of the dsRNA according to the methods of the invention may result in a reduction of the severity, signs, symptoms, and/or markers of such diseases or disorders in a patient with a disorder of lipid metabolism. By “reduction” in this context is meant a statistically significant decrease in such level. The reduction can be, for example, at least about 5%, 10%, 15%, 20%, 25%, 30%, 35%, 40%, 45%, 50%, 55%, 60%, 65%, 70%, 75%, 80%, 85%, 90%, 95%, or about 100%.

[0848] Efficacy of treatment or prevention of disease can be assessed, for example by measuring disease progression, disease remission, symptom severity, reduction in pain, quality of life, dose of a medication required to sustain a treatment effect, level of a disease marker or any other measurable parameter appropriate for a given disease being treated or targeted for prevention. It is well within the ability of one skilled in the art to monitor efficacy of treatment or prevention by measuring any one of such parameters, or any combination of parameters. For example, efficacy of treatment of a disorder of lipid metabolism may be assessed, for example, by periodic monitoring of one or more serum lipid levels, e.g., triglyceride levels. Comparisons of the later readings with the initial readings provide a physician an indication of whether the treatment is effective. It is well within the ability of one skilled in the art to monitor efficacy of treatment or prevention by measuring any one of such parameters, or any combination of parameters. In connection with the administration of an iRNA or pharmaceutical composition thereof, “effective against” a disorder of lipid metabolism indicates that administration in a clinically appropriate manner results in a beneficial effect for at least a statistically significant fraction of patients, such as a improvement of symptoms, a cure, a reduction in disease, extension of life, improvement in quality of life, or other effect generally recognized as positive by medical doctors familiar with treating disorder of lipid metabolisms and the related causes.

[0849] A treatment or preventive effect is evident when there is a statistically significant improvement in one or more parameters of disease status, or by a failure to worsen or to develop symptoms where they would otherwise be anticipated. As an example, a favorable change of at least 10% in a measurable parameter of disease, and preferably at least 20%, 30%, 40%, 50% or more can be indicative of effective treatment. Efficacy for a given iRNA drug or formulation of that drug can also be judged using an experimental animal model for the given disease as known in the art.

[0850] The invention further provides methods for the use of a iRNA agent or a pharmaceutical composition of the invention, e.g., for treating a subject that would benefit from reduction and/or inhibition of LDHA expression or LDHA and HAO1 expression, e.g., a subject having an oxalate pathway-associated disease, disorder, or condition, in combination with other pharmaceuticals and/or other therapeutic methods, e.g., with known pharmaceuticals and/or known therapeutic methods, such as, for example, those which are currently employed for treating these disorders. For example, in certain embodiments, an iRNA agent or pharmaceutical composition of the invention is administered in combination with, e.g., pyridoxine, an ACE inhibitor (angiotensin converting enzyme inhibitors), e.g., benazepril (Lotensin); an angiotensin II receptor antagonist (ARB) (e.g., losartan potassium, such as Merck & Co.'s Cozaar®), e.g., Candesartan (Atacand); an HMG-COA reductase inhibitor (e.g., a statin); dietary oxalate degrading compounds, e.g., Oxalate decarboxylase (Oxazyme); calcium binding agents, e.g., Sodium cellulose phosphate (Calcibind); diuretics, e.g., thiazide diuretics, such as hydrochlorothiazide (Microzide); phosphate binders, e.g., Sevelamer (Renagel); magnesium and Vitamin B6 supplements; potassium citrate; orthophosphates, bisphosphonates; oral phosphate and citrate solutions; high fluid intake, urinary tract endoscopy; extracorporeal shock wave lithotripsy; kidney dialysis; kidney stone removal (e.g., surgery); and kidney/liver transplant; or a combination of any of the foregoing.

[0851] In certain embodiments, an iRNA agent as described herein is administered in combination with an iRNA agent targeting hydroxyproline dehydrogenase (HYPDH; also known as HPOX or PRODH2) (see, e.g., Li, et al. (Biochem Biophys Acta (2016) 1862:233-239) or an inhibitory analog of HYPDH (see, e.g., Summitt, et al. (Biochem J (2015) 466:273-281).

[0852] The iRNA agent and an additional therapeutic agent and/or treatment may be administered at the same time and/or in the same combination, e.g., subcutaneously, or the additional therapeutic agent can be administered as part of a separate composition or at separate times and/or by another method known in the art or described herein.

### VII. Kits

[0853] The present invention also provides kits for performing any of the methods of the invention. Such kits include one or more RNAi agent(s) and instructions for use, e.g., instructions for inhibiting expression of a LDHA or LDHA and HAO1 in a cell by contacting the cell with an RNAi agent or pharmaceutical composition of the invention in an amount effective to inhibit expression of the LDHA or LDHA and HAO1. The kits may optionally further comprise means for contacting the cell with the RNAi agent (e.g., an injection device), or means for measuring the inhibition of LDHA and/or HAO1 (e.g., means for measuring the inhibition of LDHA and/or HAO1 mRNA and/or LDHA and/or HAO1 protein). Such means for measuring the inhibition of LDHA and/or HAO1 may comprise a means for obtaining a sample from a subject, such as, e.g., a plasma sample. The kits of the invention may optionally further comprise means for administering the RNAi agent(s) to a subject or means for determining the therapeutically effective or prophylactically effective amount.

[0854] Unless otherwise defined, all technical and scientific terms used herein have the same meaning as commonly understood by one of ordinary skill in the art to which this invention belongs. Although methods and materials similar or equivalent to those described herein can be used in the practice or testing of the iRNAs and methods featured in the invention, suitable methods and materials are described below. All publications, patent applications, patents, and other references mentioned herein are incorporated by reference in their entirety. In case of conflict, the present specification, including definitions, will control. In addition, the materials, methods, and examples are illustrative only and not intended to be limiting.

### EXAMPLES

### Example 1. RNA Design, Synthesis, Selection, and In Vitro Evaluation

### Source of Reagents

[0855] Where the source of a reagent is not specifically given herein, such reagent can be obtained from any supplier of reagents for molecular biology at a quality/purity standard for application in molecular biology.

### Transcripts

[0856] A set of iRNAs targeting LDHA that cross-react with mouse and rat Ldha (human NCBI refseqID: NM_010699.2) were designed using custom R and Python scripts. The mouse Ldha, variant 1 REFSEQ mRNA has a length of 1,661 bases.

[0857] An additional set of iRNAs targeting LDHA (human: NCBI refseqID NM_005566.3; NCBI GeneID: 3939) as well as toxicology-species LDHA orthologs (cynomolgus monkey: NM_001283551.1) was designed using custom R and Python scripts. The human NM_005566 REFSEQ mRNA, version 3, has a length of 2226 bases.

[0858] A detailed list of the unmodified mouse/rat cross-reactive LDHA sense and antisense strand sequences is shown in Table 2. A detailed list of the modified mouse/rat cross-reactive LDHA sense and antisense strand sequences is shown in Table 3.

[0859] A detailed list of the unmodified human/Cynomolgus cross-reactive LDHA sense and antisense strand sequences is shown in Table 4. A detailed list of the modified human/Cynomolgus cross-reactive LDHA sense and antisense strand sequences is shown in Table 5.

[0860] As described in PCT Publication, WO 2016/057893 (the entire contents of thwich is incorporated herein by reference), a set of iRNAs targeting HAO1 were also designed. Design used the following transcripts from the NCBI RefSeq collection: human (Homo sapiens) HAO1 mRNA is NM_017545.2; cynomolgus monkey (Macaca fascicularis) HAO1 mRNA is XM_005568381.1; Mouse (Mus musculus) HAO1 mRNA is NM_010403.2; Rat (Rattus norvegicus) HAO1 mRNA is XM_006235096.1.

[0861] Tables 7 and 8 provide the modified sense and antisense strand sequences of duplexes targeting HAO1. Tables 9, 10, 11, 14, and 15 provide the unmodified sense and antisense strand sequences of duplexes targeting HAO1. Tables 12, 13, and 16 provide the unmodified and modified sense and antisense strand sequences of duplexes targeting HAO1.

[0862] When known, the species of HAO1 that is inhibited by the duplex is noted: Hs indicates that the agent inhibits the expression of human HAO1; Mm indicates that the agent inhibits the expression of mouse HAO1; and Hs/Mm indicates that the agent inhibits expression of both human and mouse HAO.

### In Vitro Screening:

### Cell Culture and Transfections

[0863] Primary Mouse Hepatocyte cells (PMH) (MSCP10, Lot #MC613) were transfected by adding 4.9 μl of Opti-MEM plus 0.1 μl of Lipofectamine RNAiMax per well (Invitrogen, Carlsbad CA. cat #13778-150) to 5 μl of siRNA duplexes per well into a 384-well plate and incubated at room temperature for 15 minutes. Forty μl of DMEM (Hep3b) of William's E Medium (PMH) containing about 5×10³ cells was then added to the siRNA mixture. Cells were incubated for 24 hours prior to RNA purification. Single dose experiments were performed at 10 nM and 0.1 nM final duplex concentration.

[0864] Hep3b cells (ATCC) were transfected by adding 4.9 μl of Opti-MEM plus 0.1 μl of Lipofectamine RNAiMax per well (Invitrogen, Carlsbad CA. cat #13778-150) to 5 μl of siRNA duplexes per well into a 384-well plate and incubated at room temperature for 15 minutes. Forty μl of Eagle's Minimal Essential Medium (Life Tech) containing ˜5×10³ cells were then added to the siRNA mixture. Cells were incubated for 24 hours prior to RNA purification. Single dose experiments were performed at 10 nM.

Total RNA Isolation Using DYNABEADS mRNA Isolation Kit (Invitrogen, Part #: 610-12)

[0865] Cells were lysed in 75 μl of Lysis/Binding Buffer containing 3 μL of beads per well and mixed for 10 minutes on an electrostatic shaker. The washing steps were automated on a Biotek EL406, using a magnetic plate support. Beads were washed (90 μL) once in Buffer A, once in Buffer B, and twice in Buffer E, with aspiration steps in between. Following a final aspiration, complete 10 μL RT mixture was added to each well, as described below. cDNA synthesis using ABI High capacity cDNA reverse transcription kit (Applied Biosystems, Foster City, CA, Cat #4368813)

[0866] A master mix of 1 μl 10× Buffer, 0.4 μl 25X dNTPs, 1 μl Random primers, 0.5 μl Reverse Transcriptase, 0.5 μl RNase inhibitor and 6.6 μl of H₂O per reaction was added per well. Plates were sealed, agitated for 10 minutes on an electrostatic shaker, and then incubated at 37° C. for 2 hours. Following this, the plates were agitated at 80° C. for 8 minutes.

### Real Time PCR

[0867] Two μl of cDNA was added to a master mix containing 0.5 μl of human GAPDH TaqMan Probe (4326317E), 0.5 μl human LDHA, 2 μl nuclease-free water and 5 μl Lightcycler 480 probe master mix (Roche Cat #04887301001) per well in a 384 well plates (Roche cat #04887301001). Real time PCR was performed in a LightCycler480 Real Time PCR system (Roche) using the ΔΔCt (RQ) assay. Each duplex was tested in at least two independent transfections, unless otherwise noted in the summary tables.

[0868] To calculate relative fold change, real time data was analyzed using the ΔΔCt method and normalized to assays performed with cells transfected with 10 nM nonspecific siRNA, or mock transfected cells.

[0869] Table 6A shows the results of a single dose screen in primary mouse hepatocytes transfected with the indicated GalNAC conjugated modified iRNAs. Data are expressed as percent of message remaining relative to untreated cells.

[0870] Table 6B shows the results of a single dose screen in primary mouse hepatocytes transfected with the indicated GalNAC conjugated modified iRNAs. Data are expressed as percent of message remaining relative to untreated cells.

TABLE 1
Abbreviations of nucleotide monomers used in nucleic acid sequence representation.
It will be understood that these monomers, when present in an oligonucleotide, are mutually linked by 5′-3′-phosphodiester bonds.

| Abbreviation | Nucleotide(s) |
|---|---|
| A | Adenosine-3′-phosphate |
| Ab | beta-L-adenosine-3′-phosphate |
| Abs | beta-L-adenosine-3′-phosphorothioate |
| Af | 2′-fluoroadenosine-3′-phosphate |
| Afs | 2′-fluoroadenosine-3′-phosphorothioate |
| As | adenosine-3′-phosphorothioate |
| C | cytidine-3′-phosphate |
| Cb | beta-L-cytidine-3′-phosphate |
| Cbs | beta-L-cytidine-3′-phosphorothioate |
| Cf | 2′-fluorocytidine-3′-phosphate |
| Cfs | 2′-fluorocytidine-3′-phosphorothioate |
| Cs | cytidine-3′-phosphorothioate |
| G | guanosine-3′-phosphate |
| Gb | beta-L-guanosine-3′-phosphate |
| Gbs | beta-L-guanosine-3′-phosphorothioate |
| Gf | 2′-fluoroguanosine-3′-phosphate |
| Gfs | 2′-fluoroguanosine-3′-phosphorothioate |
| Gs | guanosine-3′-phosphorothioate |
| T | 5′-methyluridine-3′-phosphate |
| Tf | 2′-fluoro-5-methyluridine-3′-phosphate |
| Tfs | 2′-fluoro-5-methyluridine-3′-phosphorothioate |
| Ts | 5-methyluridine-3′-phosphorothioate |
| U | Uridine-3′-phosphate |
| Uf | 2′-fluorouridine-3′-phosphate |
| Ufs | 2′-fluorouridine -3′-phosphorothioate |
| Us | uridine -3′-phosphorothioate |
| N | any nucleotide (G, A, C, T or U) |
| a | 2′-O-methyladenosine-3′-phosphate |
| as | 2′-O-methyladenosine-3′-phosphorothioate |
| c | 2′-O-methylcytidine-3′-phosphate |
| cs | 2′-O-methylcytidine-3′-phosphorothioate |
| g | 2′-O-methylguanosine-3′-phosphate |
| gs | 2′-O-methylguanosine-3′-phosphorothioate |
| t | 2′-O-methyl-5-methyluridine-3′-phosphate |
| ts | 2′-O-methyl-5-methyluridine-3′-phosphorothioate |
| u | 2′-O-methyluridine-3′-phosphate |
| us | 2′-O-methyluridine-3′-phosphorothioate |
| s | phosphorothioate linkage |
| L96 | N-[tris(GalNAc-alkyl)-amidodecanoyl)]-4-hydroxyprolinol |
| | Hyp-(GalNAc-alkyl)3 |
| Y34 | 2-hydroxymethyl-tetrahydrofurane-4-methoxy-3-phosphate (abasic |
| | 2′-OMe furanose) |
| Y44 | inverted abasic DNA (2-hydroxymethyl-tetrahydrofurane-5- |
| | phosphate) |
| (Agn) | Adenosine-glycol nucleic acid (GNA) |
| (Cgn) | Cytidine-glycol nucleic acid (GNA) |
| (Ggn) | Guanosine-glycol nucleic acid (GNA) |
| (Tgn) | Thymidine-glycol nucleic acid (GNA) S-Isomer |
| P | Phosphate |
| VP | Vinyl-phosphate |
| (Aam) | 2′-O-(N-methylacetamide)adenosine-3′-phosphate |
| (Aams) | 2′-O-(N-methylacetamide)adenosine-3′-phosphorothioate |
| (Gam) | 2′-O-(N-methylacetamide)guanosine-3′-phosphate |
| (Gams) | 2′-O-(N-methylacetamide)guanosine-3′-phosphorothioate |
| (Tam) | 2′-O-(N-methylacetamide)thymidine-3′-phosphate |
| (Tams) | 2′-O-(N-methylacetamide)thymidine-3′-phosphorothioate |
| dA | 2′-deoxyadenosine-3′-phosphate |
| dAs | 2′-deoxyadenosine-3′-phosphorothioate |
| dC | 2′-deoxycytidine-3′-phosphate |
| dCs | 2′-deoxycytidine-3′-phosphorothioate |
| dG | 2′-deoxyguanosine-3′-phosphate |
| dGs | 2′-deoxyguanosine-3′-phosphorothioate |
| dT | 2′-deoxythymidine-3′-phosphate |
| dTs | 2′-deoxythymidine-3′-phosphorothioate |
| dU | 2′-deoxyuridine |
| dUs | 2′-deoxyuridine-3′-phosphorothioate |
| (Aeo) | 2′-O-methoxyethyladenosine-3′-phosphate |
| (Aeos) | 2′-O-methoxyethyladenosine-3′-phosphorothioate |
| (Geo) | 2′-O-methoxyethylguanosine-3′-phosphate |
| (Geos) | 2′-O-methoxyethylguanosine-3′-phosphorothioate |
| (Teo) | 2′-O-methoxyethyl-5-methyluridine-3′-phosphate |
| (Teos) | 2′-O-methoxyethyl-5-methyluridine-3′-phosphorothioate |
| (m5Ceo) | 2′-O-methoxyethyl-5-methylcytidine-3′-phosphate |
| (m5Ceos) | 2′-O-methoxyethyl-5-methylcytidine-3′-phosphorothioate |
| (A3m) | 3′-O-methyladenosine-2′-phosphate |
| (A3mx) | 3′-O-methyl-xylofuranosyladenosine-2′-phosphate |
| (G3m) | 3′-O-methylguanosine-2′-phosphate |
| (G3mx) | 3′-O-methyl-xylofuranosylguanosine-2′-phosphate |
| (C3m) | 3′-O-methylcytidine-2′-phosphate |
| (C3mx) | 3′-O-methyl-xylofuranosylcytidine-2′-phosphate |
| (U3m) | 3′-O-methyluridine-2′-phosphate |
| U3mx) | 3′-O-methyl-xylofuranosyluridine-2′-phosphate |
| (m5Cam) | 2′-O-(N-methylacetamide)-5-methylcytidine-3′-phosphate |
| (m5Cams) | 2′-O-(N-methylacetamide)-5-methylcytidine-3′-phosphorothioate |
| (Chd) | 2′-O-hexadecyl-cytidine-3′-phosphate |
| (Chds) | 2′-O-hexadecyl-cytidine-3′-phosphorothioate |
| (Uhd) | 2′-O-hexadecyl-uridine-3′-phosphate |
| (Uhds) | 2′-O-hexadecyl-uridine-3′-phosphorothioate |
| (pshe) | Hydroxyethylphosphorothioate |

TABLE 2
UNMODIFIED MOUSE/RAT CROSS-REACTIVE LDHA IRNA SEQUENCES

| | Sense | Sense | SEQ | Range in | Antisense | Antisense | SEQ | Range in |
|---|---|---|---|---|---|---|---|---|
| Duplex | Oligo | Sequence | ID | NM_ | Oligo | Sequence | ID | NM_ |
| Name | Name | 5′ to 3′ | NO | 010699.2 | Name | 5′ to 3′ | NO | 010699.2 |
| AD-84747 | A-169171 | AACACCAAAA | 2990 | 357-377 | A-169172 | UUGGAGACAA | 3034 | 355-377 |
| | | AUUGUCUCCA | | | | UUUUUGGUGU | | |
| | | A | | | | UUU | | |
| AD-84748 | A-169173 | AAACCGAGUA | 2991 | 603-623 | A-169174 | UCACUUCCAA | 3035 | 601-623 |
| | | AUUGGAAGUG | | | | UUACUCGGUU | | |
| | | A | | | | UUU | | |
| AD-84749 | A-169175 | AAAUCAGUGG | 2992 | 584-604 | A-169176 | UUUUGGGAAA | 3036 | 582-604 |
| | | CUUUCCCAAA | | | | GCCACUGAUU | | |
| | | A | | | | UUC | | |
| AD-84750 | A-169177 | UCCCAACAUU | 2993 | 501-521 | A-169178 | UUGUACUUGA | 3037 | 499-521 |
| | | GUCAAGUACA | | | | CAAUGUUGGG | | |
| | | A | | | | AAU | | |
| AD-84751 | A-169179 | UGUGCCAUCA | 2994 | 241-261 | A-169180 | UAUUAAGAUA | 3038 | 239-261 |
| | | GUAUCUUAAU | | | | CUGAUGGCAC | | |
| | | A | | | | AAG | | |
| AD-84752 | A-169181 | AAAUUGUCUC | 2995 | 365-385 | A-169182 | AGUCUUUGCU | 3039 | 363-385 |
| | | CAGCAAAGAC | | | | GGAGACAAUU | | |
| | | U | | | | UUU | | |
| AD-84753 | A-169183 | ACCUUGAACA | 2996 | 1610-1630 | A-169184 | UUUUUUUUCA | 3040 | 1608-1630 |
| | | GUGAAAAAAA | | | | CUGUUCAAGG | | |
| | | A | | | | UUU | | |
| AD-84754 | A-169185 | AAAACACCAA | 2997 | 355-375 | A-169186 | UGAGACAAUU | 3041 | 353-375 |
| | | AAAUUGUCUC | | | | UUUGGUGUUU | | |
| | | A | | | | UAA | | |
| AD-84755 | A-169187 | ACCAAAAAUU | 2998 | 360-380 | A-169188 | UUGCUGGAGA | 3042 | 358-380 |
| | | GUCUCCAGCA | | | | CAAUUUUUGG | | |
| | | A | | | | UGU | | |
| AD-84756 | A-169189 | CAAGUUCAUC | 2999 | 489-509 | A-169190 | AUGUUGGGAA | 3043 | 487-509 |
| | | AUUCCCAACA | | | | UGAUGAACUU | | |
| | | U | | | | GAA | | |
| AD-84757 | A-169191 | GCAAUAUUAU | 3000 | 1538-1558 | A-169192 | UUACAUCUCA | 3044 | 1536-1558 |
| | | GUGAGAUGUA | | | | CAUAAUAUUG | | |
| | | A | | | | CAA | | |
| AD-84758 | A-169193 | GUCUCAAAAG | 3001 | 115-135 | A-169194 | UGACUUUGAA | 3045 | 113-135 |
| | | AUUCAAAGUC | | | | UCUUUUGAGA | | |
| | | A | | | | CCG | | |
| AD-84759 | A-169195 | CAUUCCCAAC | 3002 | 498-518 | A-169196 | UACUUGACAA | 3046 | 496-518 |
| | | AUUGUCAAGU | | | | UGUUGGGAAU | | |
| | | A | | | | GAU | | |
| AD-84760 | A-169197 | AAACCUUGAA | 3003 | 1608-1628 | A-169198 | UUUUUUCACU | 3047 | 1606-1628 |
| | | CAGUGAAAAA | | | | GUUCAAGGUU | | |
| | | A | | | | UUA | | |
| AD-84761 | A-169199 | UCAAAAGAUU | 3004 | 118-138 | A-169200 | UUUGGACUUU | 3048 | 116-138 |
| | | CAAAGUCCAA | | | | GAAUCUUUUG | | |
| | | A | | | | AGA | | |
| AD-84762 | A-169203 | ACAUCUUCAA | 3005 | 482-502 | A-169204 | UAAUGAUGAA | 3049 | 480-502 |
| | | GUUCAUCAUU | | | | CUUGAAGAUG | | |
| | | A | | | | UUC | | |
| AD-84763 | A-169205 | CAGCUGAUUG | 3006 | 157-177 | A-169206 | AAGAAGAUUC | 3050 | 155-177 |
| | | UGAAUCUUCU | | | | ACAAUCAGCU | | |
| | | U | | | | GGU | | |
| AD-84764 | A-169207 | CUCAAAAGAU | 3007 | 117-137 | A-169208 | UUGGACUUUG | 3051 | 115-137 |
| | | UCAAAGUCCA | | | | AAUCUUUUGA | | |
| | | A | | | | GAC | | |
| AD-84765 | A-169209 | AAAACCGAGU | 3008 | 602-622 | A-169210 | UACUUCCAAU | 3052 | 600-622 |
| | | AAUUGGAAGU | | | | UACUCGGUUU | | |
| | | A | | | | UUG | | |
| AD-84766 | A-169213 | UGAUGCAUAU | 3009 | 1469-1489 | A-169214 | UUAUGCACAA | 3053 | 1467-1489 |
| | | CUUGUGCAUA | | | | GAUAUGCAUC | | |
| | | A | | | | AUG | | |
| AD-84767 | A-169215 | CCAUCAGUAU | 3010 | 245-265 | A-169216 | UCUUCAUUAA | 3054 | 243-265 |
| | | CUUAAUGAAG | | | | GAUACUGAUG | | |
| | | A | | | | GCA | | |
| AD-84768 | A-169217 | AAUCAGUGGC | 3011 | 585-605 | A-169218 | UUUUUGGGAA | 3055 | 583-605 |
| | | UUUCCCAAAA | | | | AGCCACUGAU | | |
| | | A | | | | UUU | | |
| AD-84769 | A-169219 | UUAAAACACC | 3012 | 353-373 | A-169220 | AGACAAUUUU | 3056 | 351-373 |
| | | AAAAAUUGUC | | | | UGGUGUUUUA | | |
| | | U | | | | AGG | | |
| AD-84770 | A-169221 | CUGAUUGUGA | 3013 | 160-180 | A-169222 | UUUAAGAAGA | 3057 | 158-180 |
| | | AUCUUCUUAA | | | | UUCACAAUCA | | |
| | | A | | | | GCU | | |
| AD-84771 | A-169223 | AUAAAACCUU | 3014 | 1605-1625 | A-169224 | UUUCACUGUU | 3058 | 1603-1625 |
| | | GAACAGUGAA | | | | CAAGGUUUUA | | |
| | | A | | | | UUU | | |
| AD-84772 | A-169225 | AGUGUCAUGC | 3015 | 1592-1612 | A-169226 | UGUUUUAUUU | 3059 | 1590-1612 |
| | | CAAAUAAAAC | | | | GGCAUGACAC | | |
| | | A | | | | UUG | | |
| AD-84773 | A-169227 | ACACCAAAAA | 3016 | 358-378 | A-169228 | UCUGGAGACA | 3060 | 356-378 |
| | | UUGUCUCCAG | | | | AUUUUUGGUG | | |
| | | A | | | | UUU | | |
| AD-84774 | A-169229 | GCAUUGCAAU | 3017 | 1533-1553 | A-169230 | UCUCACAUAA | 3061 | 1531-1553 |
| | | AUUAUGUGAG | | | | UAUUGCAAUG | | |
| | | A | | | | CAC | | |
| AD-84775 | A-169231 | GUCAUGCCAA | 3018 | 1595-1615 | A-169232 | UAAGGUUUUA | 3062 | 1593-1615 |
| | | AUAAAACCUU | | | | UUUGGCAUGA | | |
| | | A | | | | CAC | | |
| AD-84776 | A-169233 | AUAUCUUGUG | 3019 | 1475-1495 | A-169234 | UAACAUUUAU | 3063 | 1473-1495 |
| | | CAUAAAUGUU | | | | GCACAAGAUA | | |
| | | A | | | | UGC | | |
| AD-84777 | A-169235 | AAACACCAAA | 3020 | 356-376 | A-169236 | UGGAGACAAU | 3064 | 354-376 |
| | | AAUUGUCUCC | | | | UUUUGGUGUU | | |
| | | A | | | | UUA | | |
| AD-84778 | A-169237 | UAACCUGGCU | 3021 | 1443-1463 | A-169238 | UUACACACUG | 3065 | 1441-1463 |
| | | CCAGUGUGUA | | | | GAGCCAGGUU | | |
| | | A | | | | AUA | | |
| AD-84779 | A-169239 | UGCAUAUCUU | 3022 | 1472-1492 | A-169240 | UAUUUAUGCA | 3066 | 1470-1492 |
| | | GUGCAUAAAU | | | | CAAGAUAUGC | | |
| | | A | | | | AUC | | |
| AD-84780 | A-169241 | ACAUUGUCAA | 3023 | 506-526 | A-169242 | UUGGACUGUA | 3067 | 504-526 |
| | | GUACAGUCCA | | | | CUUGACAAUG | | |
| | | A | | | | UUG | | |
| AD-84781 | A-169243 | AACCUUGAAC | 3024 | 1609-1629 | A-169244 | UUUUUUUCAC | 3068 | 1607-1629 |
| | | AGUGAAAAAA | | | | UGUUCAAGGU | | |
| | | A | | | | UUU | | |
| AD-84782 | A-169245 | GUGUGCAUUG | 3025 | 1529-1549 | A-169246 | ACAUAAUAUU | 3069 | 1527-1549 |
| | | CAAUAUUAUG | | | | GCAAUGCACA | | |
| | | U | | | | CUA | | |
| AD-84783 | A-169247 | CCAAAAACCG | 3026 | 599-619 | A-169248 | UUCCAAUUAC | 3070 | 597-619 |
| | | AGUAAUUGGA | | | | UCGGUUUUUG | | |
| | | A | | | | GGA | | |
| AD-84784 | A-169249 | CAAAAACCGA | 3027 | 600-620 | A-169250 | UUUCCAAUUA | 3071 | 598-620 |
| | | GUAAUUGGAA | | | | CUCGGUUUUU | | |
| | | A | | | | GGG | | |
| AD-84785 | A-169251 | CCAAGUGGUA | 3028 | 1285-1305 | A-169252 | UACUACACAA | 3072 | 1283-1305 |
| | | CUUGUGUAGU | | | | GUACCACUUG | | |
| | | A | | | | GCA | | |
| AD-84786 | A-169253 | CAGCGAAACG | 3029 | 469-489 | A-169254 | UAAGAUGUUC | 3073 | 467-489 |
| | | UGAACAUCUU | | | | ACGUUUCGCU | | |
| | | A | | | | GGA | | |
| AD-84787 | A-169255 | UGAUUGUGAA | 3030 | 161-181 | A-169256 | UCUUAAGAAG | 3074 | 159-181 |
| | | UCUUCUUAAG | | | | AUUCACAAUC | | |
| | | A | | | | AGC | | |
| AD-84788 | A-169257 | CUUCAAGUUC | 3031 | 486-506 | A-169258 | UUGGGAAUGA | 3075 | 484-506 |
| | | AUCAUUCCCA | | | | UGAACUUGAA | | |
| | | A | | | | GAU | | |
| AD-84789 | A-169259 | GGACCAGCUG | 3032 | 153-173 | A-169260 | AGAUUCACAA | 3076 | 151-173 |
| | | AUUGUGAAUC | | | | UCAGCUGGUC | | |
| | | U | | | | CUU | | |
| AD-84790 | A-169261 | AUGCCAAAUA | 3033 | 1598-1618 | A-169262 | UUUCAAGGUU | 3077 | 1596-1618 |
| | | AAACCUUGAA | | | | UUAUUUGGCA | | |
| | | A | | | | UGA | | |

TABLE 3
MODIFIED MOUSE/RAT CROSS-REACTIVE
LDHA IRNA SEQUENCES

| | Sense | SEQ | Antisense | SEQ | mRNA | SEQ |
|---|---|---|---|---|---|---|
| Duplex | Sequence | ID | Sequence | ID | target | ID |
| Name | 5′ to 3′ | NO | 5′ to 3′ | NO | sequence | NO |
| AD- | asascaccAf | 3078 | usUfsggaGf | 3122 | AAAACACCAA | 3166 |
| 84747 | aAfAfAfuug | | aCfAfauuuU | | AAAUUGUCUC | |
| | ucuccaaL96 | | fuGfguguus | | CAG | |
| | | | usu | | | |
| AD- | asasaccgAf | 3079 | usCfsacuUf | 3123 | AAAAACCGAG | 3167 |
| 84748 | gUfAfAfuug | | cCfAfauuaC | | UAAUUGGAAG | |
| | gaagugaL96 | | fuCfgguuus | | UGG | |
| | | | usu | | | |
| AD- | asasaucaGf | 3080 | usUfsuugGf | 3124 | GAAAAUCAGU | 3168 |
| 84749 | uGfGfCfuuu | | gAfAfagccA | | GGCUUUCCCA | |
| | cccaaaaL96 | | fcUfgauuus | | AAA | |
| | | | usc | | | |
| AD- | uscsccaaCf | 3081 | usUfsguaCf | 3125 | AUUCCCAACA | 3169 |
| 84750 | aUfUfGfuca | | uUfGfacaaU | | UUGUCAAGUA | |
| | aguacaaL96 | | fgUfugggas | | CAG | |
| | | | asu | | | |
| AD- | usgsugccAf | 3082 | usAfsuuaAf | 3126 | CUUGUGCCAU | 3170 |
| 84751 | uCfAfGfuau | | gAfUfacugA | | CAGUAUCUUA | |
| | cuuaauaL96 | | fuGfgcacas | | AUG | |
| | | | asg | | | |
| AD- | asasauugUf | 3083 | asGfsucuUf | 3127 | AAAAAUUGUC | 3171 |
| 84752 | cUfCfCfagc | | uGfCfuggaG | | UCCAGCAAAG | |
| | aaagacuL96 | | faCfaauuus | | ACU | |
| | | | usu | | | |
| AD- | ascscuugAf | 3084 | usUfsuuuUf | 3128 | AAACCUUGAA | 3172 |
| 84753 | aCfAfGfuga | | uUfCfacugU | | CAGUGAAAAA | |
| | aaaaaaaL96 | | fuCfaaggus | | AAA | |
| | | | usu | | | |
| AD- | asasaacaCf | 3085 | usGfsagaCf | 3129 | UUAAAACACC | 3173 |
| 84754 | cAfAfAfaau | | aAfUfuuuuG | | AAAAAUUGUC | |
| | ugucucaL96 | | fgUfguuuus | | UCC | |
| | | | asa | | | |
| AD- | ascscaaaAf | 3086 | usUfsgcuGf | 3130 | ACACCAAAAA | 3174 |
| 84755 | aUfUfGfucu | | gAfGfacaaU | | UUGUCUCCAG | |
| | ccagcaaL96 | | fuUfuuggus | | CAA | |
| | | | gsu | | | |
| AD- | csasaguuCf | 3087 | asUfsguuGf | 3131 | UUCAAGUUCA | 3175 |
| 84756 | aUfCfAfuuc | | gGfAfaugaU | | UCAUUCCCAA | |
| | ccaacauL96 | | fgAfacuugs | | CAU | |
| | | | asa | | | |
| AD- | gscsaauaUf | 3088 | usUfsacaUf | 3132 | UUGCAAUAUU | 3176 |
| 84757 | uAfUfGfuga | | cUfCfacauA | | AUGUGAGAUG | |
| | gauguaaL96 | | faUfauugcs | | UAA | |
| | | | asa | | | |
| AD- | gsuscucaAf | 3089 | usGfsacuUf | 3133 | CGGUCUCAAA | 3177 |
| 84758 | aAfGfAfuuc | | uGfAfaucuU | | AGAUUCAAAG | |
| | aaagucaL96 | | fuUfgagacs | | UCC | |
| | | | csg | | | |
| AD- | csasuuccCf | 3090 | usAfscuuGf | 3134 | AUCAUUCCCA | 3178 |
| 84759 | aAfCfAfuug | | aCfAfauguU | | ACAUUGUCAA | |
| | ucaaguaL96 | | fgGfgaaugs | | GUA | |
| | | | asu | | | |
| AD- | asasaccuUf | 3091 | usUfsuuuUf | 3135 | UAAAACCUUG | 3179 |
| 84760 | gAfAfCfagu | | cAfCfuguuC | | AACAGUGAAA | |
| | gaaaaaaL96 | | faAfgguuus | | AAA | |
| | | | usa | | | |
| AD- | uscsaaaaGf | 3092 | usUfsuggAf | 3136 | UCUCAAAAGA | 3180 |
| 84761 | aUfUfCfaaa | | cUfUfugaaU | | UUCAAAGUCC | |
| | guccaaaL96 | | fcUfuuugas | | AAG | |
| | | | gsa | | | |
| AD- | ascsaucuUf | 3093 | usAfsaugAf | 3137 | GAACAUCUUC | 3181 |
| 84762 | cAfAfGfuuc | | uGfAfacuuG | | AAGUUCAUCA | |
| | aucauuaL96 | | faAfgaugus | | UUC | |
| | | | usc | | | |
| AD- | csasgcugAf | 3094 | asAfsgaaGf | 3138 | ACCAGCUGAU | 3182 |
| 84763 | uUfGfUfgaa | | aUfUfcacaA | | UGUGAAUCUU | |
| | ucuucuuL96 | | fuCfagcugs | | CUU | |
| | | | gsu | | | |
| AD- | csuscaaaAf | 3095 | usUfsggaCf | 3139 | GUCUCAAAAG | 3183 |
| 84764 | gAfUfUfcaa | | uUfUfgaauC | | AUUCAAAGUC | |
| | aguccaaL96 | | fuUfuugags | | CAA | |
| | | | asc | | | |
| AD- | asasaaccGf | 3096 | usAfscuuCf | 3140 | CAAAAACCGA | 3184 |
| 84765 | aGfUfAfauu | | cAfAfuuacU | | GUAAUUGGAA | |
| | ggaaguaL96 | | fcGfguuuus | | GUG | |
| | | | usg | | | |
| AD- | usgsaugcAf | 3097 | usUfsaugCf | 3141 | CAUGAUGCAU | 3185 |
| 84766 | uAfUfCfuug | | aCfAfagauA | | AUCUUGUGCA | |
| | ugcauaaL96 | | fuGfcaucas | | UAA | |
| | | | usg | | | |
| AD- | cscsaucaGf | 3098 | usCfsuucAf | 3142 | UGCCAUCAGU | 3186 |
| 84767 | uAfUfCfuua | | uUfAfagauA | | AUCUUAAUGA | |
| | augaagaL96 | | fcUfgauggs | | AGG | |
| | | | csa | | | |
| AD- | asasucagUf | 3099 | usUfsuuuGf | 3143 | AAAAUCAGUG | 3187 |
| 84768 | gGfCfUfuuc | | gGfAfaagcC | | GCUUUCCCAA | |
| | ccaaaaaL96 | | faCfugauus | | AAA | |
| | | | usu | | | |
| AD- | ususaaaaCf | 3100 | asGfsacaAf | 3144 | CCUUAAAACA | 3188 |
| 84769 | aCfCfAfaaa | | uUfUfuuggU | | CCAAAAAUUG | |
| | auugucuL96 | | fgUfuuuaas | | UCU | |
| | | | gsg | | | |
| AD- | csusgauuGf | 3101 | usUfsuaaGf | 3145 | AGCUGAUUGU | 3189 |
| 84770 | uGfAfAfucu | | aAfGfauucA | | GAAUCUUCUU | |
| | ucuuaaaL96 | | fcAfaucags | | AAG | |
| | | | csu | | | |
| AD- | asusaaaaCf | 3102 | usUfsucaCf | 3146 | AAAUAAAACC | 3190 |
| 84771 | cUfUfGfaac | | uGfUfucaaG | | UUGAACAGUG | |
| | agugaaaL96 | | fgUfuuuaus | | AAA | |
| | | | usu | | | |
| AD- | asgsugucAf | 3103 | usGfsuuuUf | 3147 | CAAGUGUCAU | 3191 |
| 84772 | uGfCfCfaaa | | aUfUfuggcA | | GCCAAAUAAA | |
| | uaaaacaL96 | | fuGfacacus | | ACC | |
| | | | usg | | | |
| AD- | ascsaccaAf | 3104 | usCfsuggAf | 3148 | AAACACCAAA | 3192 |
| 84773 | aAfAfUfugu | | gAfCfaauuU | | AAUUGUCUCC | |
| | cuccagaL96 | | fuUfggugus | | AGC | |
| | | | usu | | | |
| AD- | gscsauugCf | 3105 | usCfsucaCf | 3149 | GUGCAUUGCA | 3193 |
| 84774 | aAfUfAfuua | | aUfAfauauU | | AUAUUAUGUG | |
| | ugugagaL96 | | fgCfaauges | | AGA | |
| | | | asc | | | |
| AD- | gsuscaugCf | 3106 | usAfsaggUf | 3150 | GUGUCAUGCC | 3194 |
| 84775 | cAfAfAfuaa | | uUfUfauuuG | | AAAUAAAACC | |
| | aaccuuaL96 | | fgCfaugacs | | UUG | |
| | | | asc | | | |
| AD- | asusaucuUf | 3107 | usAfsacaUf | 3151 | GCAUAUCUUG | 3195 |
| 84776 | gUfGfCfaua | | uUfAfugcaC | | UGCAUAAAUG | |
| | aauguuaL96 | | faAfgauaus | | UUG | |
| | | | gsc | | | |
| AD- | asasacacCf | 3108 | usGfsgagAf | 3152 | UAAAACACCA | 3196 |
| 84777 | aAfAfAfauu | | cAfAfuuuuU | | AAAAUUGUCU | |
| | gucuccaL96 | | fgGfuguuus | | CCA | |
| | | | usa | | | |
| AD- | usasaccuGf | 3109 | usUfsacaCf | 3153 | UAUAACCUGG | 3197 |
| 84778 | gCfUfCfcag | | aCfUfggagC | | CUCCAGUGUG | |
| | uguguaaL96 | | fcAfgguuas | | UAC | |
| | | | usa | | | |
| AD- | usgscauaUf | 3110 | usAfsuuuAf | 3154 | GAUGCAUAUC | 3198 |
| 84779 | cUfUfGfugc | | uGfCfacaaG | | UUGUGCAUAA | |
| | auaaauaL96 | | faUfaugcas | | AUG | |
| | | | usc | | | |
| AD- | ascsauugUf | 3111 | usUfsggaCf | 3155 | CAACAUUGUC | 3199 |
| 84780 | cAfAfGfuac | | uGfUfacuuG | | AAGUACAGUC | |
| | aguccaaL96 | | faCfaaugus | | CAC | |
| | | | usg | | | |
| AD- | asasccuuGf | 3112 | usUfsuuuUf | 3156 | AAAACCUUGA | 3200 |
| 84781 | aAfCfAfgug | | uCfAfcuguU | | ACAGUGAAAA | |
| | aaaaaaaL96 | | fcAfagguus | | AAA | |
| | | | usu | | | |
| AD- | gsusgugcAf | 3113 | asCfsauaAf | 3157 | UAGUGUGCAU | 3201 |
| 84782 | uUfGfCfaau | | uAfUfugcaA | | UGCAAUAUUA | |
| | auuauguL96 | | fuGfcacacs | | UGU | |
| | | | usa | | | |
| AD- | cscsaaaaAf | 3114 | usUfsccaAf | 3158 | UCCCAAAAAC | 3202 |
| 84783 | cCfGfAfgua | | uUfAfcucgG | | CGAGUAAUUG | |
| | auuggaaL96 | | fuUfuuuggs | | GAA | |
| | | | gsa | | | |
| AD- | csasaaaaCf | 3115 | usUfsuccAf | 3159 | CCCAAAAACC | 3203 |
| 84784 | cGfAfGfuaa | | aUfUfacucG | | GAGUAAUUGG | |
| | uuggaaaL96 | | fgUfuuuugs | | AAG | |
| | | | gsg | | | |
| AD- | cscsaaguGf | 3116 | usAfscuaCf | 3160 | UGCCAAGUGG | 3204 |
| 84785 | gUfAfCfuug | | aCfAfaguaC | | UACUUGUGUA | |
| | uguaguaL96 | | fcAfcuuggs | | GUG | |
| | | | csa | | | |
| AD- | csasgcgaAf | 3117 | usAfsagaUf | 3161 | UCCAGCGAAA | 3205 |
| 84786 | aCfGfUfgaa | | gUfUfcacgU | | CGUGAACAUC | |
| | caucuuaL96 | | fuUfcgcugs | | UUC | |
| | | | gsa | | | |
| AD- | usgsauugUf | 3118 | usCfsuuaAf | 3162 | GCUGAUUGUG | 3206 |
| 84787 | gAfAfUfcuu | | gAfAfgauuC | | AAUCUUCUUA | |
| | cuuaagaL96 | | faCfaaucas | | AGG | |
| | | | gsc | | | |
| AD- | csusucaaGf | 3119 | usUfsgggAf | 3163 | AUCUUCAAGU | 3207 |
| 84788 | uUfCfAfuca | | aUfGfaugaA | | UCAUCAUUCC | |
| | uucccaaL96 | | fcUfugaags | | CAA | |
| | | | asu | | | |
| AD- | gsgsaccaGf | 3120 | asGfsauuCf | 3164 | AAGGACCAGC | 3208 |
| 84789 | cUfGfAfuug | | aCfAfaucaG | | UGAUUGUGAA | |
| | ugaaucuL96 | | fcUfgguccs | | UCU | |
| | | | usu | | | |
| AD- | asusgccaAf | 3121 | usUfsucaAf | 3165 | UCAUGCCAAA | 3209 |
| 84790 | aUfAfAfaac | | gGfUfuuuaU | | UAAAACCUUG | |
| | cuugaaaL96 | | fuUfggcaus | | AAC | |
| | | | gsa | | | |

TABLE 4
UNMODIFIED HUMAN/CYNOMOLGUS CROSS-REACTIVE LDHA IRNA SEQUENCES

| | | | | Position | Anti- | | | Position |
|---|---|---|---|---|---|---|---|---|
| | Sense | Sense | SEQ | in | sense | Antisense | SEQ | in |
| Duplex | Oligo | Sequence | ID | NM_ | Oligo | Sequence | ID | NM_ |
| Name | Name | 5′ to 3′ | NO | 005566.3 | Name | 5′ to 3′ | NO | 005566.3 |
| AD-159469 | A-314810 | UUUAUCUGAU | 3210 | 1347-1367 | A-314811 | UUUAAUCACA | 3396 | 1345-1367 |
| | | CUGUGAUUAA | | | | GAUCAGAUAA | | |
| | | A | | | | AAA | | |
| AD-159607 | A-315086 | ACUGGUUAGU | 3211 | 1489-1509 | A-315087 | AACUAUUUCA | 3397 | 1487-1509 |
| | | GUGAAAUAGU | | | | CACUAACCAG | | |
| | | U | | | | UUG | | |
| AD-159713 | A-315298 | AACAUGCCUA | 3212 | 1615-1635 | A-315299 | AAAUGUUGGA | 3398 | 1613-1635 |
| | | GUCCAACAUU | | | | CUAGGCAUGU | | |
| | | U | | | | UCA | | |
| AD-158504 | A-312881 | CAAGUCCAAU | 3213 | 263-283 | A-312882 | AGAGUUGCCA | 3399 | 261-283 |
| | | AUGGCAACUC | | | | UAUUGGACUU | | |
| | | U | | | | GGA | | |
| AD-159233 | A-314338 | UCCACCAUGA | 3214 | 1092-1112 | A-314339 | AAGACCCUUA | 3400 | 1090-1112 |
| | | UUAAGGGUCU | | | | AUCAUGGUGG | | |
| | | U | | | | AAA | | |
| AD-159411 | A-314694 | UCAUUUCACU | 3215 | 1289-1309 | A-314695 | UUAGCCUAGA | 3401 | 1287-1309 |
| | | GUCUAGGCUA | | | | CAGUGAAAUG | | |
| | | A | | | | AUA | | |
| AD-159462 | A-314796 | UGUCCUUUUU | 3216 | 1340-1360 | A-314797 | ACAGAUCAGA | 3402 | 1338-1360 |
| | | AUCUGAUCUG | | | | UAAAAAGGAC | | |
| | | U | | | | AAC | | |
| AD-159742 | A-315356 | CCAGUGUAUA | 3217 | 1662-1682 | A-315357 | UAUAUUGGAU | 3403 | 1660-1682 |
| | | AAUCCAAUAU | | | | UUAUACACUG | | |
| | | A | | | | GAU | | |
| AD-159863 | A-315598 | UCCAAGUGUU | 3218 | 1791-1811 | A-315599 | UUAGUUGGUA | 3404 | 1789-1811 |
| | | AUACCAACUA | | | | UAACACUUGG | | |
| | | A | | | | AUA | | |
| AD-158626 | A-313124 | GUCAUCGAAG | 3219 | 429-449 | A-313125 | UUUCAAUUUG | 3405 | 427-449 |
| | | ACAAAUUGAA | | | | UCUUCGAUGA | | |
| | | A | | | | CAU | | |
| AD-158687 | A-313246 | GAACACCAAA | 3220 | 490-510 | A-313247 | UAGAGACAAU | 3406 | 488-510 |
| | | GAUUGUCUCU | | | | CUUUGGUGUU | | |
| | | A | | | | CUA | | |
| AD-158688 | A-313248 | AACACCAAAG | 3221 | 491-511 | A-313249 | UCAGAGACAA | 3407 | 489-511 |
| | | AUUGUCUCUG | | | | UCUUUGGUGU | | |
| | | A | | | | UCU | | |
| AD-159458 | A-314788 | AUGUUGUCCU | 3222 | 1336-1356 | A-314789 | AUCAGAUAAA | 3408 | 1334-1356 |
| | | UUUUAUCUGA | | | | AAGGACAACA | | |
| | | U | | | | UGC | | |
| AD-159519 | A-314910 | UCAACUCCUG | 3223 | 1401-1421 | A-314911 | AUUUCUAACU | 3409 | 1399-1421 |
| | | AAGUUAGAAA | | | | UCAGGAGUUG | | |
| | | U | | | | AUG | | |
| AD-159858 | A-315588 | AACUAUCCAA | 3224 | 1786-1806 | A-315589 | UGGUAUAACA | 3410 | 1784-1806 |
| | | GUGUUAUACC | | | | CUUGGAUAGU | | |
| | | A | | | | UGG | | |
| AD-158681 | A-313234 | UCCUUAGAAC | 3225 | 484-504 | A-313235 | UAAUCUUUGG | 3411 | 482-504 |
| | | ACCAAAGAUU | | | | UGUUCUAAGG | | |
| | | A | | | | AAA | | |
| AD-159583 | A-315038 | GGUAUUAAUC | 3226 | 1465-1485 | A-315039 | AGACUACACA | 3412 | 1463-1485 |
| | | UUGUGUAGUC | | | | AGAUUAAUAC | | |
| | | U | | | | CAU | | |
| AD-159700 | A-315272 | GGCUCCUUCA | 3227 | 1602-1622 | A-315273 | UGCAUGUUCA | 3413 | 1600-1622 |
| | | CUGAACAUGC | | | | GUGAAGGAGC | | |
| | | A | | | | CAG | | |
| AD-159807 | A-315486 | UAUCAGUAGU | 3228 | 1728-1748 | A-315487 | UGGUAAUGUA | 3414 | 1726-1748 |
| | | GUACAUUACC | | | | CACUACUGAU | | |
| | | A | | | | AUA | | |
| AD-158673 | A-313218 | CAGCCUUUUC | 3229 | 476-496 | A-313219 | UGUGUUCUAA | 3415 | 474-496 |
| | | CUUAGAACAC | | | | GGAAAAGGCU | | |
| | | A | | | | GCC | | |
| AD-159608 | A-315088 | CUGGUUAGUG | 3230 | 1490-1510 | A-315089 | UAACUAUUUC | 3416 | 1488-1510 |
| | | UGAAAUAGUU | | | | ACACUAACCA | | |
| | | A | | | | GUU | | |
| AD-159803 | A-315478 | ACUAUAUCAG | 3231 | 1724-1744 | A-315479 | AAUGUACACU | 3417 | 1722-1744 |
| | | UAGUGUACAU | | | | ACUGAUAUAG | | |
| | | U | | | | UUC | | |
| AD-159805 | A-315482 | UAUAUCAGUA | 3232 | 1726-1746 | A-315483 | UUAAUGUACA | 3418 | 1724-1746 |
| | | GUGUACAUUA | | | | CUACUGAUAU | | |
| | | A | | | | AGU | | |
| AD-159489 | A-314850 | GUAAUAUUUU | 3233 | 1371-1391 | A-314851 | UAGUCCAUCU | 3419 | 1369-1391 |
| | | AAGAUGGACU | | | | UAAAAUAUUA | | |
| | | A | | | | CUG | | |
| AD-159495 | A-314862 | UUUUAAGAUG | 3234 | 1377-1397 | A-314863 | UUUUCCCAGU | 3420 | 1375-1397 |
| | | GACUGGGAAA | | | | CCAUCUUAAA | | |
| | | A | | | | AUA | | |
| AD-159609 | A-315090 | UGGUUAGUGU | 3235 | 1491-1511 | A-315091 | AGAACUAUUU | 3421 | 1489-1511 |
| | | GAAAUAGUUC | | | | CACACUAACC | | |
| | | U | | | | AGU | | |
| AD-159706 | A-315284 | UUCACUGAAC | 3236 | 1608-1628 | A-315285 | UGACUAGGCA | 3422 | 1606-1628 |
| | | AUGCCUAGUC | | | | UGUUCAGUGA | | |
| | | A | | | | AGG | | |
| AD-159855 | A-315582 | ACCAACUAUC | 3237 | 1783-1803 | A-315583 | UAUAACACUU | 3423 | 1781-1803 |
| | | CAAGUGUUAU | | | | GGAUAGUUGG | | |
| | | A | | | | UUG | | |
| AD-159864 | A-315600 | CCAAGUGUUA | 3238 | 1792-1812 | A-315601 | UUUAGUUGGU | 3424 | 1790-1812 |
| | | UACCAACUAA | | | | AUAACACUUG | | |
| | | A | | | | GAU | | |
| AD-158491 | A-312855 | UUCCUUUUGG | 3239 | 250-270 | A-312856 | UGGACUUGGA | 3425 | 248-270 |
| | | UUCCAAGUCC | | | | ACCAAAAGGA | | |
| | | A | | | | AUC | | |
| AD-158672 | A-313216 | GCAGCCUUUU | 3240 | 475-495 | A-313217 | UUGUUCUAAG | 3426 | 473-495 |
| | | CCUUAGAACA | | | | GAAAAGGCUG | | |
| | | A | | | | CCA | | |
| AD-159488 | A-314848 | AGUAAUAUUU | 3241 | 1370-1390 | A-314849 | AGUCCAUCUU | 3427 | 1368-1390 |
| | | UAAGAUGGAC | | | | AAAAUAUUAC | | |
| | | U | | | | UGC | | |
| AD-159553 | A-314978 | AAAAUCCACA | 3242 | 1435-1455 | A-314979 | UAGGAUAUAG | 3428 | 1433-1455 |
| | | GCUAUAUCCU | | | | CUGUGGAUUU | | |
| | | A | | | | UAC | | |
| AD-159703 | A-315278 | UCCUUCACUG | 3243 | 1605-1625 | A-315279 | UUAGGCAUGU | 3429 | 1603-1625 |
| | | AACAUGCCUA | | | | UCAGUGAAGG | | |
| | | A | | | | AGC | | |
| AD-159708 | A-315288 | CACUGAACAU | 3244 | 1610-1630 | A-315289 | UUGGACUAGG | 3430 | 1608-1630 |
| | | GCCUAGUCCA | | | | CAUGUUCAGU | | |
| | | A | | | | GAA | | |
| AD-159866 | A-315604 | AAGUGUUAUA | 3245 | 1794-1814 | A-315605 | GUUUUAGUUG | 3431 | 1792-1814 |
| | | CCAACUAAAA | | | | GUAUAACACU | | |
| | | C | | | | UGG | | |
| AD-159232 | A-314336 | UUCCACCAUG | 3246 | 1091-1111 | A-314337 | AGACCCUUAA | 3432 | 1089-1111 |
| | | AUUAAGGGUC | | | | UCAUGGUGGA | | |
| | | U | | | | AAC | | |
| AD-159712 | A-315296 | GAACAUGCCU | 3247 | 1614-1634 | A-315297 | AAUGUUGGAC | 3433 | 1612-1634 |
| | | AGUCCAACAU | | | | UAGGCAUGUU | | |
| | | U | | | | CAG | | |
| AD-159808 | A-315488 | AUCAGUAGUG | 3248 | 1729-1749 | A-315489 | AUGGUAAUGU | 3434 | 1727-1749 |
| | | UACAUUACCA | | | | ACACUACUGA | | |
| | | U | | | | UAU | | |
| AD-159862 | A-315596 | AUCCAAGUGU | 3249 | 1790-1810 | A-315597 | UAGUUGGUAU | 3435 | 1788-1810 |
| | | UAUACCAACU | | | | AACACUUGGA | | |
| | | A | | | | UAG | | |
| AD-158503 | A-312879 | CCAAGUCCAA | 3250 | 262-282 | A-312880 | UAGUUGCCAU | 3436 | 260-282 |
| | | UAUGGCAACU | | | | AUUGGACUUG | | |
| | | A | | | | GAA | | |
| AD-159311 | A-314494 | AUCUCAGACC | 3251 | 1170-1190 | A-314495 | UACCUUCACA | 3437 | 1168-1190 |
| | | UUGUGAAGGU | | | | AGGUCUGAGA | | |
| | | A | | | | UUC | | |
| AD-159412 | A-314696 | CAUUUCACUG | 3252 | 1290-1310 | A-314697 | UGUAGCCUAG | 3438 | 1288-1310 |
| | | UCUAGGCUAC | | | | ACAGUGAAAU | | |
| | | A | | | | GAU | | |
| AD-159558 | A-314988 | CCACAGCUAU | 3253 | 1440-1460 | A-314989 | AGCAUCAGGA | 3439 | 1438-1460 |
| | | AUCCUGAUGC | | | | UAUAGCUGUG | | |
| | | U | | | | GAU | | |
| AD-159705 | A-315282 | CUUCACUGAA | 3254 | 1607-1627 | A-315283 | UACUAGGCAU | 3440 | 1605-1627 |
| | | CAUGCCUAGU | | | | GUUCAGUGAA | | |
| | | A | | | | GGA | | |
| AD-159113 | A-314098 | GUGGUUGAGA | 3255 | 972-992 | A-314099 | UUCAUAAGCA | 3441 | 970-992 |
| | | GUGCUUAUGA | | | | CUCUCAACCA | | |
| | | A | | | | CCU | | |
| AD-159139 | A-314150 | CAAACUCAAA | 3256 | 998-1018 | A-314151 | UAUGUGUAGC | 3442 | 996-1018 |
| | | GGCUACACAU | | | | CUUUGAGUUU | | |
| | | A | | | | GAU | | |
| AD-159806 | A-315484 | AUAUCAGUAG | 3257 | 1727-1747 | A-315485 | UGUAAUGUAC | 3443 | 1725-1747 |
| | | UGUACAUUAC | | | | ACUACUGAUA | | |
| | | A | | | | UAG | | |
| AD-159853 | A-315578 | CAACCAACUA | 3258 | 1781-1801 | A-315579 | UAACACUUGG | 3444 | 1779-1801 |
| | | UCCAAGUGUU | | | | AUAGUUGGUU | | |
| | | A | | | | GCA | | |
| AD-158627 | A-313126 | UCAUCGAAGA | 3259 | 430-450 | A-313127 | UCUUCAAUUU | 3445 | 428-450 |
| | | CAAAUUGAAG | | | | GUCUUCGAUG | | |
| | | A | | | | ACA | | |
| AD-159182 | A-314236 | GCAGAUUUGG | 3260 | 1041-1061 | A-314237 | UAUACUCUCU | 3446 | 1039-1061 |
| | | CAGAGAGUAU | | | | GCCAAAUCUG | | |
| | | A | | | | CUA | | |
| AD-159702 | A-315276 | CUCCUUCACU | 3261 | 1604-1624 | A-315277 | UAGGCAUGUU | 3447 | 1602-1624 |
| | | GAACAUGCCU | | | | CAGUGAAGGA | | |
| | | A | | | | GCC | | |
| AD-159715 | A-315302 | CAUGCCUAGU | 3262 | 1617-1637 | A-315303 | AAAAAUGUUG | 3448 | 1615-1637 |
| | | CCAACAUUUU | | | | GACUAGGCAU | | |
| | | U | | | | GUU | | |
| AD-158575 | A-313022 | UGCCAUCAGU | 3263 | 377-397 | A-313023 | UUCAUUAAGA | 3449 | 375-397 |
| | | AUCUUAAUGA | | | | UACUGAUGGC | | |
| | | A | | | | ACA | | |
| AD-158576 | A-313024 | GCCAUCAGUA | 3264 | 378-398 | A-313025 | UUUCAUUAAG | 3450 | 376-398 |
| | | UCUUAAUGAA | | | | AUACUGAUGG | | |
| | | A | | | | CAC | | |
| AD-158684 | A-313240 | UUAGAACACC | 3265 | 487-507 | A-313241 | AGACAAUCUU | 3451 | 485-507 |
| | | AAAGAUUGUC | | | | UGGUGUUCUA | | |
| | | U | | | | AGG | | |
| AD-159410 | A-314692 | AUCAUUUCAC | 3266 | 1288-1308 | A-314693 | UAGCCUAGAC | 3452 | 1286-1308 |
| | | UGUCUAGGCU | | | | AGUGAAAUGA | | |
| | | A | | | | UAU | | |
| AD-159416 | A-314704 | UCACUGUCUA | 3267 | 1294-1314 | A-314705 | UUGUUGUAGC | 3453 | 1292-1314 |
| | | GGCUACAACA | | | | CUAGACAGUG | | |
| | | A | | | | AAA | | |
| AD-159738 | A-315348 | GGAUCCAGUG | 3268 | 1658-1678 | A-315349 | UUGGAUUUAU | 3454 | 1656-1678 |
| | | UAUAAAUCCA | | | | ACACUGGAUC | | |
| | | A | | | | CCA | | |
| AD-159857 | A-315586 | CAACUAUCCA | 3269 | 1785-1805 | A-315587 | UGUAUAACAC | 3455 | 1783-1805 |
| | | AGUGUUAUAC | | | | UUGGAUAGUU | | |
| | | A | | | | GGU | | |
| AD-158497 | A-312867 | UUGGUUCCAA | 3270 | 256-276 | A-312868 | UCAUAUUGGA | 3456 | 254-276 |
| | | GUCCAAUAUG | | | | CUUGGAACCA | | |
| | | A | | | | AAA | | |
| AD-159124 | A-314120 | UGCUUAUGAG | 3271 | 983-1003 | A-314121 | AGUUUGAUCA | 3457 | 981-1003 |
| | | GUGAUCAAAC | | | | CCUCAUAAGC | | |
| | | U | | | | ACU | | |
| AD-159140 | A-314152 | AAACUCAAAG | 3272 | 999-1019 | A-314153 | UGAUGUGUAG | 3458 | 997-1019 |
| | | GCUACACAUC | | | | CCUUUGAGUU | | |
| | | A | | | | UGA | | |
| AD-159312 | A-314496 | UCUCAGACCU | 3273 | 1171-1191 | A-314497 | UCACCUUCAC | 3459 | 1169-1191 |
| | | UGUGAAGGUG | | | | AAGGUCUGAG | | |
| | | A | | | | AUU | | |
| AD-159552 | A-314976 | UAAAAUCCAC | 3274 | 1434-1454 | A-314977 | AGGAUAUAGC | 3460 | 1432-1454 |
| | | AGCUAUAUCC | | | | UGUGGAUUUU | | |
| | | U | | | | ACA | | |
| AD-159704 | A-315280 | CCUUCACUGA | 3275 | 1606-1626 | A-315281 | ACUAGGCAUG | 3461 | 1604-1626 |
| | | ACAUGCCUAG | | | | UUCAGUGAAG | | |
| | | U | | | | GAG | | |
| AD-159737 | A-315346 | GGGAUCCAGU | 3276 | 1657-1677 | A-315347 | UGGAUUUAUA | 3462 | 1655-1677 |
| | | GUAUAAAUCC | | | | CACUGGAUCC | | |
| | | A | | | | CAG | | |
| AD-159869 | A-315610 | CAAUAAACCU | 3277 | 1818-1838 | A-315611 | UUCACUGUUC | 3463 | 1816-1838 |
| | | UGAACAGUGA | | | | AAGGUUUAUU | | |
| | | A | | | | GGG | | |
| AD-158570 | A-313012 | GGCCUGUGCC | 3278 | 371-391 | A-313013 | AAGAUACUGA | 3464 | 369-391 |
| | | AUCAGUAUCU | | | | UGGCACAGGC | | |
| | | U | | | | CAU | | |
| AD-158618 | A-313108 | UUGUUGAUGU | 3279 | 421-441 | A-313109 | UGUCUUCGAU | 3465 | 419-441 |
| | | CAUCGAAGAC | | | | GACAUCAACA | | |
| | | A | | | | AGA | | |
| AD-159788 | A-315448 | GGAUCUUAUU | 3280 | 1708-1728 | A-315449 | AUAGUUCACA | 3466 | 1706-1728 |
| | | UUGUGAACUA | | | | AAAUAAGAUC | | |
| | | U | | | | CUU | | |
| AD-159786 | A-315444 | AAGGAUCUUA | 3281 | 1706-1726 | A-315445 | AGUUCACAAA | 3467 | 1704-1726 |
| | | UUUUGUGAAC | | | | AUAAGAUCCU | | |
| | | U | | | | UUG | | |
| AD-159760 | A-315392 | AUCAUGUCUU | 3282 | 1680-1700 | A-315393 | UAAUUAUGCA | 3468 | 1678-1700 |
| | | GUGCAUAAUU | | | | CAAGACAUGA | | |
| | | A | | | | UAU | | |
| AD-159404 | A-314680 | UGUCAUAUCA | 3283 | 1282-1302 | A-314681 | AGACAGUGAA | 3469 | 1280-1302 |
| | | UUUCACUGUC | | | | AUGAUAUGAC | | |
| | | U | | | | AUC | | |
| AD-159406 | A-314684 | UCAUAUCAUU | 3284 | 1284-1304 | A-314685 | UUAGACAGUG | 3470 | 1282-1304 |
| | | UCACUGUCUA | | | | AAAUGAUAUG | | |
| | | A | | | | ACA | | |
| AD-158536 | A-312944 | AUUUAUAAUC | 3285 | 297-317 | A-312945 | UUCCUUUAGA | 3471 | 295-317 |
| | | UUCUAAAGGA | | | | AGAUUAUAAA | | |
| | | A | | | | UCA | | |
| AD-159545 | A-314962 | UGGUUUGUAA | 3286 | 1427-1447 | A-314963 | AGCUGUGGAU | 3472 | 1425-1447 |
| | | AAUCCACAGC | | | | UUUACAAACC | | |
| | | U | | | | AUU | | |
| AD-159574 | A-315020 | AUGCUGGAUG | 3287 | 1456-1476 | A-315021 | AAGAUUAAUA | 3473 | 1454-1476 |
| | | GUAUUAAUCU | | | | CCAUCCAGCA | | |
| | | U | | | | UCA | | |
| AD-159802 | A-315476 | AACUAUAUCA | 3288 | 1723-1743 | A-315477 | AUGUACACUA | 3474 | 1721-1743 |
| | | GUAGUGUACA | | | | CUGAUAUAGU | | |
| | | U | | | | UCA | | |
| AD-159518 | A-314908 | AUCAACUCCU | 3289 | 1400-1420 | A-314909 | UUUCUAACUU | 3475 | 1398-1420 |
| | | GAAGUUAGAA | | | | CAGGAGUUGA | | |
| | | A | | | | UGU | | |
| AD-159577 | A-315026 | CUGGAUGGUA | 3290 | 1459-1479 | A-315027 | UACAAGAUUA | 3476 | 1457-1479 |
| | | UUAAUCUUGU | | | | AUACCAUCCA | | |
| | | A | | | | GCA | | |
| AD-159409 | A-314690 | UAUCAUUUCA | 3291 | 1287-1307 | A-314691 | AGCCUAGACA | 3477 | 1285-1307 |
| | | CUGUCUAGGC | | | | GUGAAAUGAU | | |
| | | U | | | | AUG | | |
| AD-159551 | A-314974 | GUAAAAUCCA | 3292 | 1433-1453 | A-314975 | UGAUAUAGCU | 3478 | 1431-1453 |
| | | CAGCUAUAUC | | | | GUGGAUUUUA | | |
| | | A | | | | CAA | | |
| AD-159276 | A-314424 | UCCUUAGUGU | 3293 | 1135-1155 | A-314425 | AAAUGCAAGG | 3479 | 1133-1155 |
| | | UCCUUGCAUU | | | | AACACUAAGG | | |
| | | U | | | | AAG | | |
| AD-159407 | A-314686 | CAUAUCAUUU | 3294 | 1285-1305 | A-314687 | UCUAGACAGU | 3480 | 1283-1305 |
| | | CACUGUCUAG | | | | GAAAUGAUAU | | |
| | | A | | | | GAC | | |
| AD-159515 | A-314902 | AACAUCAACU | 3295 | 1397-1417 | A-314903 | UUAACUUCAG | 3481 | 1395-1417 |
| | | CCUGAAGUUA | | | | GAGUUGAUGU | | |
| | | A | | | | UUU | | |
| AD-159570 | A-315012 | CCUGAUGCUG | 3296 | 1452-1472 | A-315013 | UUAAUACCAU | 3482 | 1450-1472 |
| | | GAUGGUAUUA | | | | CCAGCAUCAG | | |
| | | A | | | | GAU | | |
| AD-159849 | A-315570 | AAUGCAACCA | 3297 | 1777-1797 | A-315571 | ACUUGGAUAG | 3483 | 1775-1797 |
| | | ACUAUCCAAG | | | | UUGGUUGCAU | | |
| | | U | | | | UGU | | |
| AD-159252 | A-314376 | UUUACGGAAU | 3298 | 1111-1131 | A-314377 | UAUCAUCCUU | 3484 | 1109-1131 |
| | | AAAGGAUGAU | | | | UAUUCCGUAA | | |
| | | A | | | | AGA | | |
| AD-159275 | A-314422 | UUCCUUAGUG | 3299 | 1134-1154 | A-314423 | AAUGCAAGGA | 3485 | 1132-1154 |
| | | UUCCUUGCAU | | | | ACACUAAGGA | | |
| | | U | | | | AGA | | |
| AD-159848 | A-315568 | CAAUGCAACC | 3300 | 1776-1796 | A-315569 | UUUGGAUAGU | 3486 | 1774-1796 |
| | | AACUAUCCAA | | | | UGGUUGCAUU | | |
| | | A | | | | GUU | | |
| AD-159184 | A-314240 | AGAUUUGGCA | 3301 | 1043-1063 | A-314241 | AUUAUACUCU | 3487 | 1041-1063 |
| | | GAGAGUAUAA | | | | CUGCCAAAUC | | |
| | | U | | | | UGC | | |
| AD-159231 | A-314334 | UUUCCACCAU | 3302 | 1090-1110 | A-314335 | UACCCUUAAU | 3488 | 1088-1110 |
| | | GAUUAAGGGU | | | | CAUGGUGGAA | | |
| | | A | | | | ACU | | |
| AD-159607 | A-315086 | ACUGGUUAGU | 3303 | 1489-1509 | A-315087 | AACUAUUUCA | 3489 | 1487-1509 |
| | | GUGAAAUAGU | | | | CACUAACCAG | | |
| | | U | | | | UUG | | |
| AD-158504 | A-312881 | CAAGUCCAAU | 3304 | 263-283 | A-312882 | AGAGUUGCCA | 3490 | 261-283 |
| | | AUGGCAACUC | | | | UAUUGGACUU | | |
| | | U | | | | GGA | | |
| AD-159233 | A-314338 | UCCACCAUGA | 3305 | 1092-1112 | A-314339 | AAGACCCUUA | 3491 | 1090-1112 |
| | | UUAAGGGUCU | | | | AUCAUGGUGG | | |
| | | U | | | | AAA | | |
| AD-159411 | A-314694 | UCAUUUCACU | 3306 | 1289-1309 | A-314695 | UUAGCCUAGA | 3492 | 1287-1309 |
| | | GUCUAGGCUA | | | | CAGUGAAAUG | | |
| | | A | | | | AUA | | |
| AD-159462 | A-314796 | UGUCCUUUUU | 3307 | 1340-1360 | A-314797 | ACAGAUCAGA | 3493 | 1338-1360 |
| | | AUCUGAUCUG | | | | UAAAAAGGAC | | |
| | | U | | | | AAC | | |
| AD-159742 | A-315356 | CCAGUGUAUA | 3308 | 1662-1682 | A-315357 | UAUAUUGGAU | 3494 | 1660-1682 |
| | | AAUCCAAUAU | | | | UUAUACACUG | | |
| | | A | | | | GAU | | |
| AD-159863 | A-315598 | UCCAAGUGUU | 3309 | 1791-1811 | A-315599 | UUAGUUGGUA | 3495 | 1789-1811 |
| | | AUACCAACUA | | | | UAACACUUGG | | |
| | | A | | | | AUA | | |
| AD-158687 | A-313246 | GAACACCAAA | 3310 | 490-510 | A-313247 | UAGAGACAAU | 3496 | 488-510 |
| | | GAUUGUCUCU | | | | CUUUGGUGUU | | |
| | | A | | | | CUA | | |
| AD-158688 | A-313248 | AACACCAAAG | 3311 | 491-511 | A-313249 | UCAGAGACAA | 3497 | 489-511 |
| | | AUUGUCUCUG | | | | UCUUUGGUGU | | |
| | | A | | | | UCU | | |
| AD-159458 | A-314788 | AUGUUGUCCU | 3312 | 1336-1356 | A-314789 | AUCAGAUAAA | 3498 | 1334-1356 |
| | | UUUUAUCUGA | | | | AAGGACAACA | | |
| | | U | | | | UGC | | |
| AD-159519 | A-314910 | UCAACUCCUG | 3313 | 1401-1421 | A-314911 | AUUUCUAACU | 3499 | 1399-1421 |
| | | AAGUUAGAAA | | | | UCAGGAGUUG | | |
| | | U | | | | AUG | | |
| AD-159858 | A-315588 | AACUAUCCAA | 3314 | 1786-1806 | A-315589 | UGGUAUAACA | 3500 | 1784-1806 |
| | | GUGUUAUACC | | | | CUUGGAUAGU | | |
| | | A | | | | UGG | | |
| AD-159583 | A-315038 | GGUAUUAAUC | 3315 | 1465-1485 | A-315039 | AGACUACACA | 3501 | 1463-1485 |
| | | UUGUGUAGUC | | | | AGAUUAAUAC | | |
| | | U | | | | CAU | | |
| AD-159700 | A-315272 | GGCUCCUUCA | 3316 | 1602-1622 | A-315273 | UGCAUGUUCA | 3502 | 1600-1622 |
| | | CUGAACAUGC | | | | GUGAAGGAGC | | |
| | | A | | | | CAG | | |
| AD-159807 | A-315486 | UAUCAGUAGU | 3317 | 1728-1748 | A-315487 | UGGUAAUGUA | 3503 | 1726-1748 |
| | | GUACAUUACC | | | | CACUACUGAU | | |
| | | A | | | | AUA | | |
| AD-158673 | A-313218 | CAGCCUUUUC | 3318 | 476-496 | A-313219 | UGUGUUCUAA | 3504 | 474-496 |
| | | CUUAGAACAC | | | | GGAAAAGGCU | | |
| | | A | | | | GCC | | |
| AD-159608 | A-315088 | CUGGUUAGUG | 3319 | 1490-1510 | A-315089 | UAACUAUUUC | 3505 | 1488-1510 |
| | | UGAAAUAGUU | | | | ACACUAACCA | | |
| | | A | | | | GUU | | |
| AD-159803 | A-315478 | ACUAUAUCAG | 3320 | 1724-1744 | A-315479 | AAUGUACACU | 3506 | 1722-1744 |
| | | UAGUGUACAU | | | | ACUGAUAUAG | | |
| | | U | | | | UUC | | |
| AD-159805 | A-315482 | UAUAUCAGUA | 3321 | 1726-1746 | A-315483 | UUAAUGUACA | 3507 | 1724-1746 |
| | | GUGUACAUUA | | | | CUACUGAUAU | | |
| | | A | | | | AGU | | |
| AD-159489 | A-314850 | GUAAUAUUUU | 3322 | 1371-1391 | A-314851 | UAGUCCAUCU | 3508 | 1369-1391 |
| | | AAGAUGGACU | | | | UAAAAUAUUA | | |
| | | A | | | | CUG | | |
| AD-159495 | A-314862 | UUUUAAGAUG | 3323 | 1377-1397 | A-314863 | UUUUCCCAGU | 3509 | 1375-1397 |
| | | GACUGGGAAA | | | | CCAUCUUAAA | | |
| | | A | | | | AUA | | |
| AD-159706 | A-315284 | UUCACUGAAC | 3324 | 1608-1628 | A-315285 | UGACUAGGCA | 3510 | 1606-1628 |
| | | AUGCCUAGUC | | | | UGUUCAGUGA | | |
| | | A | | | | AGG | | |
| AD-159855 | A-315582 | ACCAACUAUC | 3325 | 1783-1803 | A-315583 | UAUAACACUU | 3511 | 1781-1803 |
| | | CAAGUGUUAU | | | | GGAUAGUUGG | | |
| | | A | | | | UUG | | |
| AD-159864 | A-315600 | CCAAGUGUUA | 3326 | 1792-1812 | A-315601 | UUUAGUUGGU | 3512 | 1790-1812 |
| | | UACCAACUAA | | | | AUAACACUUG | | |
| | | A | | | | GAU | | |
| AD-159488 | A-314848 | AGUAAUAUUU | 3327 | 1370-1390 | A-314849 | AGUCCAUCUU | 3513 | 1368-1390 |
| | | UAAGAUGGAC | | | | AAAAUAUUAC | | |
| | | U | | | | UGC | | |
| AD-159553 | A-314978 | AAAAUCCACA | 3328 | 1435-1455 | A-314979 | UAGGAUAUAG | 3514 | 1433-1455 |
| | | GCUAUAUCCU | | | | CUGUGGAUUU | | |
| | | A | | | | UAC | | |
| AD-159703 | A-315278 | UCCUUCACUG | 3329 | 1605-1625 | A-315279 | UUAGGCAUGU | 3515 | 1603-1625 |
| | | AACAUGCCUA | | | | UCAGUGAAGG | | |
| | | A | | | | AGC | | |
| AD-159708 | A-315288 | CACUGAACAU | 3330 | 1610-1630 | A-315289 | UUGGACUAGG | 3516 | 1608-1630 |
| | | GCCUAGUCCA | | | | CAUGUUCAGU | | |
| | | A | | | | GAA | | |
| AD-159866 | A-315604 | AAGUGUUAUA | 3331 | 1794-1814 | A-315605 | GUUUUAGUUG | 3517 | 1792-1814 |
| | | CCAACUAAAA | | | | GUAUAACACU | | |
| | | C | | | | UGG | | |
| AD-159232 | A-314336 | UUCCACCAUG | 3332 | 1091-1111 | A-314337 | AGACCCUUAA | 3518 | 1089-1111 |
| | | AUUAAGGGUC | | | | UCAUGGUGGA | | |
| | | U | | | | AAC | | |
| AD-159712 | A-315296 | GAACAUGCCU | 3333 | 1614-1634 | A-315297 | AAUGUUGGAC | 3519 | 1612-1634 |
| | | AGUCCAACAU | | | | UAGGCAUGUU | | |
| | | U | | | | CAG | | |
| AD-159808 | A-315488 | AUCAGUAGUG | 3334 | 1729-1749 | A-315489 | AUGGUAAUGU | 3520 | 1727-1749 |
| | | UACAUUACCA | | | | ACACUACUGA | | |
| | | U | | | | UAU | | |
| AD-159862 | A-315596 | AUCCAAGUGU | 3335 | 1790-1810 | A-315597 | UAGUUGGUAU | 3521 | 1788-1810 |
| | | UAUACCAACU | | | | AACACUUGGA | | |
| | | A | | | | UAG | | |
| AD-158503 | A-312879 | CCAAGUCCAA | 3336 | 262-282 | A-312880 | UAGUUGCCAU | 3522 | 260-282 |
| | | UAUGGCAACU | | | | AUUGGACUUG | | |
| | | A | | | | GAA | | |
| AD-159412 | A-314696 | CAUUUCACUG | 3337 | 1290-1310 | A-314697 | UGUAGCCUAG | 3523 | 1288-1310 |
| | | UCUAGGCUAC | | | | ACAGUGAAAU | | |
| | | A | | | | GAU | | |
| AD-159558 | A-314988 | CCACAGCUAU | 3338 | 1440-1460 | A-314989 | AGCAUCAGGA | 3524 | 1438-1460 |
| | | AUCCUGAUGC | | | | UAUAGCUGUG | | |
| | | U | | | | GAU | | |
| AD-159705 | A-315282 | CUUCACUGAA | 3339 | 1607-1627 | A-315283 | UACUAGGCAU | 3525 | 1605-1627 |
| | | CAUGCCUAGU | | | | GUUCAGUGAA | | |
| | | A | | | | GGA | | |
| AD-159113 | A-314098 | GUGGUUGAGA | 3340 | 972-992 | A-314099 | UUCAUAAGCA | 3526 | 970-992 |
| | | GUGCUUAUGA | | | | CUCUCAACCA | | |
| | | A | | | | CCU | | |
| AD-159806 | A-315484 | AUAUCAGUAG | 3341 | 1727-1747 | A-315485 | UGUAAUGUAC | 3527 | 1725-1747 |
| | | UGUACAUUAC | | | | ACUACUGAUA | | |
| | | A | | | | UAG | | |

| | | | | | | | | |
|---|---|---|---|---|---|---|---|---|
| AD-159853 | A-315578 | CAACCAACUA | 3342 | 1781-1801 | A-315579 | UAACACUUGG | 3528 | 1779-1801 |
| | | UCCAAGUGUU | | | | AUAGUUGGUU | | |
| | | A | | | | GCA | | |

| | | | | | | | | |
|---|---|---|---|---|---|---|---|---|
| AD-159182 | A-314236 | GCAGAUUUGG | 3343 | 1041-1061 | A-314237 | UAUACUCUCU | 3529 | 1039-1061 |
| | | CAGAGAGUAU | | | | GCCAAAUCUG | | |
| | | A | | | | CUA | | |
| AD-159702 | A-315276 | CUCCUUCACU | 3344 | 1604-1624 | A-315277 | UAGGCAUGUU | 3530 | 1602-1624 |
| | | GAACAUGCCU | | | | CAGUGAAGGA | | |
| | | A | | | | GCC | | |
| AD-159715 | A-315302 | CAUGCCUAGU | 3345 | 1617-1637 | A-315303 | AAAAAUGUUG | 3531 | 1615-1637 |
| | | CCAACAUUUU | | | | GACUAGGCAU | | |
| | | U | | | | GUU | | |
| AD-158575 | A-313022 | UGCCAUCAGU | 3346 | 377-397 | A-313023 | UUCAUUAAGA | 3532 | 375-397 |
| | | AUCUUAAUGA | | | | UACUGAUGGC | | |
| | | A | | | | ACA | | |
| AD-158576 | A-313024 | GCCAUCAGUA | 3347 | 378-398 | A-313025 | UUUCAUUAAG | 3533 | 376-398 |
| | | UCUUAAUGAA | | | | AUACUGAUGG | | |
| | | A | | | | CAC | | |
| AD-158684 | A-313240 | UUAGAACACC | 3348 | 487-507 | A-313241 | AGACAAUCUU | 3534 | 485-507 |
| | | AAAGAUUGUC | | | | UGGUGUUCUA | | |
| | | U | | | | AGG | | |
| AD-159410 | A-314692 | AUCAUUUCAC | 3349 | 1288-1308 | A-314693 | UAGCCUAGAC | 3535 | 1286-1308 |
| | | UGUCUAGGCU | | | | AGUGAAAUGA | | |
| | | A | | | | UAU | | |
| AD-159416 | A-314704 | UCACUGUCUA | 3350 | 1294-1314 | A-314705 | UUGUUGUAGC | 3536 | 1292-1314 |
| | | GGCUACAACA | | | | CUAGACAGUG | | |
| | | A | | | | AAA | | |
| AD-159857 | A-315586 | CAACUAUCCA | 3351 | 1785-1805 | A-315587 | UGUAUAACAC | 3537 | 1783-1805 |
| | | AGUGUUAUAC | | | | UUGGAUAGUU | | |
| | | A | | | | GGU | | |
| AD-158497 | A-312867 | UUGGUUCCAA | 3352 | 256-276 | A-312868 | UCAUAUUGGA | 3538 | 254-276 |
| | | GUCCAAUAUG | | | | CUUGGAACCA | | |
| | | A | | | | AAA | | |
| AD-159124 | A-314120 | UGCUUAUGAG | 3353 | 983-1003 | A-314121 | AGUUUGAUCA | 3539 | 981-1003 |
| | | GUGAUCAAAC | | | | CCUCAUAAGC | | |
| | | U | | | | ACU | | |
| AD-159312 | A-314496 | UCUCAGACCU | 3354 | 1171-1191 | A-314497 | UCACCUUCAC | 3540 | 1169-1191 |
| | | UGUGAAGGUG | | | | AAGGUCUGAG | | |
| | | A | | | | AUU | | |
| AD-159552 | A-314976 | UAAAAUCCAC | 3355 | 1434-1454 | A-314977 | AGGAUAUAGC | 3541 | 1432-1454 |
| | | AGCUAUAUCC | | | | UGUGGAUUUU | | |
| | | U | | | | ACA | | |
| AD-159704 | A-315280 | CCUUCACUGA | 3356 | 1606-1626 | A-315281 | ACUAGGCAUG | 3542 | 1604-1626 |
| | | ACAUGCCUAG | | | | UUCAGUGAAG | | |
| | | U | | | | GAG | | |
| AD-159737 | A-315346 | GGGAUCCAGU | 3357 | 1657-1677 | A-315347 | UGGAUUUAUA | 3543 | 1655-1677 |
| | | GUAUAAAUCC | | | | CACUGGAUCC | | |
| | | A | | | | CAG | | |
| AD-159869 | A-315610 | CAAUAAACCU | 3358 | 1818-1838 | A-315611 | UUCACUGUUC | 3544 | 1816-1838 |
| | | UGAACAGUGA | | | | AAGGUUUAUU | | |
| | | A | | | | GGG | | |
| AD-158570 | A-313012 | GGCCUGUGCC | 3359 | 371-391 | A-313013 | AAGAUACUGA | 3545 | 369-391 |
| | | AUCAGUAUCU | | | | UGGCACAGGC | | |
| | | U | | | | CAU | | |
| AD-158618 | A-313108 | UUGUUGAUGU | 3360 | 421-441 | A-313109 | UGUCUUCGAU | 3546 | 419-441 |
| | | CAUCGAAGAC | | | | GACAUCAACA | | |
| | | A | | | | AGA | | |
| AD-159184 | A-314240 | AGAUUUGGCA | 3361 | 1043-1063 | A-314241 | AUUAUACUCU | 3547 | 1041-1063 |
| | | GAGAGUAUAA | | | | CUGCCAAAUC | | |
| | | U | | | | UGC | | |
| AD-159231 | A-314334 | UUUCCACCAU | 3362 | 1090-1110 | A-314335 | UACCCUUAAU | 3548 | 1088-1110 |
| | | GAUUAAGGGU | | | | CAUGGUGGAA | | |
| | | A | | | | ACU | | |
| AD-159423 | A-314718 | CUAGGCUACA | 3363 | 1301-1321 | A-314719 | UAGAAUCCUG | 3549 | 1299-1321 |
| | | ACAGGAUUCU | | | | UUGUAGCCUA | | |
| | | A | | | | GAC | | |
| AD-159446 | A-314764 | UGGAGGUUGU | 3364 | 1324-1344 | A-314765 | UGACAACAUG | 3550 | 1322-1344 |
| | | GCAUGUUGUC | | | | CACAACCUCC | | |
| | | A | | | | ACC | | |
| AD-159701 | A-315274 | GCUCCUUCAC | 3365 | 1603-1623 | A-315275 | AGGCAUGUUC | 3551 | 1601-1623 |
| | | UGAACAUGCC | | | | AGUGAAGGAG | | |
| | | U | | | | CCA | | |
| AD-158494 | A-312861 | CUUUUGGUUC | 3366 | 253-273 | A-312862 | UAUUGGACUU | 3552 | 251-273 |
| | | CAAGUCCAAU | | | | GGAACCAAAA | | |
| | | A | | | | GGA | | |
| AD-158571 | A-313014 | GCCUGUGCCA | 3367 | 372-392 | A-313015 | UAAGAUACUG | 3553 | 370-392 |
| | | UCAGUAUCUU | | | | AUGGCACAGG | | |
| | | A | | | | CCA | | |
| AD-159125 | A-314122 | GCUUAUGAGG | 3368 | 984-1004 | A-314123 | UAGUUUGAUC | 3554 | 982-1004 |
| | | UGAUCAAACU | | | | ACCUCAUAAG | | |
| | | A | | | | CAC | | |
| AD-159126 | A-314124 | CUUAUGAGGU | 3369 | 985-1005 | A-314125 | UGAGUUUGAU | 3555 | 983-1005 |
| | | GAUCAAACUC | | | | CACCUCAUAA | | |
| | | A | | | | GCA | | |
| AD-159287 | A-314446 | CCUUGCAUUU | 3370 | 1146-1166 | A-314447 | AUUCUGUCCC | 3556 | 1144-1166 |
| | | UGGGACAGAA | | | | AAAAUGCAAG | | |
| | | U | | | | GAA | | |
| AD-158499 | A-312871 | GGUUCCAAGU | 3371 | 258-278 | A-312872 | UGCCAUAUUG | 3557 | 256-278 |
| | | CCAAUAUGGC | | | | GACUUGGAAC | | |
| | | A | | | | CAA | | |
| AD-159417 | A-314706 | CACUGUCUAG | 3372 | 1295-1315 | A-314707 | UCUGUUGUAG | 3558 | 1293-1315 |
| | | GCUACAACAG | | | | CCUAGACAGU | | |
| | | A | | | | GAA | | |
| AD-159418 | A-314708 | ACUGUCUAGG | 3373 | 1296-1316 | A-314709 | UCCUGUUGUA | 3559 | 1294-1316 |
| | | CUACAACAGG | | | | GCCUAGACAG | | |
| | | A | | | | UGA | | |
| AD-158550 | A-312972 | AAUAAGAUUA | 3374 | 333-353 | A-312973 | UCCAACAACU | 3560 | 331-353 |
| | | CAGUUGUUGG | | | | GUAAUCUUAU | | |
| | | A | | | | UCU | | |
| AD-159116 | A-314104 | GUUGAGAGUG | 3375 | 975-995 | A-314105 | UACCUCAUAA | 3561 | 973-995 |
| | | CUUAUGAGGU | | | | GCACUCUCAA | | |
| | | A | | | | CCA | | |
| AD-159421 | A-314714 | GUCUAGGCUA | 3376 | 1299-1319 | A-314715 | UAAUCCUGUU | 3562 | 1297-1319 |
| | | CAACAGGAUU | | | | GUAGCCUAGA | | |
| | | A | | | | CAG | | |
| AD-159422 | A-314716 | UCUAGGCUAC | 3377 | 1300-1320 | A-314717 | AGAAUCCUGU | 3563 | 1298-1320 |
| | | AACAGGAUUC | | | | UGUAGCCUAG | | |
| | | U | | | | ACA | | |
| AD-159445 | A-314762 | GUGGAGGUUG | 3378 | 1323-1343 | A-314763 | UACAACAUGC | 3564 | 1321-1343 |
| | | UGCAUGUUGU | | | | ACAACCUCCA | | |
| | | A | | | | CCU | | |
| AD-159130 | A-314132 | UGAGGUGAUC | 3379 | 989-1009 | A-314133 | UCUUUGAGUU | 3565 | 987-1009 |
| | | AAACUCAAAG | | | | UGAUCACCUC | | |
| | | A | | | | AUA | | |
| AD-159134 | A-314140 | GUGAUCAAAC | 3380 | 993-1013 | A-314141 | UUAGCCUUUG | 3566 | 991-1013 |
| | | UCAAAGGCUA | | | | AGUUUGAUCA | | |
| | | A | | | | CCU | | |
| AD-159343 | A-314558 | UGAGGAAGAG | 3381 | 1202-1222 | A-314559 | UUCAAACGGG | 3567 | 1200-1222 |
| | | GCCCGUUUGA | | | | CCUCUUCCUC | | |
| | | A | | | | AGA | | |
| AD-159105 | A-314082 | ACAAGCAGGU | 3382 | 964-984 | A-314083 | UACUCUCAAC | 3568 | 962-984 |
| | | GGUUGAGAGU | | | | CACCUGCUUG | | |
| | | A | | | | UGA | | |
| AD-159183 | A-314238 | CAGAUUUGGC | 3383 | 1042-1062 | A-314239 | UUAUACUCUC | 3569 | 1040-1062 |
| | | AGAGAGUAUA | | | | UGCCAAAUCU | | |
| | | A | | | | GCU | | |
| AD-159123 | A-314118 | GUGCUUAUGA | 3384 | 982-1002 | A-314119 | GUUUGAUCAC | 3570 | 980-1002 |
| | | GGUGAUCAAA | | | | CUCAUAAGCA | | |
| | | C | | | | CUC | | |
| AD-159181 | A-314234 | AGCAGAUUUG | 3385 | 1040-1060 | A-314235 | AUACUCUCUG | 3571 | 1038-1060 |
| | | GCAGAGAGUA | | | | CCAAAUCUGC | | |
| | | U | | | | UAC | | |
| AD-159186 | A-314244 | AUUUGGCAGA | 3386 | 1045-1065 | A-314245 | UCAUUAUACU | 3572 | 1043-1065 |
| | | GAGUAUAAUG | | | | CUCUGCCAAA | | |
| | | A | | | | UCU | | |
| AD-159187 | A-314246 | UUUGGCAGAG | 3387 | 1046-1066 | A-314247 | UUCAUUAUAC | 3573 | 1044-1066 |
| | | AGUAUAAUGA | | | | UCUCUGCCAA | | |
| | | A | | | | AUC | | |
| AD-159288 | A-314448 | CUUGCAUUUU | 3388 | 1147-1167 | A-314449 | UAUUCUGUCC | 3574 | 1145-1167 |
| | | GGGACAGAAU | | | | CAAAAUGCAA | | |
| | | A | | | | GGA | | |
| AD-159306 | A-314484 | AUGGAAUCUC | 3389 | 1165-1185 | A-314485 | UCACAAGGUC | 3575 | 1163-1185 |
| | | AGACCUUGUG | | | | UGAGAUUCCA | | |
| | | A | | | | UUC | | |
| AD-159559 | A-314990 | CACAGCUAUA | 3390 | 1441-1461 | A-314991 | UAGCAUCAGG | 3576 | 1439-1461 |
| | | UCCUGAUGCU | | | | AUAUAGCUGU | | |
| | | A | | | | GGA | | |
| AD-159344 | A-314560 | GAGGAAGAGG | 3391 | 1203-1223 | A-314561 | UUUCAAACGG | 3577 | 1201-1223 |
| | | CCCGUUUGAA | | | | GCCUCUUCCU | | |
| | | A | | | | CAG | | |
| AD-159341 | A-314554 | UCUGAGGAAG | 3392 | 1200-1220 | A-314555 | UAAACGGGCC | 3578 | 1198-1220 |
| | | AGGCCCGUUU | | | | UCUUCCUCAG | | |
| | | A | | | | AAG | | |
| AD-159729 | A-315330 | CACAUCCUGG | 3393 | 1649-1669 | A-315331 | UACACUGGAU | 3579 | 1647-1669 |
| | | GAUCCAGUGU | | | | CCCAGGAUGU | | |
| | | A | | | | GAC | | |
| AD-158674 | A-313220 | AGCCUUUUCC | 3394 | 477-497 | A-313221 | UGGUGUUCUA | 3580 | 475-497 |
| | | UUAGAACACC | | | | AGGAAAAGGC | | |
| | | A | | | | UGC | | |
| AD-159604 | A-315080 | UCAACUGGUU | 3395 | 1486-1506 | A-315081 | UAUUUCACAC | 3581 | 1484-1506 |
| | | AGUGUGAAAU | | | | UAACCAGUUG | | |
| | | A | | | | AAG | | |

TABLE 5
MODIFIED HUMAN/CYNOMOLGUS CROSS-REACTIVE
LDHA IRNA SEQUENCES

| | Sense | SEQ | Antisense | SEQ | mRNA | SEQ |
|---|---|---|---|---|---|---|
| Duplex | Sequence | ID | Sequence | ID | target | ID |
| Name | 5′ to 3′ | NO | 5′ to 3′ | NO | sequence | NO |
| AD- | ususuaucUf | 3582 | usUfsuaaUf | 3768 | UUUUUAUCUG | 3954 |
| 159469 | gAfUfCfugu | | cAfCfagauC | | AUCUGUGAUU | |
| | gauuaaaL96 | | faGfauaaas | | AAA | |
| | | | asa | | | |
| AD- | ascsugguUf | 3583 | asAfscuaUf | 3769 | CAACUGGUUA | 3955 |
| 159607 | aGfUfGfuga | | uUfCfacacU | | GUGUGAAAUA | |
| | aauaguuL96 | | faAfccagus | | GUU | |
| | | | usg | | | |
| AD- | asascaugCf | 3584 | asAfsaugUf | 3770 | UGAACAUGCC | 3956 |
| 159713 | cUfAfGfucc | | uGfGfacuaG | | UAGUCCAACA | |
| | aacauuuL96 | | fgCfauguus | | UUU | |
| | | | csa | | | |
| AD- | csasagucCf | 3585 | asGfsaguUf | 3771 | UCCAAGUCCA | 3957 |
| 158504 | aAfUfAfugg | | gCfCfauauU | | AUAUGGCAAC | |
| | caacucuL96 | | fgGfacuugs | | UCU | |
| | | | gsa | | | |
| AD- | uscscaccAf | 3586 | asAfsgacCf | 3772 | UUUCCACCAU | 3958 |
| 159233 | uGfAfUfuaa | | cUfUfaaucA | | GAUUAAGGGU | |
| | gggucuuL96 | | fuGfguggas | | CUU | |
| | | | asa | | | |
| AD- | uscsauuuCf | 3587 | usUfsagcCf | 3773 | UAUCAUUUCA | 3959 |
| 159411 | aCfUfGfucu | | uAfGfacagU | | CUGUCUAGGC | |
| | aggcuaaL96 | | fgAfaaugas | | UAC | |
| | | | usa | | | |
| AD- | usgsuccuUf | 3588 | asCfsagaUf | 3774 | GUUGUCCUUU | 3960 |
| 159462 | uUfUfAfucu | | cAfGfauaaA | | UUAUCUGAUC | |
| | gaucuguL96 | | faAfggacas | | UGU | |
| | | | asc | | | |
| AD- | cscsagugUf | 3589 | usAfsuauUf | 3775 | AUCCAGUGUA | 3961 |
| 159742 | aUfAfAfauc | | gGfAfuuuaU | | UAAAUCCAAU | |
| | caauauaL96 | | faCfacuggs | | AUC | |
| | | | asu | | | |
| AD- | uscscaagUf | 3590 | usUfsaguUf | 3776 | UAUCCAAGUG | 3962 |
| 159863 | gUfUfAfuac | | gGfUfauaaC | | UUAUACCAAC | |
| | caacuaaL96 | | faCfuuggas | | UAA | |
| | | | usa | | | |
| AD- | gsuscaucGf | 3591 | usUfsucaAf | 3777 | AUGUCAUCGA | 3963 |
| 158626 | aAfGfAfcaa | | uUfUfgucuU | | AGACAAAUUG | |
| | auugaaaL96 | | fcGfaugacs | | AAG | |
| | | | asu | | | |
| AD- | gsasacacCf | 3592 | usAfsgagAf | 3778 | UAGAACACCA | 3964 |
| 158687 | aAfAfGfauu | | cAfAfucuuU | | AAGAUUGUCU | |
| | gucucuaL96 | | fgGfuguucs | | CUG | |
| | | | usa | | | |
| AD- | asascaccAf | 3593 | usCfsagaGf | 3779 | AGAACACCAA | 3965 |
| 158688 | aAfGfAfuug | | aCfAfaucuU | | AGAUUGUCUC | |
| | ucucugaL96 | | fuGfguguus | | UGG | |
| | | | csu | | | |
| AD- | asusguugUf | 3594 | asUfscagAf | 3780 | GCAUGUUGUC | 3966 |
| 159458 | cCfUfUfuuu | | uAfAfaaagG | | CUUUUUAUCU | |
| | aucugauL96 | | faCfaacaus | | GAU | |
| | | | gsc | | | |
| AD- | uscsaacuCf | 3595 | asUfsuucUf | 3781 | CAUCAACUCC | 3967 |
| 159519 | cUfGfAfagu | | aAfCfuucaG | | UGAAGUUAGA | |
| | uagaaauL96 | | fgAfguugas | | AAU | |
| | | | usg | | | |
| AD- | asascuauCf | 3596 | usGfsguaUf | 3782 | CCAACUAUCC | 3968 |
| 159858 | cAfAfGfugu | | aAfCfacuuG | | AAGUGUUAUA | |
| | uauaccaL96 | | fgAfuaguus | | CCA | |
| | | | gsg | | | |
| AD- | uscscuuaGf | 3597 | usAfsaucUf | 3783 | UUUCCUUAGA | 3969 |
| 158681 | aAfCfAfcca | | uUfGfguguU | | ACACCAAAGA | |
| | aagauuaL96 | | fcUfaaggas | | UUG | |
| | | | asa | | | |
| AD- | gsgsuauuAf | 3598 | asGfsacuAf | 3784 | AUGGUAUUAA | 3970 |
| 159583 | aUfCfUfugu | | cAfCfaagaU | | UCUUGUGUAG | |
| | guagucuL96 | | fuAfauaccs | | UCU | |
| | | | asu | | | |
| AD- | gsgscuccUf | 3599 | usGfscauGf | 3785 | CUGGCUCCUU | 3971 |
| 159700 | uCfAfCfuga | | uUfCfagugA | | CACUGAACAU | |
| | acaugcaL96 | | faGfgagccs | | GCC | |
| | | | asg | | | |
| AD- | usasucagUf | 3600 | usGfsguaAf | 3786 | UAUAUCAGUA | 3972 |
| 159807 | aGfUfGfuac | | uGfUfacacU | | GUGUACAUUA | |
| | auuaccaL96 | | faCfugauas | | CCA | |
| | | | usa | | | |
| AD- | csasgccuUf | 3601 | usGfsuguUf | 3787 | GGCAGCCUUU | 3973 |
| 158673 | uUfCfCfuua | | cUfAfaggaA | | UCCUUAGAAC | |
| | gaacacaL96 | | faAfggcugs | | ACC | |
| | | | csc | | | |
| AD- | csusgguuAf | 3602 | usAfsacuAf | 3788 | AACUGGUUAG | 3974 |
| 159608 | gUfGfUfgaa | | uUfUfcacaC | | UGUGAAAUAG | |
| | auaguuaL96 | | fuAfaccags | | UUC | |
| | | | usu | | | |
| AD- | ascsuauaUf | 3603 | asAfsuguAf | 3789 | GAACUAUAUC | 3975 |
| 159803 | cAfGfUfagu | | cAfCfuacuG | | AGUAGUGUAC | |
| | guacauuL96 | | faUfauagus | | AUU | |
| | | | usc | | | |
| AD- | usasuaucAf | 3604 | usUfsaauGf | 3790 | ACUAUAUCAG | 3976 |
| 159805 | gUfAfGfugu | | uAfCfacuaC | | UAGUGUACAU | |
| | acauuaaL96 | | fuGfauauas | | UAC | |
| | | | gsu | | | |
| AD- | gsusaauaUf | 3605 | usAfsgucCf | 3791 | CAGUAAUAUU | 3977 |
| 159489 | uUfUfAfaga | | aUfCfuuaaA | | UUAAGAUGGA | |
| | uggacuaL96 | | faUfauuacs | | CUG | |
| | | | usg | | | |
| AD- | ususuuaaGf | 3606 | usUfsuucCf | 3792 | UAUUUUAAGA | 3978 |
| 159495 | aUfGfGfacu | | cAfGfuccaU | | UGGACUGGGA | |
| | gggaaaaL96 | | fcUfuaaaas | | AAA | |
| | | | usa | | | |
| AD- | usgsguuaGf | 3607 | asGfsaacUf | 3793 | ACUGGUUAGU | 3979 |
| 159609 | uGfUfGfaaa | | aUfUfucacA | | GUGAAAUAGU | |
| | uaguucuL96 | | fcUfaaccas | | UCU | |
| | | | gsu | | | |
| AD- | ususcacuGf | 3608 | usGfsacuAf | 3794 | CCUUCACUGA | 3980 |
| 159706 | aAfCfAfugc | | gGfCfauguU | | ACAUGCCUAG | |
| | cuagucaL96 | | fcAfgugaas | | UCC | |
| | | | gsg | | | |
| AD- | ascscaacUf | 3609 | usAfsuaaCf | 3795 | CAACCAACUA | 3981 |
| 159855 | aUfCfCfaag | | aCfUfuggaU | | UCCAAGUGUU | |
| | uguuauaL96 | | faGfuuggus | | AUA | |
| | | | usg | | | |
| AD- | cscsaaguGf | 3610 | usUfsuagUf | 3796 | AUCCAAGUGU | 3982 |
| 159864 | uUfAfUfacc | | uGfGfuauaA | | UAUACCAACU | |
| | aacuaaaL96 | | fcAfcuuggs | | AAA | |
| | | | asu | | | |
| AD- | ususccuuUf | 3611 | usGfsgacUf | 3797 | GAUUCCUUUU | 3983 |
| 158491 | uGfGfUfucc | | uGfGfaaccA | | GGUUCCAAGU | |
| | aaguccaL96 | | faAfaggaas | | CCA | |
| | | | usc | | | |
| AD- | gscsagccUf | 3612 | usUfsguuCf | 3798 | UGGCAGCCUU | 3984 |
| 158672 | uUfUfCfcuu | | uAfAfggaaA | | UUCCUUAGAA | |
| | agaacaaL96 | | faGfgcugcs | | CAC | |
| | | | csa | | | |
| AD- | asgsuaauAf | 3613 | asGfsuccAf | 3799 | GCAGUAAUAU | 3985 |
| 159488 | uUfUfUfaag | | uCfUfuaaaA | | UUUAAGAUGG | |
| | auggacuL96 | | fuAfuuacus | | ACU | |
| | | | gsc | | | |
| AD- | asasaaucCf | 3614 | usAfsggaUf | 3800 | GUAAAAUCCA | 3986 |
| 159553 | aCfAfGfcua | | aUfAfgcugU | | CAGCUAUAUC | |
| | uauccuaL96 | | fgGfauuuus | | CUG | |
| | | | asc | | | |
| AD- | uscscuucAf | 3615 | usUfsaggCf | 3801 | GCUCCUUCAC | 3987 |
| 159703 | cUfGfAfaca | | aUfGfuucaG | | UGAACAUGCC | |
| | ugccuaaL96 | | fuGfaaggas | | UAG | |
| | | | gsc | | | |
| AD- | csascugaAf | 3616 | usUfsggaCf | 3802 | UUCACUGAAC | 3988 |
| 159708 | cAfUfGfccu | | uAfGfgcauG | | AUGCCUAGUC | |
| | aguccaaL96 | | fuUfcagugs | | CAA | |
| | | | asa | | | |
| AD- | asasguguUf | 3617 | gsUfsuuuAf | 3803 | CCAAGUGUUA | 3989 |
| 159866 | aUfAfCfcaa | | gUfUfgguaU | | UACCAACUAA | |
| | cuaaaacL96 | | faAfcacuus | | AAC | |
| | | | gsg | | | |
| AD- | ususccacCf | 3618 | asGfsaccCf | 3804 | GUUUCCACCA | 3990 |
| 159232 | aUfGfAfuua | | uUfAfaucaU | | UGAUUAAGGG | |
| | agggucuL96 | | fgGfuggaas | | UCU | |
| | | | asc | | | |
| AD- | gsasacauGf | 3619 | asAfsuguUf | 3805 | CUGAACAUGC | 3991 |
| 159712 | cCfUfAfguc | | gGfAfcuagG | | CUAGUCCAAC | |
| | caacauuL96 | | fcAfuguucs | | AUU | |
| | | | asg | | | |
| AD- | asuscaguAf | 3620 | asUfsgguAf | 3806 | AUAUCAGUAG | 3992 |
| 159808 | gUfGfUfaca | | aUfGfuacaC | | UGUACAUUAC | |
| | uuaccauL96 | | fuAfcugaus | | CAU | |
| | | | asu | | | |
| AD- | asusccaaGf | 3621 | usAfsguuGf | 3807 | CUAUCCAAGU | 3993 |
| 159862 | uGfUfUfaua | | gUfAfuaacA | | GUUAUACCAA | |
| | ccaacuaL96 | | fcUfuggaus | | CUA | |
| | | | asg | | | |
| AD- | cscsaaguCf | 3622 | usAfsguuGf | 3808 | UUCCAAGUCC | 3994 |
| 158503 | cAfAfUfaug | | cCfAfuauuG | | AAUAUGGCAA | |
| | gcaacuaL96 | | fgAfcuuggs | | CUC | |
| | | | asa | | | |
| AD- | asuscucaGf | 3623 | usAfsccuUf | 3809 | GAAUCUCAGA | 3995 |
| 159311 | aCfCfUfugu | | cAfCfaaggU | | CCUUGUGAAG | |
| | gaagguaL96 | | fcUfgagaus | | GUG | |
| | | | usc | | | |
| AD- | csasuuucAf | 3624 | usGfsuagCf | 3810 | AUCAUUUCAC | 3996 |
| 159412 | cUfGfUfcua | | cUfAfgacaG | | UGUCUAGGCU | |
| | ggcuacaL96 | | fuGfaaaugs | | ACA | |
| | | | asu | | | |
| AD- | cscsacagCf | 3625 | asGfscauCf | 3811 | AUCCACAGCU | 3997 |
| 159558 | uAfUfAfucc | | aGfGfauauA | | AUAUCCUGAU | |
| | ugaugcuL96 | | fgCfuguggs | | GCU | |
| | | | asu | | | |
| AD- | csusucacUf | 3626 | usAfscuaGf | 3812 | UCCUUCACUG | 3998 |
| 159705 | gAfAfCfaug | | gCfAfuguuC | | AACAUGCCUA | |
| | ccuaguaL96 | | faGfugaags | | GUC | |
| | | | gsa | | | |
| AD- | gsusgguuGf | 3627 | usUfscauAf | 3813 | AGGUGGUUGA | 3999 |
| 159113 | aGfAfGfugc | | aGfCfacucU | | GAGUGCUUAU | |
| | uuaugaaL96 | | fcAfaccacs | | GAG | |
| | | | csu | | | |
| | csasaacuCf | 3628 | usAfsuguGf | 3814 | AUCAAACUCA | 4000 |
| AD- | aAfAfGfgcu | | uAfGfccuuU | | AAGGCUACAC | |
| 159139 | acacauaL96 | | fgAfguuugs | | AUC | |
| | | | asu | | | |
| AD- | asusaucaGf | 3629 | usGfsuaaUf | 3815 | CUAUAUCAGU | 4001 |
| 159806 | uAfGfUfgua | | gUfAfcacuA | | AGUGUACAUU | |
| | cauuacaL96 | | fcUfgauaus | | ACC | |
| | | | asg | | | |
| AD- | csasaccaAf | 3630 | usAfsacaCf | 3816 | UGCAACCAAC | 4002 |
| 159853 | cUfAfUfcca | | uUfGfgauaG | | UAUCCAAGUG | |
| | aguguuaL96 | | fuUfgguugs | | UUA | |
| | | | csa | | | |
| AD- | uscsaucgAf | 3631 | usCfsuucAf | 3817 | UGUCAUCGAA | 4003 |
| 158627 | aGfAfCfaaa | | aUfUfugucU | | GACAAAUUGA | |
| | uugaagaL96 | | fuCfgaugas | | AGG | |
| | | | csa | | | |
| AD- | gscsagauUf | 3632 | usAfsuacUf | 3818 | UAGCAGAUUU | 4004 |
| 159182 | uGfGfCfaga | | cUfCfugccA | | GGCAGAGAGU | |
| | gaguauaL96 | | faAfucugcs | | AUA | |
| | | | usa | | | |
| AD- | csusccuuCf | 3633 | usAfsggcAf | 3819 | GGCUCCUUCA | 4005 |
| 159702 | aCfUfGfaac | | uGfUfucagU | | CUGAACAUGC | |
| | augccuaL96 | | fgAfaggags | | CUA | |
| | | | csc | | | |
| AD- | csasugccUf | 3634 | asAfsaaaUf | 3820 | AACAUGCCUA | 4006 |
| 159715 | aGfUfCfcaa | | gUfUfggacU | | GUCCAACAUU | |
| | cauuuuuL96 | | faGfgcaugs | | UUU | |
| | | | usu | | | |
| AD- | usgsccauCf | 3635 | usUfscauUf | 3821 | UGUGCCAUCA | 4007 |
| 158575 | aGfUfAfucu | | aAfGfauacU | | GUAUCUUAAU | |
| | uaaugaaL96 | | fgAfuggcas | | GAA | |
| | | | csa | | | |
| AD- | gscscaucAf | 3636 | usUfsucaUf | 3822 | GUGCCAUCAG | 4008 |
| 158576 | gUfAfUfcuu | | uAfAfgauaC | | UAUCUUAAUG | |
| | aaugaaaL96 | | fuGfauggcs | | AAG | |
| | | | asc | | | |
| AD- | ususagaaCf | 3637 | asGfsacaAf | 3823 | CCUUAGAACA | 4009 |
| 158684 | aCfCfAfaag | | uCfUfuuggU | | CCAAAGAUUG | |
| | auugucuL96 | | fgUfucuaas | | UCU | |
| | | | gsg | | | |
| AD- | asuscauuUf | 3638 | usAfsgccUf | 3824 | AUAUCAUUUC | 4010 |
| 159410 | cAfCfUfguc | | aGfAfcaguG | | ACUGUCUAGG | |
| | uaggcuaL96 | | faAfaugaus | | CUA | |
| | | | asu | | | |
| AD- | uscsacugUf | 3639 | usUfsguuGf | 3825 | UUUCACUGUC | 4011 |
| 159416 | cUfAfGfgcu | | uAfGfccuaG | | UAGGCUACAA | |
| | acaacaaL96 | | faCfagugas | | CAG | |
| | | | asa | | | |
| AD- | gsgsauccAf | 3640 | usUfsggaUf | 3826 | UGGGAUCCAG | 4012 |
| 159738 | gUfGfUfaua | | uUfAfuacaC | | UGUAUAAAUC | |
| | aauccaaL96 | | fuGfgauccs | | CAA | |
| | | | csa | | | |
| AD- | csasacuaUf | 3641 | usGfsuauAf | 3827 | ACCAACUAUC | 4013 |
| 159857 | cCfAfAfgug | | aCfAfcuugG | | CAAGUGUUAU | |
| | uuauacaL96 | | faUfaguugs | | ACC | |
| | | | gsu | | | |
| AD- | ususgguuCf | 3642 | usCfsauaUf | 3828 | UUUUGGUUCC | 4014 |
| 158497 | cAfAfGfucc | | uGfGfacuuG | | AAGUCCAAUA | |
| | aauaugaL96 | | fgAfaccaas | | UGG | |
| | | | asa | | | |
| AD- | usgscuuaUf | 3643 | asGfsuuuGf | 3829 | AGUGCUUAUG | 4015 |
| 159124 | gAfGfGfuga | | aUfCfaccuC | | AGGUGAUCAA | |
| | ucaaacuL96 | | faUfaagcas | | ACU | |
| | | | csu | | | |
| AD- | asasacucAf | 3644 | usGfsaugUf | 3830 | UCAAACUCAA | 4016 |
| 159140 | aAfGfGfcua | | gUfAfgccuU | | AGGCUACACA | |
| | cacaucaL96 | | fuGfaguuus | | UCC | |
| | | | gsa | | | |
| AD- | uscsucagAf | 3645 | usCfsaccUf | 3831 | AAUCUCAGAC | 4017 |
| 159312 | cCfUfUfgug | | uCfAfcaagG | | CUUGUGAAGG | |
| | aaggugaL96 | | fuCfugagas | | UGA | |
| | | | usu | | | |
| AD- | usasaaauCf | 3646 | asGfsgauAf | 3832 | UGUAAAAUCC | 4018 |
| 159552 | cAfCfAfgcu | | uAfGfcuguG | | ACAGCUAUAU | |
| | auauccuL96 | | fgAfuuuuas | | CCU | |
| | | | csa | | | |
| AD- | cscsuucaCf | 3647 | asCfsuagGf | 3833 | CUCCUUCACU | 4019 |
| 159704 | uGfAfAfcau | | cAfUfguucA | | GAACAUGCCU | |
| | gccuaguL96 | | fgUfgaaggs | | AGU | |
| | | | asg | | | |
| AD- | gsgsgaucCf | 3648 | usGfsgauUf | 3834 | CUGGGAUCCA | 4020 |
| 159737 | aGfUfGfuau | | uAfUfacacU | | GUGUAUAAAU | |
| | aaauccaL96 | | fgGfaucccs | | CCA | |
| | | | asg | | | |
| AD- | csasauaaAf | 3649 | usUfscacUf | 3835 | CCCAAUAAAC | 4021 |
| 159869 | cCfUfUfgaa | | gUfUfcaagG | | CUUGAACAGU | |
| | cagugaaL96 | | fuUfuauugs | | GAC | |
| | | | gsg | | | |
| AD- | gsgsccugUf | 3650 | asAfsgauAf | 3836 | AUGGCCUGUG | 4022 |
| 158570 | gCfCfAfuca | | cUfGfauggC | | CCAUCAGUAU | |
| | guaucuuL96 | | faCfaggccs | | CUU | |
| | | | asu | | | |
| AD- | ususguugAf | 3651 | usGfsucuUf | 3837 | UCUUGUUGAU | 4023 |
| 158618 | uGfUfCfauc | | cGfAfugacA | | GUCAUCGAAG | |
| | gaagacaL96 | | fuCfaacaas | | ACA | |
| | | | gsa | | | |
| AD- | gsgsaucuUf | 3652 | asUfsaguUf | 3838 | AAGGAUCUUA | 4024 |
| 159788 | aUfUfUfugu | | cAfCfaaaaU | | UUUUGUGAAC | |
| | gaacuauL96 | | faAfgauccs | | UAU | |
| | | | usu | | | |
| AD- | asasggauCf | 3653 | asGfsuucAf | 3839 | CAAAGGAUCU | 4025 |
| 159786 | uUfAfUfuuu | | cAfAfaauaA | | UAUUUUGUGA | |
| | gugaacuL96 | | fgAfuccuus | | ACU | |
| | | | usg | | | |
| AD- | asuscaugUf | 3654 | usAfsauuAf | 3840 | AUAUCAUGUC | 4026 |
| 159760 | cUfUfGfugc | | uGfCfacaaG | | UUGUGCAUAA | |
| | auaauuaL96 | | faCfaugaus | | UUC | |
| | | | asu | | | |
| AD- | usgsucauAf | 3655 | asGfsacaGf | 3841 | GAUGUCAUAU | 4027 |
| 159404 | uCfAfUfuuc | | uGfAfaaugA | | CAUUUCACUG | |
| | acugucuL96 | | fuAfugacas | | UCU | |
| | | | usc | | | |
| AD- | uscsauauCf | 3656 | usUfsagaCf | 3842 | UGUCAUAUCA | 4028 |
| 159406 | aUfUfUfcac | | aGfUfgaaaU | | UUUCACUGUC | |
| | ugucuaaL96 | | fgAfuaugas | | UAG | |
| | | | csa | | | |
| AD- | asusuuauAf | 3657 | usUfsccuUf | 3843 | UGAUUUAUAA | 4029 |
| 158536 | aUfCfUfucu | | uAfGfaagaU | | UCUUCUAAAG | |
| | aaaggaaL96 | | fuAfuaaaus | | GAA | |
| | | | csa | | | |
| AD- | usgsguuuGf | 3658 | asGfscugUf | 3844 | AAUGGUUUGU | 4030 |
| 159545 | uAfAfAfauc | | gGfAfuuuuA | | AAAAUCCACA | |
| | cacagcuL96 | | fcAfaaccas | | GCU | |
| | | | usu | | | |
| AD- | asusgcugGf | 3659 | asAfsgauUf | 3845 | UGAUGCUGGA | 4031 |
| 159574 | aUfGfGfuau | | aAfUfaccaU | | UGGUAUUAAU | |
| | uaaucuuL96 | | fcCfagcaus | | CUU | |
| | | | csa | | | |
| AD- | asascuauAf | 3660 | asUfsguaCf | 3846 | UGAACUAUAU | 4032 |
| 159802 | uCfAfGfuag | | aCfUfacugA | | CAGUAGUGUA | |
| | uguacauL96 | | fuAfuaguus | | CAU | |
| | | | csa | | | |
| AD- | asuscaacUf | 3661 | usUfsucuAf | 3847 | ACAUCAACUC | 4033 |
| 159518 | cCfUfGfaag | | aCfUfucagG | | CUGAAGUUAG | |
| | uuagaaaL96 | | faGfuugaus | | AAA | |
| | | | gsu | | | |
| AD- | csusggauGf | 3662 | usAfscaaGf | 3848 | UGCUGGAUGG | 4034 |
| 159577 | gUfAfUfuaa | | aUfUfaauaC | | UAUUAAUCUU | |
| | ucuuguaL96 | | fcAfuccags | | GUG | |
| | | | csa | | | |
| | usasucauUf | 3663 | asGfsccuAf | 3849 | CAUAUCAUUU | 4035 |
| AD- | uCfAfCfugu | | gAfCfagugA | | CACUGUCUAG | |
| 159409 | cuaggcuL96 | | faAfugauas | | GCU | |
| | | | usg | | | |
| AD- | gsusaaaaUf | 3664 | usGfsauaUf | 3850 | UUGUAAAAUC | 4036 |
| 159551 | cCfAfCfagc | | aGfCfugugG | | CACAGCUAUA | |
| | uauaucaL96 | | faUfuuuacs | | UCC | |
| | | | asa | | | |
| AD- | uscscuuaGf | 3665 | asAfsaugCf | 3851 | CUUCCUUAGU | 4037 |
| 159276 | uGfUfUfccu | | aAfGfgaacA | | GUUCCUUGCA | |
| | ugcauuuL96 | | fcUfaaggas | | UUU | |
| | | | asg | | | |
| AD- | csasuaucAf | 3666 | usCfsuagAf | 3852 | GUCAUAUCAU | 4038 |
| 159407 | uUfUfCfacu | | cAfGfugaaA | | UUCACUGUCU | |
| | gucuagaL96 | | fuGfauaugs | | AGG | |
| | | | asc | | | |
| AD- | asascaucAf | 3667 | usUfsaacUf | 3853 | AAAACAUCAA | 4039 |
| 159515 | aCfUfCfcug | | uCfAfggagU | | CUCCUGAAGU | |
| | aaguuaaL96 | | fuGfauguus | | UAG | |
| | | | usu | | | |
| AD- | cscsugauGf | 3668 | usUfsaauAf | 3854 | AUCCUGAUGC | 4040 |
| 159570 | cUfGfGfaug | | cCfAfuccaG | | UGGAUGGUAU | |
| | guauuaaL96 | | fcAfucaggs | | UAA | |
| | | | asu | | | |
| AD- | asasugcaAf | 3669 | asCfsuugGf | 3855 | ACAAUGCAAC | 4041 |
| 159849 | cCfAfAfcua | | aUfAfguugG | | CAACUAUCCA | |
| | uccaaguL96 | | fuUfgcauus | | AGU | |
| | | | gsu | | | |
| AD- | ususuacgGf | 3670 | usAfsucaUf | 3856 | UCUUUACGGA | 4042 |
| 159252 | aAfUfAfaag | | cCfUfuuauU | | AUAAAGGAUG | |
| | gaugauaL96 | | fcCfguaaas | | AUG | |
| | | | gsa | | | |
| AD- | ususccuuAf | 3671 | asAfsugcAf | 3857 | UCUUCCUUAG | 4043 |
| 159275 | gUfGfUfucc | | aGfGfaacaC | | UGUUCCUUGC | |
| | uugcauuL96 | | fuAfaggaas | | AUU | |
| | | | gsa | | | |
| AD- | csasaugcAf | 3672 | usUfsuggAf | 3858 | AACAAUGCAA | 4044 |
| 159848 | aCfCfAfacu | | uAfGfuuggU | | CCAACUAUCC | |
| | auccaaaL96 | | fuGfcauugs | | AAG | |
| | | | usu | | | |
| AD- | asgsauuuGf | 3673 | asUfsuauAf | 3859 | GCAGAUUUGG | 4045 |
| 159184 | gCfAfGfaga | | cUfCfucugC | | CAGAGAGUAU | |
| | guauaauL96 | | fcAfaaucus | | AAU | |
| | | | gsc | | | |
| AD- | ususuccaCf | 3674 | usAfscccUf | 3860 | AGUUUCCACC | 4046 |
| 159231 | cAfUfGfauu | | uAfAfucauG | | AUGAUUAAGG | |
| | aaggguaL96 | | fgUfggaaas | | GUC | |
| | | | csu | | | |
| AD- | ascsugguUf | 3675 | asAfscuaUf | 3861 | CAACUGGUUA | 4047 |
| 159607 | aGfUfGfuga | | uUfCfacacU | | GUGUGAAAUA | |
| | aauaguuL96 | | faAfccagus | | GUU | |
| | | | usg | | | |
| AD- | csasagucCf | 3676 | asGfsaguUf | 3862 | UCCAAGUCCA | 4048 |
| 158504 | aAfUfAfugg | | gCfCfauauU | | AUAUGGCAAC | |
| | caacucuL96 | | fgGfacuugs | | UCU | |
| | | | gsa | | | |
| AD- | uscscaccAf | 3677 | asAfsgacCf | 3863 | UUUCCACCAU | 4049 |
| 159233 | uGfAfUfuaa | | cUfUfaaucA | | GAUUAAGGGU | |
| | gggucuuL96 | | fuGfguggas | | CUU | |
| | | | asa | | | |
| AD- | uscsauuuCf | 3678 | usUfsagcCf | 3864 | UAUCAUUUCA | 4050 |
| 159411 | aCfUfGfucu | | uAfGfacagU | | CUGUCUAGGC | |
| | aggcuaaL96 | | fgAfaaugas | | UAC | |
| | | | usa | | | |
| AD- | usgsuccuUf | 3679 | asCfsagaUf | 3865 | GUUGUCCUUU | 4051 |
| 159462 | uUfUfAfucu | | cAfGfauaaA | | UUAUCUGAUC | |
| | gaucuguL96 | | faAfggacas | | UGU | |
| | | | asc | | | |
| AD- | cscsagugUf | 3680 | usAfsuauUf | 3866 | AUCCAGUGUA | 4052 |
| 159742 | aUfAfAfauc | | gGfAfuuuaU | | UAAAUCCAAU | |
| | caauauaL96 | | faCfacuggs | | AUC | |
| | | | asu | | | |
| AD- | uscscaagUf | 3681 | usUfsaguUf | 3867 | UAUCCAAGUG | 4053 |
| 159863 | gUfUfAfuac | | gGfUfauaaC | | UUAUACCAAC | |
| | caacuaaL96 | | faCfuuggas | | UAA | |
| | | | usa | | | |
| AD- | gsasacacCf | 3682 | usAfsgagAf | 3868 | UAGAACACCA | 4054 |
| 158687 | aAfAfGfauu | | cAfAfucuuU | | AAGAUUGUCU | |
| | gucucuaL96 | | fgGfuguucs | | CUG | |
| | | | usa | | | |
| AD- | asascaccAf | 3683 | usCfsagaGf | 3869 | AGAACACCAA | 4055 |
| 158688 | aAfGfAfuug | | aCfAfaucuU | | AGAUUGUCUC | |
| | ucucugaL96 | | fuGfguguus | | UGG | |
| | | | csu | | | |
| AD- | asusguugUf | 3684 | asUfscagAf | 3870 | GCAUGUUGUC | 4056 |
| 159458 | cCfUfUfuuu | | uAfAfaaagG | | CUUUUUAUCU | |
| | aucugauL96 | | faCfaacaus | | GAU | |
| | | | gsc | | | |
| AD- | uscsaacuCf | 3685 | asUfsuucUf | 3871 | CAUCAACUCC | 4057 |
| 159519 | cUfGfAfagu | | aAfCfuucaG | | UGAAGUUAGA | |
| | uagaaauL96 | | fgAfguugas | | AAU | |
| | | | usg | | | |
| AD- | asascuauCf | 3686 | usGfsguaUf | 3872 | CCAACUAUCC | 4058 |
| 159858 | cAfAfGfugu | | aAfCfacuuG | | AAGUGUUAUA | |
| | uauaccaL96 | | fgAfuaguus | | CCA | |
| | | | gsg | | | |
| AD- | gsgsuauuAf | 3687 | asGfsacuAf | 3873 | AUGGUAUUAA | 4059 |
| 159583 | aUfCfUfugu | | cAfCfaagaU | | UCUUGUGUAG | |
| | guagucuL96 | | fuAfauaccs | | UCU | |
| | | | asu | | | |
| AD- | gsgscuccUf | 3688 | usGfscauGf | 3874 | CUGGCUCCUU | 4060 |
| 159700 | uCfAfCfuga | | uUfCfagugA | | CACUGAACAU | |
| | acaugcaL96 | | faGfgagccs | | GCC | |
| | | | asg | | | |
| AD- | usasucagUf | 3689 | usGfsguaAf | 3875 | UAUAUCAGUA | 4061 |
| 159807 | aGfUfGfuac | | uGfUfacacU | | GUGUACAUUA | |
| | auuaccaL96 | | faCfugauas | | CCA | |
| | | | usa | | | |
| AD- | csasgccuUf | 3690 | usGfsuguUf | 3876 | GGCAGCCUUU | 4062 |
| 158673 | uUfCfCfuua | | cUfAfaggaA | | UCCUUAGAAC | |
| | gaacacaL96 | | faAfggcugs | | ACC | |
| | | | csc | | | |
| AD- | csusgguuAf | 3691 | usAfsacuAf | 3877 | AACUGGUUAG | 4063 |
| 159608 | gUfGfUfgaa | | uUfUfcacaC | | UGUGAAAUAG | |
| | auaguuaL96 | | fuAfaccags | | UUC | |
| | | | usu | | | |
| AD- | ascsuauaUf | 3692 | asAfsuguAf | 3878 | GAACUAUAUC | 4064 |
| 159803 | cAfGfUfagu | | cAfCfuacuG | | AGUAGUGUAC | |
| | guacauuL96 | | faUfauagus | | AUU | |
| | | | usc | | | |
| AD- | usasuaucAf | 3693 | usUfsaauGf | 3879 | ACUAUAUCAG | 4065 |
| 159805 | gUfAfGfugu | | uAfCfacuaC | | UAGUGUACAU | |
| | acauuaaL96 | | fuGfauauas | | UAC | |
| | | | gsu | | | |
| AD- | gsusaauaUf | 3694 | usAfsgucCf | 3880 | CAGUAAUAUU | 4066 |
| 159489 | uUfUfAfaga | | aUfCfuuaaA | | UUAAGAUGGA | |
| | uggacuaL96 | | faUfauuacs | | CUG | |
| | | | usg | | | |
| AD- | ususuuaaGf | 3695 | usUfsuucCf | 3881 | UAUUUUAAGA | 4067 |
| 159495 | aUfGfGfacu | | cAfGfuccaU | | UGGACUGGGA | |
| | gggaaaaL96 | | fcUfuaaaas | | AAA | |
| | | | usa | | | |
| AD- | ususcacuGf | 3696 | usGfsacuAf | 3882 | CCUUCACUGA | 4068 |
| 159706 | aAfCfAfugc | | gGfCfauguU | | ACAUGCCUAG | |
| | cuagucaL96 | | fcAfgugaas | | UCC | |
| | | | gsg | | | |
| AD- | ascscaacUf | 3697 | usAfsuaaCf | 3883 | CAACCAACUA | 4069 |
| 159855 | aUfCfCfaag | | aCfUfuggaU | | UCCAAGUGUU | |
| | uguuauaL96 | | faGfuuggus | | AUA | |
| | | | usg | | | |
| | cscsaaguGf | 3698 | usUfsuagUf | 3884 | AUCCAAGUGU | 4070 |
| AD- | uUfAfUfacc | | uGfGfuauaA | | UAUACCAACU | |
| 159864 | aacuaaaL96 | | fcAfcuuggs | | AAA | |
| | | | asu | | | |
| AD- | asgsuaauAf | 3699 | asGfsuccAf | 3885 | GCAGUAAUAU | 4071 |
| 159488 | uUfUfUfaag | | uCfUfuaaaA | | UUUAAGAUGG | |
| | auggacuL96 | | fuAfuuacus | | ACU | |
| | | | gsc | | | |
| AD- | asasaaucCf | 3700 | usAfsggaUf | 3886 | GUAAAAUCCA | 4072 |
| 159553 | aCfAfGfcua | | aUfAfgcugU | | CAGCUAUAUC | |
| | uauccuaL96 | | fgGfauuuus | | CUG | |
| | | | asc | | | |
| AD- | uscscuucAf | 3701 | usUfsaggCf | 3887 | GCUCCUUCAC | 4073 |
| 159703 | cUfGfAfaca | | aUfGfuucaG | | UGAACAUGCC | |
| | ugccuaaL96 | | fuGfaaggas | | UAG | |
| | | | gsc | | | |
| AD- | csascugaAf | 3702 | usUfsggaCf | 3888 | UUCACUGAAC | 4074 |
| 159708 | cAfUfGfccu | | uAfGfgcauG | | AUGCCUAGUC | |
| | aguccaaL96 | | fuUfcagugs | | CAA | |
| | | | asa | | | |
| AD- | asasguguUf | 3703 | gsUfsuuuAf | 3889 | CCAAGUGUUA | 4075 |
| 159866 | aUfAfCfcaa | | gUfUfgguaU | | UACCAACUAA | |
| | cuaaaacL96 | | faAfcacuus | | AAC | |
| | | | gsg | | | |
| AD- | ususccacCf | 3704 | asGfsaccCf | 3890 | GUUUCCACCA | 4076 |
| 159232 | aUfGfAfuua | | uUfAfaucaU | | UGAUUAAGGG | |
| | agggucuL96 | | fgGfuggaas | | UCU | |
| | | | asc | | | |
| AD- | gsasacauGf | 3705 | asAfsuguUf | 3891 | CUGAACAUGC | 4077 |
| 159712 | cCfUfAfguc | | gGfAfcuagG | | CUAGUCCAAC | |
| | caacauuL96 | | fcAfuguucs | | AUU | |
| | | | asg | | | |
| AD- | asuscaguAf | 3706 | asUfsgguAf | 3892 | AUAUCAGUAG | 4078 |
| 159808 | gUfGfUfaca | | aUfGfuacaC | | UGUACAUUAC | |
| | uuaccauL96 | | fuAfcugaus | | CAU | |
| | | | asu | | | |
| AD- | asusccaaGf | 3707 | usAfsguuGf | 3893 | CUAUCCAAGU | 4079 |
| 159862 | uGfUfUfaua | | gUfAfuaacA | | GUUAUACCAA | |
| | ccaacuaL96 | | fcUfuggaus | | CUA | |
| | | | asg | | | |
| AD- | cscsaaguCf | 3708 | usAfsguuGf | 3894 | UUCCAAGUCC | 4080 |
| 158503 | cAfAfUfaug | | cCfAfuauuG | | AAUAUGGCAA | |
| | gcaacuaL96 | | fgAfcuuggs | | CUC | |
| | | | asa | | | |
| AD- | csasuuucAf | 3709 | usGfsuagCf | 3895 | AUCAUUUCAC | 4081 |
| 159412 | cUfGfUfcua | | cUfAfgacaG | | UGUCUAGGCU | |
| | ggcuacaL96 | | fuGfaaaugs | | ACA | |
| | | | asu | | | |
| AD- | cscsacagCf | 3710 | asGfscauCf | 3896 | AUCCACAGCU | 4082 |
| 159558 | uAfUfAfucc | | aGfGfauauA | | AUAUCCUGAU | |
| | ugaugcuL96 | | fgCfuguggs | | GCU | |
| | | | asu | | | |
| AD- | csusucacUf | 3711 | usAfscuaGf | 3897 | UCCUUCACUG | 4083 |
| 159705 | gAfAfCfaug | | gCfAfuguuC | | AACAUGCCUA | |
| | ccuaguaL96 | | faGfugaags | | GUC | |
| | | | gsa | | | |
| AD- | gsusgguuGf | 3712 | usUfscauAf | 3898 | AGGUGGUUGA | 4084 |
| 159113 | aGfAfGfugc | | aGfCfacucU | | GAGUGCUUAU | |
| | uuaugaaL96 | | fcAfaccacs | | GAG | |
| | | | csu | | | |
| AD- | asusaucaGf | 3713 | usGfsuaaUf | 3899 | CUAUAUCAGU | 4085 |
| 159806 | uAfGfUfgua | | gUfAfcacuA | | AGUGUACAUU | |
| | cauuacaL96 | | fcUfgauaus | | ACC | |
| | | | asg | | | |
| AD- | csasaccaAf | 3714 | usAfsacaCf | 3900 | UGCAACCAAC | 4086 |
| 159853 | cUfAfUfcca | | uUfGfgauaG | | UAUCCAAGUG | |
| | aguguuaL96 | | fuUfgguugs | | UUA | |
| | | | csa | | | |
| AD- | gscsagauUf | 3715 | usAfsuacUf | 3901 | UAGCAGAUUU | 4087 |
| 159182 | uGfGfCfaga | | cUfCfugccA | | GGCAGAGAGU | |
| | gaguauaL96 | | faAfucugcs | | AUA | |
| | | | usa | | | |
| AD- | csusccuuCf | 3716 | usAfsggcAf | 3902 | GGCUCCUUCA | 4088 |
| 159702 | aCfUfGfaac | | uGfUfucagU | | CUGAACAUGC | |
| | augccuaL96 | | fgAfaggags | | CUA | |
| | | | csc | | | |
| AD- | csasugccUf | 3717 | asAfsaaaUf | 3903 | AACAUGCCUA | 4089 |
| 159715 | aGfUfCfcaa | | gUfUfggacU | | GUCCAACAUU | |
| | cauuuuuL96 | | faGfgcaugs | | UUU | |
| | | | usu | | | |
| AD- | usgsccauCf | 3718 | usUfscauUf | 3904 | UGUGCCAUCA | 4090 |
| 158575 | aGfUfAfucu | | aAfGfauacU | | GUAUCUUAAU | |
| | uaaugaaL96 | | fgAfuggcas | | GAA | |
| | | | csa | | | |
| AD- | gscscaucAf | 3719 | usUfsucaUf | 3905 | GUGCCAUCAG | 4091 |
| 158576 | gUfAfUfcuu | | uAfAfgauaC | | UAUCUUAAUG | |
| | aaugaaaL96 | | fuGfauggcs | | AAG | |
| | | | asc | | | |
| AD- | ususagaaCf | 3720 | asGfsacaAf | 3906 | CCUUAGAACA | 4092 |
| 158684 | aCfCfAfaag | | uCfUfuuggU | | CCAAAGAUUG | |
| | auugucuL96 | | fgUfucuaas | | UCU | |
| | | | gsg | | | |
| AD- | asuscauuUf | 3721 | usAfsgccUf | 3907 | AUAUCAUUUC | 4093 |
| 159410 | cAfCfUfguc | | aGfAfcaguG | | ACUGUCUAGG | |
| | uaggcuaL96 | | faAfaugaus | | CUA | |
| | | | asu | | | |
| AD- | uscsacugUf | 3722 | usUfsguuGf | 3908 | UUUCACUGUC | 4094 |
| 159416 | cUfAfGfgcu | | uAfGfccuaG | | UAGGCUACAA | |
| | acaacaaL96 | | faCfagugas | | CAG | |
| | | | asa | | | |
| AD- | csasacuaUf | 3723 | usGfsuauAf | 3909 | ACCAACUAUC | 4095 |
| 159857 | cCfAfAfgug | | aCfAfcuugG | | CAAGUGUUAU | |
| | uuauacaL96 | | faUfaguugs | | ACC | |
| | | | gsu | | | |
| AD- | ususgguuCf | 3724 | usCfsauaUf | 3910 | UUUUGGUUCC | 4096 |
| 158497 | cAfAfGfucc | | uGfGfacuuG | | AAGUCCAAUA | |
| | aauaugaL96 | | fgAfaccaas | | UGG | |
| | | | asa | | | |
| AD- | usgscuuaUf | 3725 | asGfsuuuGf | 3911 | AGUGCUUAUG | 4097 |
| 159124 | gAfGfGfuga | | aUfCfaccuC | | AGGUGAUCAA | |
| | ucaaacuL96 | | faUfaagcas | | ACU | |
| | | | csu | | | |
| AD- | uscsucagAf | 3726 | usCfsaccUf | 3912 | AAUCUCAGAC | 4098 |
| 159312 | cCfUfUfgug | | uCfAfcaagG | | CUUGUGAAGG | |
| | aaggugaL96 | | fuCfugagas | | UGA | |
| | | | usu | | | |
| AD- | usasaaauCf | 3727 | asGfsgauAf | 3913 | UGUAAAAUCC | 4099 |
| 159552 | cAfCfAfgcu | | uAfGfcuguG | | ACAGCUAUAU | |
| | auauccuL96 | | fgAfuuuuas | | CCU | |
| | | | csa | | | |
| AD- | cscsuucaCf | 3728 | asCfsuagGf | 3914 | CUCCUUCACU | 4100 |
| 159704 | uGfAfAfcau | | cAfUfguucA | | GAACAUGCCU | |
| | gccuaguL96 | | fgUfgaaggs | | AGU | |
| | | | asg | | | |
| AD- | gsgsgaucCf | 3729 | usGfsgauUf | 3915 | CUGGGAUCCA | 4101 |
| 159737 | aGfUfGfuau | | uAfUfacacU | | GUGUAUAAAU | |
| | aaauccaL96 | | fgGfaucccs | | CCA | |
| | | | asg | | | |
| AD- | csasauaaAf | 3730 | usUfscacUf | 3916 | CCCAAUAAAC | 4102 |
| 159869 | cCfUfUfgaa | | gUfUfcaagG | | CUUGAACAGU | |
| | cagugaaL96 | | fuUfuauugs | | GAC | |
| | | | gsg | | | |
| AD- | gsgsccugUf | 3731 | asAfsgauAf | 3917 | AUGGCCUGUG | 4103 |
| 158570 | gCfCfAfuca | | cUfGfauggC | | CCAUCAGUAU | |
| | guaucuuL96 | | faCfaggccs | | CUU | |
| | | | asu | | | |
| AD- | ususguugAf | 3732 | usGfsucuUf | 3918 | UCUUGUUGAU | 4104 |
| 158618 | uGfUfCfauc | | cGfAfugacA | | GUCAUCGAAG | |
| | gaagacaL96 | | fuCfaacaas | | ACA | |
| | | | gsa | | | |
| AD- | asgsauuuGf | 3733 | asUfsuauAf | 3919 | GCAGAUUUGG | 4105 |
| 159184 | gCfAfGfaga | | cUfCfucugC | | CAGAGAGUAU | |
| | guauaauL96 | | fcAfaaucus | | AAU | |
| | | | gsc | | | |
| AD- | ususuccaCf | 3734 | usAfscccUf | 3920 | AGUUUCCACC | 4106 |
| 159231 | cAfUfGfauu | | uAfAfucauG | | AUGAUUAAGG | |
| | aaggguaL96 | | fgUfggaaas | | GUC | |
| | | | csu | | | |
| AD- | csusaggcUf | 3735 | usAfsgaaUf | 3921 | GUCUAGGCUA | 4107 |
| 159423 | aCfAfAfcag | | cCfUfguugU | | CAACAGGAUU | |
| | gauucuaL96 | | faGfccuags | | CUA | |
| | | | asc | | | |
| AD- | usgsgaggUf | 3736 | usGfsacaAf | 3922 | GGUGGAGGUU | 4108 |
| 159446 | uGfUfGfcau | | cAfUfgcacA | | GUGCAUGUUG | |
| | guugucaL96 | | faCfcuccas | | UCC | |
| | | | csc | | | |
| AD- | gscsuccuUf | 3737 | asGfsgcaUf | 3923 | UGGCUCCUUC | 4109 |
| 159701 | cAfCfUfgaa | | gUfUfcaguG | | ACUGAACAUG | |
| | caugccuL96 | | faAfggagcs | | CCU | |
| | | | csa | | | |
| AD- | csusuuugGf | 3738 | usAfsuugGf | 3924 | UCCUUUUGGU | 4110 |
| 158494 | uUfCfCfaag | | aCfUfuggaA | | UCCAAGUCCA | |
| | uccaauaL96 | | fcCfaaaags | | AUA | |
| | | | gsa | | | |
| AD- | gscscuguGf | 3739 | usAfsagaUf | 3925 | UGGCCUGUGC | 4111 |
| 158571 | cCfAfUfcag | | aCfUfgaugG | | CAUCAGUAUC | |
| | uaucuuaL96 | | fcAfcaggcs | | UUA | |
| | | | csa | | | |
| AD- | gscsuuauGf | 3740 | usAfsguuUf | 3926 | GUGCUUAUGA | 4112 |
| 159125 | aGfGfUfgau | | gAfUfcaccU | | GGUGAUCAAA | |
| | caaacuaL96 | | fcAfuaagcs | | CUC | |
| | | | asc | | | |
| AD- | csusuaugAf | 3741 | usGfsaguUf | 3927 | UGCUUAUGAG | 4113 |
| 159126 | gGfUfGfauc | | uGfAfucacC | | GUGAUCAAAC | |
| | aaacucaL96 | | fuCfauaags | | UCA | |
| | | | csa | | | |
| AD- | cscsuugcAf | 3742 | asUfsucuGf | 3928 | UUCCUUGCAU | 4114 |
| 159287 | uUfUfUfggg | | uCfCfcaaaA | | UUUGGGACAG | |
| | acagaauL96 | | fuGfcaaggs | | AAU | |
| | | | asa | | | |
| AD- | gsgsuuccAf | 3743 | usGfsccaUf | 3929 | UUGGUUCCAA | 4115 |
| 158499 | aGfUfCfcaa | | aUfUfggacU | | GUCCAAUAUG | |
| | uauggcaL96 | | fuGfgaaccs | | GCA | |
| | | | asa | | | |
| AD- | csascuguCf | 3744 | usCfsuguUf | 3930 | UUCACUGUCU | 4116 |
| 159417 | uAfGfGfcua | | gUfAfgccuA | | AGGCUACAAC | |
| | caacagaL96 | | fgAfcagugs | | AGG | |
| | | | asa | | | |
| AD- | ascsugucUf | 3745 | usCfscugUf | 3931 | UCACUGUCUA | 4117 |
| 159418 | aGfGfCfuac | | uGfUfagccU | | GGCUACAACA | |
| | aacaggaL96 | | faGfacagus | | GGA | |
| | | | gsa | | | |
| AD- | asasuaagAf | 3746 | usCfscaaCf | 3932 | AGAAUAAGAU | 4118 |
| 158550 | uUfAfCfagu | | aAfCfuguaA | | UACAGUUGUU | |
| | uguuggaL96 | | fuCfuuauus | | GGG | |
| | | | csu | | | |
| AD- | gsusugagAf | 3747 | usAfsccuCf | 3933 | UGGUUGAGAG | 4119 |
| 159116 | gUfGfCfuua | | aUfAfagcaC | | UGCUUAUGAG | |
| | ugagguaL96 | | fuCfucaacs | | GUG | |
| | | | csa | | | |
| AD- | gsuscuagGf | 3748 | usAfsaucCf | 3934 | CUGUCUAGGC | 4120 |
| 159421 | cUfAfCfaac | | uGfUfuguaG | | UACAACAGGA | |
| | aggauuaL96 | | fcCfuagacs | | UUC | |
| | | | asg | | | |
| AD- | uscsuaggCf | 3749 | asGfsaauCf | 3935 | UGUCUAGGCU | 4121 |
| 159422 | uAfCfAfaca | | cUfGfuuguA | | ACAACAGGAU | |
| | ggauucuL96 | | fgCfcuagas | | UCU | |
| | | | csa | | | |
| AD- | gsusggagGf | 3750 | usAfscaaCf | 3936 | AGGUGGAGGU | 4122 |
| 159445 | uUfGfUfgca | | aUfGfcacaA | | UGUGCAUGUU | |
| | uguuguaL96 | | fcCfuccacs | | GUC | |
| | | | csu | | | |
| AD- | usgsagguGf | 3751 | usCfsuuuGf | 3937 | UAUGAGGUGA | 4123 |
| 159130 | aUfCfAfaac | | aGfUfuugaU | | UCAAACUCAA | |
| | ucaaagaL96 | | fcAfccucas | | AGG | |
| | | | usa | | | |
| AD- | gsusgaucAf | 3752 | usUfsagcCf | 3938 | AGGUGAUCAA | 4124 |
| 159134 | aAfCfUfcaa | | uUfUfgaguU | | ACUCAAAGGC | |
| | aggcuaaL96 | | fuGfaucacs | | UAC | |
| | | | csu | | | |
| AD- | usgsaggaAf | 3753 | usUfscaaAf | 3939 | UCUGAGGAAG | 4125 |
| 159343 | gAfGfGfccc | | cGfGfgccuC | | AGGCCCGUUU | |
| | guuugaaL96 | | fuUfccucas | | GAA | |
| | | | gsa | | | |
| AD- | ascsaagcAf | 3754 | usAfscucUf | 3940 | UCACAAGCAG | 4126 |
| 159105 | gGfUfGfguu | | cAfAfccacC | | GUGGUUGAGA | |
| | gagaguaL96 | | fuGfcuugus | | GUG | |
| | | | gsa | | | |
| AD- | csasgauuUf | 3755 | usUfsauaCf | 3941 | AGCAGAUUUG | 4127 |
| 159183 | gGfCfAfgag | | uCfUfcugcC | | GCAGAGAGUA | |
| | aguauaaL96 | | faAfaucugs | | UAA | |
| | | | csu | | | |
| AD- | gsusgcuuAf | 3756 | gsUfsuugAf | 3942 | GAGUGCUUAU | 4128 |
| 159123 | uGfAfGfgug | | uCfAfccucA | | GAGGUGAUCA | |
| | aucaaacL96 | | fuAfagcacs | | AAC | |
| | | | usc | | | |
| AD- | asgscagaUf | 3757 | asUfsacuCf | 3943 | GUAGCAGAUU | 4129 |
| 159181 | uUfGfGfcag | | uCfUfgccaA | | UGGCAGAGAG | |
| | agaguauL96 | | faUfcugcus | | UAU | |
| | | | asc | | | |
| AD- | asusuuggCf | 3758 | usCfsauuAf | 3944 | AGAUUUGGCA | 4130 |
| 159186 | aGfAfGfagu | | uAfCfucucU | | GAGAGUAUAA | |
| | auaaugaL96 | | fgCfcaaaus | | UGA | |
| | | | csu | | | |
| AD- | ususuggcAf | 3759 | usUfscauUf | 3945 | GAUUUGGCAG | 4131 |
| 159187 | gAfGfAfgua | | aUfAfcucuC | | AGAGUAUAAU | |
| | uaaugaaL96 | | fuGfccaaas | | GAA | |
| | | | usc | | | |
| AD- | csusugcaUf | 3760 | usAfsuucUf | 3946 | UCCUUGCAUU | 4132 |
| 159288 | uUfUfGfgga | | gUfCfccaaA | | UUGGGACAGA | |
| | cagaauaL96 | | faUfgcaags | | AUG | |
| | | | gsa | | | |
| AD- | asusggaaUf | 3761 | usCfsacaAf | 3947 | GAAUGGAAUC | 4133 |
| 159306 | cUfCfAfgac | | gGfUfcugaG | | UCAGACCUUG | |
| | cuugugaL96 | | faUfuccaus | | UGA | |
| | | | usc | | | |
| AD- | csascagcUf | 3762 | usAfsgcaUf | 3948 | UCCACAGCUA | 4134 |
| 159559 | aUfAfUfccu | | cAfGfgauaU | | UAUCCUGAUG | |
| | gaugcuaL96 | | faGfcugugs | | CUG | |
| | | | gsa | | | |
| AD- | gsasggaaGf | 3763 | usUfsucaAf | 3949 | CUGAGGAAGA | 4135 |
| 159344 | aGfGfCfccg | | aCfGfggccU | | GGCCCGUUUG | |
| | uuugaaaL96 | | fcUfuccucs | | AAG | |
| | | | asg | | | |
| AD- | uscsugagGf | 3764 | usAfsaacGf | 3950 | CUUCUGAGGA | 4136 |
| 159341 | aAfGfAfggc | | gGfCfcucuU | | AGAGGCCCGU | |
| | ccguuuaL96 | | fcCfucagas | | UUG | |
| | | | asg | | | |
| AD- | csascaucCf | 3765 | usAfscacUf | 3951 | GUCACAUCCU | 4137 |
| 159729 | uGfGfGfauc | | gGfAfucccA | | GGGAUCCAGU | |
| | caguguaL96 | | fgGfaugugs | | GUA | |
| | | | asc | | | |
| AD- | asgsccuuUf | 3766 | usGfsgugUf | 3952 | GCAGCCUUUU | 4138 |
| 158674 | uCfCfUfuag | | uCfUfaaggA | | CCUUAGAACA | |
| | aacaccaL96 | | faAfaggcus | | CCA | |
| | | | gsc | | | |
| AD- | uscsaacuGf | 3767 | usAfsuuuCf | 3953 | CUUCAACUGG | 4139 |
| 159604 | gUfUfAfgug | | aCfAfcuaaC | | UUAGUGUGAA | |
| | ugaaauaL96 | | fcAfguugas | | AUA | |
| | | | asg | | | |

TABLE 6A
Single dose screen in Primary Mouse Hepatocytes

| Duplex Name | 10 nM | STDEV | 0.1 nM | STDEV |
|---|---|---|---|---|
| AD-84747 | 8.1 | 1.8 | 38.6 | 4.1 |
| AD-84748 | 58.2 | 11.9 | 77.0 | 14.5 |
| AD-84749 | 12.0 | 1.6 | 33.7 | 8.3 |
| AD-84750 | 9.9 | 1.4 | 38.1 | 9.7 |
| AD-84751 | 22.7 | 8.0 | 67.2 | 11.8 |
| AD-84752 | 23.6 | 3.5 | 54.5 | 21.7 |
| AD-84753 | 8.2 | 1.4 | 26.2 | 11.4 |
| AD-84754 | 29.7 | 7.3 | 41.7 | 2.9 |
| AD-84755 | 24.5 | 9.3 | 61.7 | 9.9 |
| AD-84756 | 5.2 | 0.8 | 32.8 | 15.6 |
| AD-84757 | 10.4 | 0.5 | 60.5 | 9.0 |
| AD-84758 | 18.7 | 5.8 | 49.9 | 20.9 |
| AD-84759 | 14.9 | 2.7 | 68.2 | 23.8 |
| AD-84760 | 39.2 | 4.8 | 53.3 | 19.5 |
| AD-84761 | 5.3 | 1.3 | 23.5 | 8.0 |
| AD-84762 | 5.4 | 1.0 | 24.4 | 2.5 |
| AD-84763 | 9.4 | 1.9 | 48.3 | 18.5 |
| AD-84764 | 9.3 | 1.5 | 46.8 | 19.3 |
| AD-84765 | 15.8 | 3.3 | 81.1 | 24.6 |
| AD-84766 | 35.6 | 5.9 | 77.6 | 36.9 |
| AD-84767 | 46.1 | 9.5 | 112.5 | 21.9 |
| AD-84768 | 14.4 | 3.2 | 73.2 | 33.0 |
| AD-84769 | 8.3 | 3.6 | 29.9 | 2.7 |
| AD-84770 | 8.1 | 3.1 | 35.0 | 4.8 |
| AD-84771 | 22.3 | 9.5 | 90.9 | 28.2 |
| AD-84772 | 11.4 | 5.4 | 56.4 | 11.3 |
| AD-84773 | 35.6 | 16.7 | 104.8 | 20.3 |
| AD-84774 | 40.5 | 16.0 | 98.4 | 35.0 |
| AD-84775 | 16.0 | 6.2 | 66.6 | 17.2 |
| AD-84776 | 26.6 | 13.9 | 82.9 | 26.3 |
| AD-84777 | 18.1 | 1.7 | 54.2 | 14.7 |
| AD-84778 | 21.9 | 7.2 | 92.5 | 30.9 |
| AD-84779 | 31.9 | 8.6 | 99.5 | 39.5 |
| AD-84780 | 15.4 | 2.7 | 53.8 | 35.9 |
| AD-84781 | 13.2 | 2.4 | 61.8 | 2.7 |
| AD-84782 | 14.4 | 4.1 | 67.9 | 33.3 |
| AD-84783 | 20.8 | 5.5 | 89.0 | 31.1 |
| AD-84784 | 15.6 | 3.0 | 50.3 | 19.4 |
| AD-84785 | 12.3 | 12.3 | 23.5 | 23.5 |
| AD-84786 | 4.7 | 4.7 | 35.3 | 35.3 |
| AD-84787 | 12.4 | 12.4 | 45.5 | 45.5 |
| AD-84788 | 2.3 | 2.3 | 7.8 | 7.8 |
| AD-84789 | 9.4 | 9.4 | 45.7 | 45.7 |
| AD-84790 | 2.5 | 2.5 | 12.8 | 12.8 |

TABLE 6B
Single dose screen in Hep3b

| | % of Human | |
|---|---|---|
| Duplex | Message | |
| Name | Remaining | STDEV |
| AD-159469 | 16.97 | 6.86 |
| AD-159607 | 25.01 | 8.34 |
| AD-159713 | 25.91 | 11.30 |
| AD-158504 | 21.90 | 8.34 |
| AD-159233 | 25.16 | 10.01 |
| AD-159411 | 22.65 | 8.86 |
| AD-159462 | 31.26 | 10.89 |
| AD-159742 | 26.31 | 4.08 |
| AD-159863 | 22.44 | 5.86 |
| AD-158626 | 11.06 | 9.33 |
| AD-158687 | 17.11 | 9.55 |
| AD-158688 | 16.22 | 11.59 |
| AD-159458 | 16.59 | 9.47 |
| AD-159519 | 16.60 | 2.85 |
| AD-159858 | 31.03 | 12.43 |
| AD-158681 | 12.52 | 5.04 |
| AD-159583 | 30.63 | 8.04 |
| AD-159700 | 60.23 | 11.10 |
| AD-159807 | 12.17 | 4.73 |
| AD-158673 | 7.41 | 0.92 |
| AD-159608 | 19.93 | 9.83 |
| AD-159803 | 29.79 | 8.75 |
| AD-159805 | 31.27 | 12.09 |
| AD-159489 | 50.07 | 7.60 |
| AD-159495 | 22.72 | 2.15 |
| AD-159609 | 17.39 | 9.56 |
| AD-159706 | 25.44 | 3.75 |
| AD-159855 | 16.67 | 12.67 |
| AD-159864 | 8.09 | 1.09 |
| AD-158491 | 29.16 | 14.26 |
| AD-158672 | 29.36 | 10.12 |
| AD-159488 | 31.40 | 6.20 |
| AD-159553 | 24.36 | 7.63 |
| AD-159703 | 16.04 | 4.80 |
| AD-159708 | 100.96 | 26.91 |
| AD-159866 | 26.91 | 5.95 |
| AD-159232 | 21.82 | 8.62 |
| AD-159712 | 30.31 | 3.10 |
| AD-159808 | 47.72 | 11.27 |
| AD-159862 | 18.26 | 6.31 |
| AD-158503 | 32.70 | 7.50 |
| AD-159311 | 18.45 | 3.39 |
| AD-159412 | 24.28 | 10.07 |
| AD-159558 | 34.02 | 4.51 |
| AD-159705 | 28.29 | 4.65 |
| AD-159113 | 17.03 | 7.27 |
| AD-159139 | 33.24 | 8.38 |
| AD-159806 | 25.80 | 17.42 |
| AD-159853 | 28.52 | 3.85 |
| AD-158627 | 35.28 | 9.47 |
| AD-159182 | 29.66 | 7.88 |
| AD-159702 | 37.01 | 11.07 |
| AD-159715 | 22.32 | 6.78 |
| AD-158575 | 18.91 | 11.44 |
| AD-158576 | 37.74 | 18.73 |
| AD-158684 | 15.69 | 9.50 |
| AD-159410 | 30.98 | 3.65 |
| AD-159416 | 42.29 | 20.80 |
| AD-159738 | 20.66 | 2.83 |
| AD-159857 | 28.70 | 8.69 |
| AD-158497 | 22.79 | 4.43 |
| AD-159124 | 16.84 | 7.19 |
| AD-159140 | 30.90 | 7.50 |
| AD-159312 | 70.66 | 21.57 |
| AD-159552 | 29.86 | 7.83 |
| AD-159704 | 44.45 | 7.57 |
| AD-159737 | 29.05 | 8.48 |
| AD-159869 | 28.46 | 9.39 |
| AD-158570 | 31.18 | 7.43 |
| AD-158618 | 27.03 | 8.54 |
| AD-159788 | 19.87 | 9.21 |
| AD-159786 | 31.83 | 27.17 |
| AD-159760 | 32.68 | 18.79 |
| AD-159404 | 47.91 | 22.88 |
| AD-159406 | 23.84 | 10.41 |
| AD-158536 | 30.88 | 20.74 |
| AD-159545 | 84.72 | 26.81 |
| AD-159574 | 29.96 | 20.03 |
| AD-159802 | 24.57 | 9.29 |
| AD-159518 | 29.06 | 16.06 |
| AD-159577 | 34.39 | 12.83 |
| AD-159409 | 50.02 | 25.26 |
| AD-159551 | 33.79 | 11.99 |
| AD-159276 | 40.09 | 13.96 |
| AD-159407 | 37.47 | 9.59 |
| AD-159515 | 41.82 | 19.54 |
| AD-159570 | 12.41 | 3.87 |
| AD-159849 | 25.67 | 14.76 |
| AD-159252 | 14.25 | 4.14 |
| AD-159275 | 22.30 | 13.03 |
| AD-159848 | 34.58 | 13.52 |
| AD-159184 | 30.50 | 8.60 |
| AD-159231 | 103.27 | 9.11 |
| AD-159607 | 16.73 | 1.97 |
| AD-158504 | 11.46 | 1.78 |
| AD-159233 | 15.90 | 3.55 |
| AD-159411 | 9.04 | 1.84 |
| AD-159462 | 16.08 | 7.18 |
| AD-159742 | 10.92 | 3.23 |
| AD-159863 | 8.82 | 2.51 |
| AD-158687 | 14.93 | 6.23 |
| AD-158688 | 15.77 | 5.03 |
| AD-159458 | 14.85 | 9.10 |
| AD-159519 | 20.25 | 9.24 |
| AD-159858 | 22.20 | 14.11 |
| AD-159583 | 20.01 | 1.53 |
| AD-159700 | 56.12 | 12.02 |
| AD-159807 | 16.73 | 7.03 |
| AD-158673 | 6.01 | 2.09 |
| AD-159608 | 13.52 | 6.68 |
| AD-159803 | 30.47 | 10.26 |
| AD-159805 | 10.28 | 1.16 |
| AD-159489 | 24.20 | 2.9 |
| AD-159495 | 22.32 | 13.94 |
| AD-159706 | 30.61 | 17.66 |
| AD-159855 | 9.32 | 1.46 |
| AD-159864 | 10.64 | 2.41 |
| AD-159488 | 19.16 | 6.42 |
| AD-159553 | 21.69 | 13.77 |
| AD-159703 | 12.05 | 1.69 |
| AD-159708 | 68.53 | 3.86 |
| AD-159866 | 32.03 | 21.42 |
| AD-159232 | 11.99 | 1.77 |
| AD-159712 | 37.95 | 11.97 |
| AD-159808 | 15.66 | 5.30 |
| AD-159862 | 14.03 | 6.78 |
| AD-158503 | 38.82 | 12.61 |
| AD-159412 | 34.58 | 22.60 |
| AD-159558 | 44.20 | 9.58 |
| AD-159705 | 29.96 | 11.90 |
| AD-159113 | 9.61 | 0.94 |
| AD-159806 | 11.45 | 1.10 |
| AD-159853 | 18.04 | 5.87 |
| AD-159182 | 11.32 | 2.80 |
| AD-159702 | 16.90 | 2.27 |
| AD-159715 | 18.48 | 10.27 |
| AD-158575 | 12.02 | 1.74 |
| AD-158576 | 20.78 | 6.11 |
| AD-158684 | 11.37 | 7.57 |
| AD-159410 | 29.86 | 7.02 |
| AD-159416 | 46.73 | 11.03 |
| AD-159857 | 24.36 | 5.16 |
| AD-158497 | 30.17 | 3.74 |
| AD-159124 | 25.97 | 4.90 |
| AD-159312 | 70.74 | 5.44 |
| AD-159552 | 41.03 | 6.19 |
| AD-159704 | 35.64 | 15.41 |
| AD-159737 | 20.64 | 4.47 |
| AD-159869 | 32.80 | 5.77 |
| AD-158570 | 30.61 | 6.04 |
| AD-158618 | 23.25 | 8.74 |
| AD-159184 | 25.44 | 9.61 |
| AD-159231 | 84.40 | 6.16 |
| AD-159423 | 14.14 | 2.24 |
| AD-159446 | 24.93 | 8.57 |
| AD-159701 | 50.20 | 3.80 |
| AD-158494 | 11.88 | 2.84 |
| AD-158571 | 46.81 | 7.47 |
| AD-159125 | 15.81 | 2.66 |
| AD-159126 | 29.28 | 8.63 |
| AD-159287 | 25.25 | 2.91 |
| AD-158499 | 29.76 | 5.51 |
| AD-159417 | 32.69 | 6.45 |
| AD-159418 | 24.84 | 7.31 |
| AD-158550 | 28.87 | 4.53 |
| AD-159116 | 26.12 | 2.58 |
| AD-159421 | 22.32 | 3.28 |
| AD-159422 | 24.24 | 7.34 |
| AD-159445 | 33.50 | 10.14 |
| AD-159130 | 24.80 | 4.33 |
| AD-159134 | 10.46 | 1.12 |
| AD-159343 | 34.97 | 8.91 |
| AD-159105 | 92.74 | 4.56 |
| AD-159183 | 41.08 | 12.03 |
| AD-159123 | 33.69 | 9.55 |
| AD-159181 | 32.21 | 14.92 |
| AD-159186 | 24.30 | 1.21 |
| AD-159187 | 46.71 | 2.58 |
| AD-159288 | 21.07 | 2.58 |
| AD-159306 | 30.47 | 5.46 |
| AD-159559 | 34.55 | 6.09 |
| AD-159344 | 14.12 | 7.20 |
| AD-159341 | 19.39 | 9.18 |
| AD-159729 | 49.48 | 4.73 |
| AD-158674 | 15.18 | 2.82 |
| AD-159604 | 23.15 | 13.21 |

TABLE 7
Modified Human/Mouse/Cyno/Rat, Mouse, Mouse/Rat, and
Human/Cyno Cross-Reactive HAO1 iRNA Sequences

| | | SEQ | | SEQ | |
|---|---|---|---|---|---|
| Duplex | | ID | | ID | |
| Name | Sense Strand Sequence 5′ to 3′ | NO: | Antisense Strand Sequence 5′ to 3′ | NO: | Species |
| AD-62933 | GfsasAfuGfuGfaAfAfGfuCfaUfcGfaCfaAfL96 | 4140 | usUfsgUfcGfaUfgAfcuuUfcAfcAfuUfcsusg | 89 | Hs/Mm |
| AD-62939 | UfsusUfuCfaAfuGfGfGfuGfuCfcUfaGfgAfL96 | 4141 | usCfscUfaGfgAfcAfcccAfuUfgAfaAfasgsu | 90 | Hs/Mm |
| AD-62944 | GfsasAfaGfuCfaUfCfGfaCfaAfgAfcAfuUfL96 | 4142 | asAfsuGfuCfuUfgUfcgaUfgAfcUfuUfcsasc | 91 | Hs/Mm |
| AD-62949 | UfscsAfuCfgAfcAfAfGfaCfaUfuGfgUfgAfL96 | 4143 | usCfsaCfcAfaUfgUfcuuGfuCfgAfuGfascsu | 92 | Hs/Mm |
| AD-62954 | UfsusUfcAfaUfgGfGfUfgUfcCfuAfgGfaAfL96 | 4144 | usUfscCfuAfgGfaCfaccCfaUfuGfaAfasasg | 93 | Hs/Mm |
| AD-62959 | AfsasUfgGfgUfgUfCfCfuAfgGfaAfcCfuUfL96 | 4145 | asAfsgGfuUfcCfuAfggaCfaCfcCfaUfusgsa | 94 | Hs/Mm |
| AD-62964 | GfsasCfaGfuGfcAfCfAfaUfaUfuUfuCfcAfL96 | 4146 | usGfsgAfaAfaUfaUfuguGfcAfcUfgUfcsasg | 95 | Hs/Mm |
| AD-62969 | AfscsUfuUfuCfaAfUfGfgGfuGfuCfcUfaAfL96 | 4147 | usUfsaGfgAfcAfcCfcauUfgAfaAfaGfuscsa | 96 | Hs/Mm |
| AD-62934 | AfsasGfuCfaUfcGfAfCfaAfgAfcAfuUfgAfL96 | 4148 | usCfsaAfuGfuCfuUfgucGfaUfgAfcUfususc | 97 | Hs/Mm |
| AD-62940 | AfsusCfgAfcAfaGfAfCfaUfuGfgUfgAfgAfL96 | 4149 | usCfsuCfaCfcAfaUfgucUfuGfuCfgAfusgsa | 98 | Hs/Mm |
| AD-62945 | GfsgsGfaGfaAfaGfGfUfgUfuCfaAfgAfuAfL96 | 4150 | usAfsuCfuUfgAfaCfaccUfuUfcUfcCfcscsc | 99 | Hs/Mm |
| AD-62950 | CfsusUfuUfcAfaUfGfGfgUfgUfcCfuAfgAfL96 | 29 | usCfsuAfgGfaCfaCfccaUfuGfaAfaAfgsusc | 100 | Hs/Mm |
| AD-62955 | UfscsAfaUfgGfgUfGfUfcCfuAfgGfaAfcAfL96 | 30 | usGfsuUfcCfuAfgGfacaCfcCfaUfuGfasasa | 101 | Hs/Mm |
| AD-62960 | UfsusGfaCfuUfuUfCfAfaUfgGfgUfgUfcAfL96 | 31 | usGfsaCfaCfcCfaUfugaAfaAfgUfcAfasasa | 102 | Hs/Mm |
| AD-62965 | AfsasAfgUfcAfuCfGfAfcAfaGfaCfaUfuAfL96 | 32 | usAfsaUfgUfcUfuGfucgAfuGfaCfuUfuscsa | 103 | Hs/Mm |
| AD-62970 | CfsasGfgGfgGfaGfAfAfaGfgUfgUfuCfaAfL96 | 33 | usUfsgAfaCfaCfcUfuucUfcCfcCfcUfgsgsa | 104 | Hs/Mm |
| AD-62935 | CfsasUfuGfgUfgAfGfGfaAfaAfaUfcCfuUfL96 | 34 | asAfsgGfaUfuUfuUfccuCfaCfcAfaUfgsusc | 105 | Hs/Mm |
| AD-62941 | AfscsAfuUfgGfuGfAfGfgAfaAfaAfuCfcUfL96 | 35 | asGfsgAfuUfuUfuCfcucAfcCfaAfuGfuscsu | 106 | Hs/Mm |
| AD-62946 | AfsgsGfgGfgAfgAfAfAfgGfuGfuUfcAfaAfL96 | 36 | usUfsuGfaAfcAfcCfuuuCfuCfcCfcCfusgsg | 107 | Hs/Mm |
| AD-62951 | AfsusGfgUfgGfuAfAfUfuUfgUfgAfuUfuUfL96 | 37 | asAfsaAfuCfaCfaAfauuAfcCfaCfcAfuscsc | 108 | Hs |
| AD-62956 | GfsasCfuUfgCfaUfCfCfuGfgAfaAfuAfuAfL96 | 38 | usAfsuAfuUfuCfcAfggaUfgCfaAfgUfcscsa | 109 | Hs |
| AD-62961 | GfsgsAfaGfgGfaAfGfGfuAfgAfaGfuCfuUfL96 | 39 | asAfsgAfcUfuCfuAfccuUfcCfcUfuCfcsasc | 110 | Hs |
| AD-62966 | UfsgsUfcUfuCfuGfUfUfuAfgAfuUfuCfcUfL96 | 40 | asGfsgAfaAfuCfuAfaacAfgAfaGfaCfasgsg | 111 | Hs |
| AD-62971 | CfsusUfuGfgCfuGfUfUfuCfcAfaGfaUfcUfL96 | 41 | asGfsaUfcUfuGfgAfaacAfgCfcAfaAfgsgsa | 112 | Hs |
| AD-62936 | AfsasUfgUfgUfuUfGfGfgCfaAfcGfuCfaUfL96 | 42 | asUfsgAfcGfuUfgCfccaAfaCfaCfaUfususu | 113 | Hs |
| AD-62942 | UfsgsUfgAfcUfgUfGfGfaCfaCfcCfcUfuAfL96 | 43 | usAfsaGfgGfgUfgUfccaCfaGfuCfaCfasasa | 114 | Hs |
| AD-62947 | GfsasUfgGfgGfuGfCfCfaGfcUfaCfuAfuUfL96 | 44 | asAfsuAfgUfaGfcUfggcAfcCfcCfaUfcscsa | 115 | Hs |
| AD-62952 | GfsasAfaAfuGfuGfUfUfuGfgGfcAfaCfgUfL96 | 45 | asCfsgUfuGfcCfcAfaacAfcAfuUfuUfcsasa | 116 | Hs |
| AD-62957 | GfsgsCfuGfuUfuCfCfAfaGfaUfcUfgAfcAfL96 | 46 | usGfsuCfaGfaUfcUfuggAfaAfcAfgCfcsasa | 117 | Hs |
| AD-62962 | UfscsCfaAfcAfaAfAfUfaGfcCfaCfcCfcUfL96 | 47 | asGfsgGfgUfgGfcUfauuUfuGfuUfgGfasasa | 118 | Hs |
| AD-62967 | GfsusCfuUfcUfgUfUfUfaGfaUfuUfcCfuUfL96 | 48 | asAfsgGfaAfaUfcUfaaaCfaGfaAfgAfcsasg | 119 | Hs |
| AD-62972 | UfsgsGfaAfgGfgAfAfGfgUfaGfaAfgUfcUfL96 | 49 | asGfsaCfuUfcUfaCfcuuCfcCfuUfcCfascsa | 120 | Hs |
| AD-62937 | UfscsCfuUfuGfgCfUfGfuUfuCfcAfaGfaUfL96 | 50 | asUfscUfuGfgAfaAfcagCfcAfaAfgGfasusu | 121 | Hs |
| AD-62943 | CfsasUfcUfcUfcAfGfCfuGfgGfaUfgAfuAfL96 | 51 | usAfsuCfaUfcCfcAfgcuGfaGfaGfaUfgsgsg | 122 | Hs |
| AD-62948 | GfsgsGfgUfgCfcAfGfCfuAfcUfaUfuGfaUfL96 | 52 | asUfscAfaUfaGfuAfgcuGfgCfaCfcCfcsasu | 123 | Hs |
| AD-62953 | AfsusGfuGfuUfuGfGfGfcAfaCfgUfcAfuAfL96 | 53 | usAfsuGfaCfgUfuGfcccAfaAfcAfcAfususu | 124 | Hs |
| AD-62958 | CfsusGfuUfuAfgAfUfUfuCfcUfuAfaGfaAfL96 | 54 | usUfscUfuAfaGfgAfaauCfuAfaAfcAfgsasa | 125 | Hs |
| AD-62963 | AfsgsAfaAfgAfaAfUfGfgAfcUfuGfcAfuAfL96 | 55 | usAfsuGfcAfaGfuCfcauUfuCfuUfuCfusasg | 126 | Hs |
| AD-62968 | GfscsAfuCfcUfgGfAfAfaUfaUfaUfuAfaAfL96 | 56 | usUfsuAfaUfaUfaUfuucCfaGfgAfuGfcsasa | 127 | Hs |
| AD-62973 | CfscsUfgUfcAfgAfCfCfaUfgGfgAfaCfuAfL96 | 57 | usAfsgUfuCfcCfaUfgguCfuGfaCfaGfgscsu | 128 | Hs |
| AD-62938 | AfsasAfcAfuGfgUfGfUfgGfaUfgGfgAfuAfL96 | 58 | usAfsuCfcCfaUfcCfacaCfcAfuGfuUfusasa | 129 | Hs |
| AD-62974 | CfsusCfaGfgAfuGfAfAfaAfaUfuUfuGfaAfL96 | 59 | usUfscAfaAfaUfuUfuucAfuCfcUfgAfgsusu | 130 | Hs |
| AD-62978 | CfsasGfcAfuGfuAfUfUfaCfuUfgAfcAfaAfL96 | 60 | usUfsuGfuCfaAfgUfaauAfcAfuGfcUfgsasa | 131 | Hs |
| AD-62982 | UfsasUfgAfaCfaAfCfAfuGfcUfaAfaUfcAfL96 | 61 | usGfsaUfuUfaGfcAfuguUfgUfuCfaUfasasu | 132 | Hs |
| AD-62986 | AfsusAfuAfuCfcAfAfAfuGfuUfuUfaGfgAfL96 | 62 | usCfscUfaAfaAfcAfuuuGfgAfuAfuAfususc | 133 | Hs |
| AD-62990 | CfscsAfgAfuGfgAfAfGfcUfgUfaUfcCfaAfL96 | 63 | usUfsgGfaUfaCfaGfcuuCfcAfuCfuGfgsasa | 134 | Hs |
| AD-62994 | GfsasCfuUfuCfaUfCfCfuGfgAfaAfuAfuAfL96 | 64 | usAfsuAfuUfuCfcAfggaUfgAfaAfgUfcscsa | 135 | Hs |
| AD-62998 | CfscsCfcGfgCfuAfAfUfuUfgUfaUfcAfaUfL96 | 65 | asUfsuGfaUfaCfaAfauuAfgCfcGfgGfgsgsa | 136 | Hs |
| AD-63002 | UfsusAfaAfcAfuGfGfCfuUfgAfaUfgGfgAfL96 | 66 | usCfscCfaUfuCfaAfgccAfuGfuUfuAfascsa | 137 | Hs |
| AD-62975 | AfsasUfgUfgUfuUfAfGfaCfaAfcGfuCfaUfL96 | 67 | asUfsgAfcGfuUfgUfcuaAfaCfaCfaUfususu | 138 | Mm |
| AD-62979 | AfscsUfaAfaGfgAfAfGfaAfuUfcCfgGfuUfL96 | 68 | asAfscCfgGfaAfuUfcuuCfcUfuUfaGfusasu | 139 | Mm |
| AD-62983 | UfsasUfaUfcCfaAfAfUfgUfuUfuAfgGfaUfL96 | 69 | asUfscCfuAfaAfaCfauuUfgGfaUfaUfasusu | 140 | Mm |
| AD-62987 | GfsusGfcGfgAfaAfGfGfcAfcUfgAfuGfuUfL96 | 70 | asAfscAfuCfaGfuGfccuUfuCfcGfcAfcsasc | 141 | Mm |
| AD-62991 | UfsasAfaAfcAfgUfGfGfuUfcUfuAfaAfuUfL96 | 71 | asAfsuUfuAfaGfaAfccaCfuGfuUfuUfasasa | 142 | Mm |
| AD-62995 | AfsusGfaAfaAfaUfUfUfuGfaAfaCfcAfgUfL96 | 72 | asCfsuGfgUfuUfcAfaaaUfuUfuUfcAfuscsc | 143 | Mm |
| AD-62999 | AfsasCfaAfaAfuAfGfCfaAfuCfcCfuUfuUfL96 | 73 | asAfsaAfgGfgAfuUfgcuAfuUfuUfgUfusgsg | 144 | Mm |
| AD-63003 | CfsusGfaAfaCfaGfAfUfcUfgUfcGfaCfuUfL96 | 74 | asAfsgUfcGfaCfaGfaucUfgUfuUfcAfgscsa | 145 | Mm |
| AD-62976 | UfsusGfuUfgCfaAfAfGfgGfcAfuUfuUfgAfL96 | 75 | usCfsaAfaAfuGfcCfcuuUfgCfaAfcAfasusu | 146 | Mm |
| AD-62980 | CfsusCfaUfuGfuUfUfAfuUfaAfcCfuGfuAfL96 | 76 | usAfscAfgGfuUfaAfuaaAfcAfaUfgAfgsasu | 147 | Mm |
| AD-62984 | CfsasAfcAfaAfaUfAfGfcAfaUfcCfcUfuUfL96 | 77 | asAfsaGfgGfaUfuGfcuaUfuUfuGfuUfgsgsa | 148 | Mm |
| AD-62992 | CfsasUfuGfuUfuAfUfUfaAfcCfuGfuAfuUfL96 | 78 | asAfsuAfcAfgGfuUfaauAfaAfcAfaUfgsasg | 149 | Mm |
| AD-62996 | UfsasUfcAfgCfuGfGfGfaAfgAfuAfuCfaAfL96 | 79 | usUfsgAfuAfuCfuUfcccAfgCfuGfaUfasgsa | 150 | Mm |
| AD-63000 | UfsgsUfcCfuAfgGfAfAfcCfuUfuUfaGfaAfL96 | 80 | usUfscUfaAfaAfgGfuucCfuAfgGfaCfascsc | 151 | Mm |
| AD-63004 | UfscsCfaAfcAfaAfAfUfaGfcAfaUfcCfcUfL96 | 81 | asGfsgGfaUfuGfcUfauuUfuGfuUfgGfasasa | 152 | Mm |
| AD-62977 | GfsgsUfgUfgCfgGfAfAfaGfgCfaCfuGfaUfL96 | 82 | asUfscAfgUfgCfcUfuucCfgCfaCfaCfcscsc | 153 | Mm |
| AD-62981 | UfsusGfaAfaCfcAfGfUfaCfuUfuAfuCfaUfL96 | 83 | asUfsgAfuAfaAfgUfacuGfgUfuUfcAfasasa | 154 | Mm |
| AD-62985 | UfsasCfuUfcCfaAfAfGfuCfuAfuAfuAfuAfL96 | 84 | usAfsuAfuAfuAfgAfcuuUfgGfaAfgUfascsu | 155 | Mm |
| AD-62989 | UfscsCfuAfgGfaAfCfCfuUfuUfaGfaAfaUfL96 | 85 | asUfsuUfcUfaAfaAfgguUfcCfuAfgGfascsa | 156 | Mm |
| AD-62993 | CfsusCfcUfgAfgGfAfAfaAfuUfuUfgGfaAfL96 | 86 | usUfscCfaAfaAfuUfuucCfuCfaGfgAfgsasa | 157 | Mm |
| AD-62997 | GfscsUfcCfgGfaAfUfGfuUfgCfuGfaAfaUfL96 | 87 | asUfsuUfcAfgCfaAfcauUfcCfgGfaGfcsasu | 158 | Mm |
| AD-63001 | GfsusGfuUfuGfuGfGfGfgAfgAfcCfaAfuAfL96 | 88 | usAfsuUfgGfuCfuCfcccAfcAfaAfcAfcsasg | 159 | Mm |

TABLE 8
Additional Modified Human/Mouse/Cyno/Rat, Human/Mouse/Rat,
Human/Mouse/Cyno, Mouse, Mouse/Rat, and Human/Cyno Cross-Reactive HAO1 IRNA Sequences

| | | SEQ | | SEQ | |
|---|---|---|---|---|---|
| Duplex | | ID | | ID | |
| Name | Sense Strand Sequence 5′ to 3′ | NO: | Antisense Strand Sequence 5′ to 3′ | NO: | Species |
| AD-62933.2 | GfsasAfuGfuGfaAfAfGfuCfaUfcGfaCfaAfL96 | 4140 | usUfsgUfcGfaUfgAfcuuUfcAfcAfuUfcsusg | 89 | Hs/Mm |
| AD-62939.2 | UfsusUfuCfaAfuGfGfGfuGfuCfcUfaGfgAfL96 | 4141 | usCfscUfaGfgAfcAfcccAfuUfgAfaAfasgsu | 90 | Hs/Mm |
| AD-62944.2 | GfsasAfaGfuCfaUfCfGfaCfaAfgAfcAfuUfL96 | 4142 | asAfsuGfuCfuUfgUfcgaUfgAfcUfuUfcsasc | 91 | Hs/Mm |
| AD-62949.2 | UfscsAfuCfgAfcAfAfGfaCfaUfuGfgUfgAfL96 | 4143 | usCfsaCfcAfaUfgUfcuuGfuCfgAfuGfascsu | 92 | Hs/Mm |
| AD-62954.2 | UfsusUfcAfaUfgGfGfUfgUfcCfuAfgGfaAfL96 | 4144 | usUfscCfuAfgGfaCfaccCfaUfuGfaAfasasg | 93 | Hs/Mm |
| AD-62959.2 | AfsasUfgGfgUfgUfCfCfuAfgGfaAfcCfuUfL96 | 4145 | asAfsgGfuUfcCfuAfggaCfaCfcCfaUfusgsa | 94 | Hs/Mm |
| AD-62964.2 | GfsasCfaGfuGfcAfCfAfaUfaUfuUfuCfcAfL96 | 4146 | usGfsgAfaAfaUfaUfuguGfcAfcUfgUfcsasg | 95 | Hs/Mm |
| AD-62969.2 | AfscsUfuUfuCfaAfUfGfgGfuGfuCfcUfaAfL96 | 4147 | usUfsaGfgAfcAfcCfcauUfgAfaAfaGfuscsa | 96 | Hs/Mm |
| AD-62934.2 | AfsasGfuCfaUfcGfAfCfaAfgAfcAfuUfgAfL96 | 4148 | usCfsaAfuGfuCfuUfgucGfaUfgAfcUfususc | 97 | Hs/Mm |
| AD-62940.2 | AfsusCfgAfcAfaGfAfCfaUfuGfgUfgAfgAfL96 | 4149 | usCfsuCfaCfcAfaUfgucUfuGfuCfgAfusgsa | 98 | Hs/Mm |
| AD-62945.2 | GfsgsGfaGfaAfaGfGfUfgUfuCfaAfgAfuAfL96 | 4150 | usAfsuCfuUfgAfaCfaccUfuUfcUfcCfcscsc | 99 | Hs/Mm |
| AD-62950.2 | CfsusUfuUfcAfaUfGfGfgUfgUfcCfuAfgAfL96 | 29 | usCfsuAfgGfaCfaCfccaUfuGfaAfaAfgsusc | 100 | Hs/Mm |
| AD-62955.2 | UfscsAfaUfgGfgUfGfUfcCfuAfgGfaAfcAfL96 | 30 | usGfsuUfcCfuAfgGfacaCfcCfaUfuGfasasa | 101 | Hs/Mm |
| AD-62960.2 | UfsusGfaCfuUfuUfCfAfaUfgGfgUfgUfcAfL96 | 31 | usGfsaCfaCfcCfaUfugaAfaAfgUfcAfasasa | 102 | Hs/Mm |
| AD-62965.2 | AfsasAfgUfcAfuCfGfAfcAfaGfaCfaUfuAfL96 | 32 | usAfsaUfgUfcUfuGfucgAfuGfaCfuUfuscsa | 103 | Hs/Mm |
| AD-62970.2 | CfsasGfgGfgGfaGfAfAfaGfgUfgUfuCfaAfL96 | 33 | usUfsgAfaCfaCfcUfuucUfcCfcCfcUfgsgsa | 104 | Hs/Mm |
| AD-62935.2 | CfsasUfuGfgUfgAfGfGfaAfaAfaUfcCfuUfL96 | 34 | asAfsgGfaUfuUfuUfccuCfaCfcAfaUfgsusc | 105 | Hs/Mm |
| AD-62941.2 | AfscsAfuUfgGfuGfAfGfgAfaAfaAfuCfcUfL96 | 35 | asGfsgAfuUfuUfuCfcucAfcCfaAfuGfuscsu | 106 | Hs/Mm |
| AD-62946.2 | AfsgsGfgGfgAfgAfAfAfgGfuGfuUfcAfaAfL96 | 36 | usUfsuGfaAfcAfcCfuuuCfuCfcCfcCfusgsg | 107 | Hs/Mm |
| AD-62951.2 | AfsusGfgUfgGfuAfAfUfuUfgUfgAfuUfuUfL96 | 37 | asAfsaAfuCfaCfaAfauuAfcCfaCfcAfuscsc | 108 | Hs |
| AD-62956.2 | GfsasCfuUfgCfaUfCfCfuGfgAfaAfuAfuAfL96 | 38 | usAfsuAfuUfuCfcAfggaUfgCfaAfgUfcscsa | 109 | Hs |
| AD-62961.2 | GfsgsAfaGfgGfaAfGfGfuAfgAfaGfuCfuUfL96 | 39 | asAfsgAfcUfuCfuAfccuUfcCfcUfuCfcsasc | 110 | Hs |
| AD-62966.2 | UfsgsUfcUfuCfuGfUfUfuAfgAfuUfuCfcUfL96 | 40 | asGfsgAfaAfuCfuAfaacAfgAfaGfaCfasgsg | 111 | Hs |
| AD-62971.2 | CfsusUfuGfgCfuGfUfUfuCfcAfaGfaUfcUfL96 | 41 | asGfsaUfcUfuGfgAfaacAfgCfcAfaAfgsgsa | 112 | Hs |
| AD-62936.2 | AfsasUfgUfgUfuUfGfGfgCfaAfcGfuCfaUfL96 | 42 | asUfsgAfcGfuUfgCfccaAfaCfaCfaUfususu | 113 | Hs |
| AD-62942.2 | UfsgsUfgAfcUfgUfGfGfaCfaCfcCfcUfuAfL96 | 43 | usAfsaGfgGfgUfgUfccaCfaGfuCfaCfasasa | 114 | Hs |
| AD-62947.2 | GfsasUfgGfgGfuGfCfCfaGfcUfaCfuAfuUfL96 | 44 | asAfsuAfgUfaGfcUfggcAfcCfcCfaUfcscsa | 115 | Hs |
| AD-62952.2 | GfsasAfaAfuGfuGfUfUfuGfgGfcAfaCfgUfL96 | 45 | asCfsgUfuGfcCfcAfaacAfcAfuUfuUfcsasa | 116 | Hs |
| AD-62957.2 | GfsgsCfuGfuUfuCfCfAfaGfaUfcUfgAfcAfL96 | 46 | usGfsuCfaGfaUfcUfuggAfaAfcAfgCfcsasa | 117 | Hs |
| AD-62962.2 | UfscsCfaAfcAfaAfAfUfaGfcCfaCfcCfcUfL96 | 47 | asGfsgGfgUfgGfcUfauuUfuGfuUfgGfasasa | 118 | Hs |
| AD-62967.2 | GfsusCfuUfcUfgUfUfUfaGfaUfuUfcCfuUfL96 | 48 | asAfsgGfaAfaUfcUfaaaCfaGfaAfgAfcsasg | 119 | Hs |
| AD-62972.2 | UfsgsGfaAfgGfgAfAfGfgUfaGfaAfgUfcUfL96 | 49 | asGfsaCfuUfcUfaCfcuuCfcCfuUfcCfascsa | 120 | Hs |
| AD-62937.2 | UfscsCfuUfuGfgCfUfGfuUfuCfcAfaGfaUfL96 | 50 | asUfscUfuGfgAfaAfcagCfcAfaAfgGfasusu | 121 | Hs |
| AD-62943.2 | CfsasUfcUfcUfcAfGfCfuGfgGfaUfgAfuAfL96 | 51 | usAfsuCfaUfcCfcAfgcuGfaGfaGfaUfgsgsg | 122 | Hs |
| AD-62948.2 | GfsgsGfgUfgCfcAfGfCfuAfcUfaUfuGfaUfL96 | 52 | asUfscAfaUfaGfuAfgcuGfgCfaCfcCfcsasu | 123 | Hs |
| AD-62953.2 | AfsusGfuGfuUfuGfGfGfcAfaCfgUfcAfuAfL96 | 53 | usAfsuGfaCfgUfuGfcccAfaAfcAfcAfususu | 124 | Hs |
| AD-62958.2 | CfsusGfuUfuAfgAfUfUfuCfcUfuAfaGfaAfL96 | 54 | usUfscUfuAfaGfgAfaauCfuAfaAfcAfgsasa | 125 | Hs |
| AD-62963.2 | AfsgsAfaAfgAfaAfUfGfgAfcUfuGfcAfuAfL96 | 55 | usAfsuGfcAfaGfuCfcauUfuCfuUfuCfusasg | 126 | Hs |
| AD-62968.2 | GfscsAfuCfcUfgGfAfAfaUfaUfaUfuAfaAfL96 | 56 | usUfsuAfaUfaUfaUfuucCfaGfgAfuGfcsasa | 127 | Hs |
| AD-62973.2 | CfscsUfgUfcAfgAfCfCfaUfgGfgAfaCfuAfL96 | 57 | usAfsgUfuCfcCfaUfgguCfuGfaCfaGfgscsu | 128 | Hs |
| AD-62938.2 | AfsasAfcAfuGfgUfGfUfgGfaUfgGfgAfuAfL96 | 58 | usAfsuCfcCfaUfcCfacaCfcAfuGfuUfusasa | 129 | Hs |
| AD-62974.2 | CfsusCfaGfgAfuGfAfAfaAfaUfuUfuGfaAfL96 | 59 | usUfscAfaAfaUfuUfuucAfuCfcUfgAfgsusu | 130 | Hs |
| AD-62978.2 | CfsasGfcAfuGfuAfUfUfaCfuUfgAfcAfaAfL96 | 60 | usUfsuGfuCfaAfgUfaauAfcAfuGfcUfgsasa | 131 | Hs |
| AD-62982.2 | UfsasUfgAfaCfaAfCfAfuGfcUfaAfaUfcAfL96 | 61 | usGfsaUfuUfaGfcAfuguUfgUfuCfaUfasasu | 132 | Hs |
| AD-62986.2 | AfsusAfuAfuCfcAfAfAfuGfuUfuUfaGfgAfL96 | 62 | usCfscUfaAfaAfcAfuuuGfgAfuAfuAfususc | 133 | Hs |
| AD-62990.2 | CfscsAfgAfuGfgAfAfGfcUfgUfaUfcCfaAfL96 | 63 | usUfsgGfaUfaCfaGfcuuCfcAfuCfuGfgsasa | 134 | Hs |
| AD-62994.2 | GfsasCfuUfuCfaUfCfCfuGfgAfaAfuAfuAfL96 | 64 | usAfsuAfuUfuCfcAfggaUfgAfaAfgUfcscsa | 135 | Hs |
| AD-62998.2 | CfscsCfcGfgCfuAfAfUfuUfgUfaUfcAfaUfL96 | 65 | asUfsuGfaUfaCfaAfauuAfgCfcGfgGfgsgsa | 136 | Hs |
| AD-63002.2 | UfsusAfaAfcAfuGfGfCfuUfgAfaUfgGfgAfL96 | 66 | usCfscCfaUfuCfaAfgccAfuGfuUfuAfascsa | 137 | Hs |
| AD-62975.2 | AfsasUfgUfgUfuUfAfGfaCfaAfcGfuCfaUfL96 | 67 | asUfsgAfcGfuUfgUfcuaAfaCfaCfaUfususu | 138 | Mm |
| AD-62979.2 | AfscsUfaAfaGfgAfAfGfaAfuUfcCfgGfuUfL96 | 68 | asAfscCfgGfaAfuUfcuuCfcUfuUfaGfusasu | 139 | Mm |
| AD-62983.2 | UfsasUfaUfcCfaAfAfUfgUfuUfuAfgGfaUfL96 | 69 | asUfscCfuAfaAfaCfauuUfgGfaUfaUfasusu | 140 | Mm |
| AD-62987.2 | GfsusGfcGfgAfaAfGfGfcAfcUfgAfuGfuUfL96 | 70 | asAfscAfuCfaGfuGfccuUfuCfcGfcAfcsasc | 141 | Mm |
| AD-62991.2 | UfsasAfaAfcAfgUfGfGfuUfcUfuAfaAfuUfL96 | 71 | asAfsuUfuAfaGfaAfccaCfuGfuUfuUfasasa | 142 | Mm |
| AD-62995.2 | AfsusGfaAfaAfaUfUfUfuGfaAfaCfcAfgUfL96 | 72 | asCfsuGfgUfuUfcAfaaaUfuUfuUfcAfuscsc | 143 | Mm |
| AD-62999.2 | AfsasCfaAfaAfuAfGfCfaAfuCfcCfuUfuUfL96 | 73 | asAfsaAfgGfgAfuUfgcuAfuUfuUfgUfusgsg | 144 | Mm |
| AD-63003.2 | CfsusGfaAfaCfaGfAfUfcUfgUfcGfaCfuUfL96 | 74 | asAfsgUfcGfaCfaGfaucUfgUfuUfcAfgscsa | 145 | Mm |
| AD-62976.2 | UfsusGfuUfgCfaAfAfGfgGfcAfuUfuUfgAfL96 | 75 | usCfsaAfaAfuGfcCfcuuUfgCfaAfcAfasusu | 146 | Mm |
| AD-62980.2 | CfsusCfaUfuGfuUfUfAfuUfaAfcCfuGfuAfL96 | 76 | usAfscAfgGfuUfaAfuaaAfcAfaUfgAfgsasu | 147 | Mm |
| AD-62984.2 | CfsasAfcAfaAfaUfAfGfcAfaUfcCfcUfuUfL96 | 77 | asAfsaGfgGfaUfuGfcuaUfuUfuGfuUfgsgsa | 148 | Mm |
| AD-62992.2 | CfsasUfuGfuUfuAfUfUfaAfcCfuGfuAfuUfL96 | 78 | asAfsuAfcAfgGfuUfaauAfaAfcAfaUfgsasg | 149 | Mm |
| AD-62996.2 | UfsasUfcAfgCfuGfGfGfaAfgAfuAfuCfaAfL96 | 79 | usUfsgAfuAfuCfuUfcccAfgCfuGfaUfasgsa | 150 | Mm |
| AD-63000.2 | UfsgsUfcCfuAfgGfAfAfcCfuUfuUfaGfaAfL96 | 80 | usUfscUfaAfaAfgGfuucCfuAfgGfaCfascsc | 151 | Mm |
| AD-63004.2 | UfscsCfaAfcAfaAfAfUfaGfcAfaUfcCfcUfL96 | 81 | asGfsgGfaUfuGfcUfauuUfuGfuUfgGfasasa | 152 | Mm |
| AD-62977.2 | GfsgsUfgUfgCfgGfAfAfaGfgCfaCfuGfaUfL96 | 82 | asUfscAfgUfgCfcUfuucCfgCfaCfaCfcscsc | 153 | Mm |
| AD-62981.2 | UfsusGfaAfaCfcAfGfUfaCfuUfuAfuCfaUfL96 | 83 | asUfsgAfuAfaAfgUfacuGfgUfuUfcAfasasa | 154 | Mm |
| AD-62985.2 | UfsasCfuUfcCfaAfAfGfuCfuAfuAfuAfuAfL96 | 84 | usAfsuAfuAfuAfgAfcuuUfgGfaAfgUfascsu | 155 | Mm |
| AD-62989.2 | UfscsCfuAfgGfaAfCfCfuUfuUfaGfaAfaUfL96 | 85 | asUfsuUfcUfaAfaAfgguUfcCfuAfgGfascsa | 156 | Mm |
| AD-62993.2 | CfsusCfcUfgAfgGfAfAfaAfuUfuUfgGfaAfL96 | 86 | usUfscCfaAfaAfuUfuucCfuCfaGfgAfgsasa | 157 | Mm |
| AD-62997.2 | GfscsUfcCfgGfaAfUfGfuUfgCfuGfaAfaUfL96 | 87 | asUfsuUfcAfgCfaAfcauUfcCfgGfaGfcsasu | 158 | Mm |
| AD-63001.2 | GfsusGfuUfuGfuGfGfGfgAfgAfcCfaAfuAfL96 | 88 | usAfsuUfgGfuCfuCfcccAfcAfaAfcAfcsasg | 159 | Mm |
| AD-62933.1 | GfsasAfuGfuGfaAfAfGfuCfaUfcGfaCfaAfL96 | 160 | usUfsgUfcGfaUfgAfcuuUfcAfcAfuUfcsusg | 277 | |
| AD-65630.1 | Y44gsasAfuGfuGfaAfAfGfuCfaUfcGfaCfaAfL | 161 | PusUfsgUfcGfaUfgAfcuuUfcAfcAfuUfcsus | 278 | |
| | 96 | | g | | |
| AD-65636.1 | gsasauguGfaAfAfGfucauCfgacaaL96 | 162 | usUfsgUfcGfaUfgAfcuuUfcAfcAfuUfcsusg | 279 | |
| AD-65642.1 | gsasauguGfaAfAfGfucaucgacaaL96 | 163 | usUfsgUfcGfaUfgAfcuuUfcAfcAfuUfcsusg | 280 | |
| AD-65647.1 | gsasauguGfaaAfGfucaucgacaaL96 | 164 | usUfsgUfcGfaUfgAfcuuUfcAfcAfuUfcsusg | 281 | |
| AD-65652.1 | gsasauguGfaaaGfucaucGfacaaL96 | 165 | usUfsgUfcGfaUfgAfcuuUfcAfcAfuUfcsusg | 282 | |
| AD-65657.1 | gsasaugugaaaGfucaucGfacaaL96 | 166 | usUfsgUfcGfaUfgAfcuuUfcAfcAfuUfcsusg | 283 | |
| AD-65662.1 | gsasauguGfaaaGfucaucgacaaL96 | 167 | usUfsgUfcGfaUfgAfcuuUfcAfcAfuUfcsusg | 284 | |
| AD-65625.1 | AfsusGfuGfaAfAfGfuCfaUfcGfaCfaAfL96 | 168 | usUfsgUfcGfaUfgAfcuuUfcAfcAfususc | 285 | |
| AD-65631.1 | asusguGfaAfAfGfucaucgacaaL96 | 169 | usUfsgucGfaugacuuUfcAfcaususc | 286 | |
| AD-65637.1 | GfsasAfuGfuGfaAfAfGfuCfaUfcGfaCfaAfL96 | 170 | usUfsgucGfaUfgAfcuuUfcAfcauucsusg | 287 | |
| AD-65643.1 | GfsasAfuGfuGfaAfAfGfuCfaUfcGfaCfaAfL96 | 171 | usUfsgucGfaUfGfacuuUfcAfcauucsusg | 288 | |
| AD-65648.1 | GfsasAfuGfuGfaAfAfGfuCfaUfcGfaCfaAfL96 | 172 | usUfsgucGfaugacuuUfcAfcauucsusg | 289 | |
| AD-65653.1 | GfsasAfuGfuGfaAfAfGfuCfaUfcGfaCfaAfL96 | 173 | usUfsgucGfaugacuuUfcacauucsusg | 290 | |
| AD-65658.1 | GfsasAfuGfuGfaAfAfGfuCfaUfcGfaCfaAfL96 | 174 | usUfsgucgaugacuuUfcacauucsusg | 291 | |
| AD-65663.1 | gsasauguGfaAfAfGfucaucgacaaL96 | 175 | usUfsgucGfaUfgAfcuuUfcAfcauucsusg | 292 | |
| AD-65626.1 | gsasauguGfaAfAfGfucaucgacaaL96 | 176 | usUfsgucGfaUfGfacuuUfcAfcauucsusg | 293 | |
| AD-65638.1 | gsasauguGfaaAfGfucaucgacaaL96 | 177 | usUfsgucGfaUfgAfcuuUfcAfcauucsusg | 294 | |
| AD-65644.1 | gsasauguGfaaAfGfucaucgacaaL96 | 178 | usUfsgucGfaUfGfacuuUfcAfcauucsusg | 295 | |
| AD-65649.1 | gsasauguGfaaAfGfucaucgacaaL96 | 179 | usUfsgucGfaugacuuUfcAfcauucsusg | 296 | |
| AD-65654.1 | gsasaugugaaagucau(Cgn)gacaaL96 | 180 | usUfsgUfcGfaUfgAfcuuUfcAfcAfuUfcsusg | 297 | |
| AD-65659.1 | gsasaugdTgaaagucau(Cgn)gacaaL96 | 181 | usUfsgUfcGfaUfgAfcuuUfcAfcAfuUfcsusg | 298 | |
| AD-65627.1 | gsasaudGugaaadGucau(Cgn)gacaaL96 | 182 | usUfsgUfcGfaUfgAfcuuUfcAfcAfuUfcsusg | 299 | |
| AD-65633.1 | gsasaugdTgaaadGucau(Cgn)gacaaL96 | 183 | usUfsgUfcGfaUfgAfcuuUfcAfcAfuUfcsusg | 300 | |
| AD-65639.1 | gsasaugudGaaadGucau(Cgn)gacaaL96 | 184 | usUfsgUfcGfaUfgAfcuuUfcAfcAfuUfcsusg | 301 | |
| AD-65645.1 | gsasaugugaaadGucaucdGacaaL96 | 185 | usUfsgUfcGfaUfgAfcuuUfcAfcAfuUfcsusg | 302 | |
| AD-65650.1 | gsasaugugaaadGucaucdTacaaL96 | 186 | usUfsgUfcGfaUfgAfcuuUfcAfcAfuUfcsusg | 303 | |
| AD-65655.1 | gsasaugugaaadGucaucY34acaaL96 | 187 | usUfsgUfcGfaUfgAfcuuUfcAfcAfuUfcsusg | 304 | |
| AD-65660.1 | gsasaugugaaadGucadTcdTacaaL96 | 188 | usUfsgUfcGfaUfgAfcuuUfcAfcAfuUfcsusg | 305 | |
| AD-65665.1 | gsasaugugaaadGucaucdGadCaaL96 | 189 | usUfsgUfcGfaUfgAfcuuUfcAfcAfuUfcsusg | 306 | |
| AD-65628.1 | gsasaugugaaadGucaucdTadCaaL96 | 190 | usUfsgUfcGfaUfgAfcuuUfcAfcAfuUfcsusg | 307 | |
| AD-65634.1 | gsasaugugaaadGucaucY34adCaaL96 | 191 | usUfsgUfcGfaUfgAfcuuUfcAfcAfuUfcsusg | 308 | |
| AD-65646.1 | GfsasAfuGfuGfaAfAfGfuCfaUfcGfaCfaAfL96 | 192 | usdTsgucgaugdAcuudTcacauucsusg | 309 | |
| AD-65656.1 | GfsasAfuGfuGfaAfAfGfuCfaUfcGfaCfaAfL96 | 193 | usUsgucgaugacuudTcacauucsusg | 310 | |
| AD-65661.1 | GfsasAfuGfuGfaAfAfGfuCfaUfcGfaCfaAfL96 | 194 | usdTsgucdGaugacuudTcacauucsusg | 311 | |
| AD-65666.1 | GfsasAfuGfuGfaAfAfGfuCfaUfcGfaCfaAfL96 | 195 | usUsgucdGaugacuudTcacauucsusg | 312 | |
| AD-65629.1 | GfsasAfuGfuGfaAfAfGfuCfaUfcGfaCfaAfL96 | 196 | usdTsgucgaugacuudTcdAcauucsusg | 313 | |
| AD-65635.1 | GfsasAfuGfuGfaAfAfGfuCfaUfcGfaCfaAfL96 | 197 | usdTsgucdGaugacuudTcdAcauucsusg | 314 | |
| AD-65641.1 | gsasaugugaaadGucau(Cgn)gacaaL96 | 198 | usdTsgucgaugdAcuudTcacauucsusg | 315 | |
| AD-62994.1 | GfsasCfuUfuCfaUfCfCfuGfgAfaAfuAfuAfL96 | 199 | usAfsuAfuUfuCfcAfggaUfgAfaAfgUfcscsa | 316 | |
| AD-65595.1 | gsascuuuCfaUfCfCfuggaAfauauaL96 | 200 | usAfsuAfuUfuCfcAfggaUfgAfaAfgUfcscsa | 317 | |
| AD-65600.1 | gsascuuuCfaUfCfCfuggaaauauaL96 | 201 | usAfsuAfuUfuCfcAfggaUfgAfaAfgUfcscsa | 318 | |
| AD-65610.1 | gsascuuuCfaucCfuggaaAfuauaL96 | 202 | usAfsuAfuUfuCfcAfggaUfgAfaAfgUfcscsa | 319 | |
| AD-65615.1 | gsascuuucaucCfuggaaAfuauaL96 | 203 | usAfsuAfuUfuCfcAfggaUfgAfaAfgUfcscsa | 320 | |
| AD-65620.1 | gsascuuuCfaucCfuggaaauauaL96 | 204 | usAfsuAfuUfuCfcAfggaUfgAfaAfgUfcscsa | 321 | |
| AD-65584.1 | CfsusUfuCfaUfCfCfuGfgAfaAfuAfuAfL96 | 205 | usAfsuAfuUfuCfcAfggaUfgAfaAfgsusc | 322 | |
| AD-65590.1 | csusuuCfaUfCfCfuggaaauauaL96 | 206 | usAfsuauUfuccaggaUfgAfaagsusc | 323 | |
| AD-65596.1 | GfsasCfuUfuCfaUfCfCfuGfgAfaAfuAfuAfL96 | 207 | usAfsuauUfuCfcAfggaUfgAfaagucscsa | 324 | |
| AD-65601.1 | GfsasCfuUfuCfaUfCfCfuGfgAfaAfuAfuAfL96 | 208 | usAfsuauUfuCfCfaggaUfgAfaagucscsa | 325 | |
| AD-65606.1 | GfsasCfuUfuCfaUfCfCfuGfgAfaAfuAfuAfL96 | 209 | usAfsuauUfuccaggaUfgAfaagucscsa | 326 | |
| AD-65611.1 | GfsasCfuUfuCfaUfCfCfuGfgAfaAfuAfuAfL96 | 210 | usAfsuauUfuccaggaUfgaaagucscsa | 327 | |
| AD-65616.1 | GfsasCfuUfuCfaUfCfCfuGfgAfaAfuAfuAfL96 | 211 | usAfsuauuuccaggaUfgaaagucscsa | 328 | |
| AD-65621.1 | gsascuuuCfaUfCfCfuggaaauauaL96 | 212 | usAfsuauUfuCfcAfggaUfgAfaagucscsa | 329 | |
| AD-65585.1 | gsascuuuCfaUfCfCfuggaaauauaL96 | 213 | usAfsuauUfuCfCfaggaUfgAfaagucscsa | 330 | |
| AD-65591.1 | gsascuuuCfaUfCfCfuggaaauauaL96 | 214 | usAfsuauUfuccaggaUfgAfaagucscsa | 331 | |
| AD-65597.1 | gsascuuuCfauCfCfuggaaauauaL96 | 215 | usAfsuauUfuCfcAfggaUfgAfaagucscsa | 332 | |
| AD-65602.1 | gsascuuuCfauCfCfuggaaauauaL96 | 216 | usAfsuauUfuCfCfaggaUfgAfaagucscsa | 333 | |
| AD-65607.1 | gsascuuuCfauCfCfuggaaauauaL96 | 217 | usAfsuauUfuccaggaUfgAfaagucscsa | 334 | |
| AD-65612.1 | gsascuuucauccuggaa(Agn)uauaL96 | 218 | usAfsuAfuUfuCfcAfggaUfgAfaAfgUfcscsa | 335 | |
| AD-65622.1 | gsascuuucaucdCuggaa(Agn)uauaL96 | 219 | usAfsuAfuUfuCfcAfggaUfgAfaAfgUfcscsa | 336 | |
| AD-65586.1 | gsascudTucaucdCuggaa(Agn)uauaL96 | 220 | usAfsuAfuUfuCfcAfggaUfgAfaAfgUfcscsa | 337 | |
| AD-65592.1 | gsascuudTcaucdCuggaa(Agn)uauaL96 | 221 | usAfsuAfuUfuCfcAfggaUfgAfaAfgUfcscsa | 338 | |
| AD-65598.1 | gsascuuudCaucdCuggaa(Agn)uauaL96 | 222 | usAfsuAfuUfuCfcAfggaUfgAfaAfgUfcscsa | 339 | |
| AD-65603.1 | gsascuuucaucdCuggaadAuauaL96 | 223 | usAfsuAfuUfuCfcAfggaUfgAfaAfgUfcscsa | 340 | |
| AD-65608.1 | gsascuuucaucdCuggaadTuauaL96 | 224 | usAfsuAfuUfuCfcAfggaUfgAfaAfgUfcscsa | 341 | |
| AD-65613.1 | gsascuuucaucdCuggaaY34uauaL96 | 225 | usAfsuAfuUfuCfcAfggaUfgAfaAfgUfcscsa | 342 | |
| AD-65618.1 | gsascuuucaucdCuggdAadTuauaL96 | 226 | usAfsuAfuUfuCfcAfggaUfgAfaAfgUfcscsa | 343 | |
| AD-65623.1 | gsascuuucaucdCuggaadTudAuaL96 | 227 | usAfsuAfuUfuCfcAfggaUfgAfaAfgUfcscsa | 344 | |
| AD-65587.1 | gsascuuucaucdCuggaa(Agn)udAuaL96 | 228 | usAfsuAfuUfuCfcAfggaUfgAfaAfgUfcscsa | 345 | |
| AD-65593.1 | gsascuudTcaucdCuggaadAudAuaL96 | 229 | usAfsuAfuUfuCfcAfggaUfgAfaAfgUfcscsa | 346 | |
| AD-65599.1 | GfsasCfuUfuCfaUfCfCfuGfgAfaAfuAfuAfL96 | 230 | usdAsuauuuccdAggadTgaaagucscsa | 347 | |
| AD-65604.1 | GfsasCfuUfuCfaUfCfCfuGfgAfaAfuAfuAfL96 | 231 | usdAsuauuuccaggadTgaaagucscsa | 348 | |
| AD-65609.1 | GfsasCfuUfuCfaUfCfCfuGfgAfaAfuAfuAfL96 | 232 | usAsuauuuccaggadTgaaagucscsa | 349 | |
| AD-65614.1 | GfsasCfuUfuCfaUfCfCfuGfgAfaAfuAfuAfL96 | 233 | usdAsuaudTuccaggadTgaaagucscsa | 350 | |
| AD-65619.1 | GfsasCfuUfuCfaUfCfCfuGfgAfaAfuAfuAfL96 | 234 | usAsuaudTuccaggadTgaaagucscsa | 351 | |
| AD-65624.1 | GfsasCfuUfuCfaUfCfCfuGfgAfaAfuAfuAfL96 | 235 | usdAsuauuuccaggadTgdAaagucscsa | 352 | |
| AD-65588.1 | GfsasCfuUfuCfaUfCfCfuGfgAfaAfuAfuAfL96 | 236 | usdAsuaudTuccaggadTgdAaagucscsa | 353 | |
| AD-65594.1 | gsascuuucaucdCuggaa(Agn)uauaL96 | 237 | usdAsuauuuccdAggadTgaaagucscsa | 354 | |
| AD-68309.1 | asgsaaagGfuGfUfUfcaagaugucaL96 | 238 | usGfsacaUfcUfUfgaacAfcCfuuucuscsc | 355 | |
| AD-68303.1 | csasuccuGfgAfAfAfuauauuaacuL96 | 239 | asGfsuuaAfuAfUfauuuCfcAfggaugsasa | 356 | |
| AD-65626.5 | gsasauguGfaAfAfGfucaucgacaaL96 | 240 | usUfsgucGfaUfGfacuuUfcAfcauucsusg | 357 | |
| AD-68295.1 | asgsugcaCfaAfUfAfuuuucccauaL96 | 241 | usAfsuggGfaAfAfauauUfgUfgcacusgsu | 358 | |
| AD-68273.1 | gsasaaguCfaUfCfGfacaagacauuL96 | 242 | asAfsuguCfuUfGfucgaUfgAfcuuucsasc | 359 | |
| AD-68297.1 | asasugugAfaAfGfUfcaucgacaaaL96 | 243 | usUfsuguCfgAfUfgacuUfuCfacauuscsu | 360 | |
| AD-68287.1 | csusggaaAfuAfUfAfuuaacuguuaL96 | 244 | usAfsacaGfuUfAfauauAfuUfuccagsgsa | 361 | |
| AD-68300.1 | asusuuucCfcAfUfCfuguauuauuuL96 | 245 | asAfsauaAfuAfCfagauGfgGfaaaausasu | 362 | |
| AD-68306.1 | usgsucguUfcUfUfUfuccaacaaaaL96 | 246 | usUfsuugUfuGfGfaaaaGfaAfcgacascsc | 363 | |
| AD-68292.1 | asusccugGfaAfAfUfauauuaacuaL96 | 247 | usAfsguuAfaUfAfuauuUfcCfaggausgsa | 364 | |
| AD-68298.1 | gscsauuuUfgAfGfAfggugaugauaL96 | 248 | usAfsucaUfcAfCfcucuCfaAfaaugcscsc | 365 | |
| AD-68277.1 | csasggggGfaGfAfAfagguguucaaL96 | 249 | usUfsgaaCfaCfCfuuucUfcCfcccugsgsa | 366 | |
| AD-68289.1 | gsgsaaauAfuAfUfUfaacuguuaaaL96 | 250 | usUfsuaaCfaGfUfuaauAfuAfuuuccsasg | 367 | |
| AD-68272.1 | csasuuggUfgAfGfGfaaaaauccuuL96 | 251 | asAfsggaUfuUfUfuccuCfaCfcaaugsusc | 368 | |
| AD-68282.1 | gsgsgagaAfaGfGfUfguucaagauaL96 | 252 | usAfsucuUfgAfAfcaccUfuUfcucccscsc | 369 | |
| AD-68285.1 | gsgscauuUfuGfAfGfaggugaugauL96 | 253 | asUfscauCfaCfCfucucAfaAfaugccscsu | 370 | |
| AD-68290.1 | usascaaaGfgGfUfGfucguucuuuuL96 | 254 | asAfsaagAfaCfGfacacCfcUfuuguasusu | 371 | |
| AD-68296.1 | usgsggauCfuUfGfGfugucgaaucaL96 | 255 | usGfsauuCfgAfCfaccaAfgAfucccasusu | 372 | |
| AD-68288.1 | csusgacaGfuGfCfAfcaauauuuuaL96 | 256 | usAfsaaaUfaUfUfgugcAfcUfgucagsasu | 373 | |
| AD-68299.1 | csasgugcAfcAfAfUfauuuucccauL96 | 257 | asUfsgggAfaAfAfuauuGfuGfcacugsusc | 374 | |
| AD-68275.1 | ascsuuuuCfaAfUfGfgguguccuaaL96 | 258 | usUfsaggAfcAfCfccauUfgAfaaaguscsa | 375 | |
| AD-68274.1 | ascsauugGfuGfAfGfgaaaaauccuL96 | 259 | asGfsgauUfuUfUfccucAfcCfaauguscsu | 376 | |
| AD-68294.1 | ususgcuuUfuGfAfCfuuuucaaugaL96 | 260 | usCfsauuGfaAfAfagucAfaAfagcaasusg | 377 | |
| AD-68302.1 | csasuuuuGfaGfAfGfgugaugaugaL96 | 261 | usCfsaucAfuCfAfccucUfcAfaaaugscsc | 378 | |
| AD-68279.1 | ususgacuUfuUfCfAfaugggugucaL96 | 262 | usGfsacaCfcCfAfuugaAfaAfgucaasasa | 379 | |
| AD-68304.1 | csgsacuuCfuGfUfUfuuaggacagaL96 | 263 | usCfsuguCfcUfAfaaacAfgAfagucgsasc | 380 | |
| AD-68286.1 | csuscugaGfuGfGfGfugccagaauaL96 | 264 | usAfsuucUfgGfCfacccAfcUfcagagscsc | 381 | |
| AD-68291.1 | gsgsgugcCfaGfAfAfugugaaaguaL96 | 265 | usAfscuuUfcAfCfauucUfgGfcacccsasc | 382 | |
| AD-68283.1 | uscsaaugGfgUfGfUfccuaggaacaL96 | 266 | usGfsuucCfuAfGfgacaCfcCfauugasasa | 383 | |
| AD-68280.1 | asasagucAfuCfGfAfcaagacauuaL96 | 267 | usAfsaugUfcUfUfgucgAfuGfacuuuscsa | 384 | |
| AD-68293.1 | asusuuugAfgAfGfGfugaugaugcaL96 | 268 | usGfscauCfaUfCfaccuCfuCfaaaausgsc | 385 | |
| AD-68276.1 | asuscgacAfaGfAfCfauuggugagaL96 | 269 | usCfsucaCfcAfAfugucUfuGfucgausgsa | 386 | |
| AD-68308.1 | gsgsugccAfgAfAfUfgugaaagucaL96 | 270 | usGfsacuUfuCfAfcauuCfuGfgcaccscsa | 387 | |
| AD-68278.1 | gsascaguGfcAfCfAfauauuuuccaL96 | 271 | usGfsgaaAfaUfAfuuguGfcAfcugucsasg | 388 | |
| AD-68307.1 | ascsaaagAfgAfCfAfcugugcagaaL96 | 272 | usUfscugCfaCfAfguguCfuCfuuuguscsa | 389 | |
| AD-68284.1 | ususuucaAfuGfGfGfuguccuaggaL96 | 273 | usCfscuaGfgAfCfacccAfuUfgaaaasgsu | 390 | |
| AD-68301.1 | cscsguuuCfcAfAfGfaucugacaguL96 | 274 | asCfsuguCfaGfAfucuuGfgAfaacggscsc | 391 | |
| AD-68281.1 | asgsggggAfgAfAfAfgguguucaaaL96 | 275 | usUfsugaAfcAfCfcuuuCfuCfccccusgsg | 392 | |
| AD-68305.1 | asgsucauCfgAfCfAfagacauugguL96 | 276 | asCfscaaUfgUfCfuuguCfgAfugacususu | 393 | |

TABLE 9
Unmodified Human/Mouse/Cyno/Rat, Human/Mouse/Cyno, and
Human/Cyno Cross-Reactive HAO1 iRNA Sequences

| | SEQ | Sense | SEQ | Antisense | |
|---|---|---|---|---|---|
| Duplex | ID | Strand Sequence | ID | Strand Sequence | Position in |
| Name | NO: | 5′ to 3′ | NO: | 5′ to 3′ | NM_017545.2 |
| AD-62933 | 394 | GAAUGUGAAAGUCAUCGACAA | 443 | UUGUCGAUGACUUUCACAUUCUG | 1072-1094 |
| AD-62939 | 395 | UUUUCAAUGGGUGUCCUAGGA | 444 | UCCUAGGACACCCAUUGAAAAGU | 1302-1324 |
| AD-62944 | 396 | GAAAGUCAUCGACAAGACAUU | 445 | AAUGUCUUGUCGAUGACUUUCAC | 1078-1100 |
| AD-62949 | 397 | UCAUCGACAAGACAUUGGUGA | 446 | UCACCAAUGUCUUGUCGAUGACU | 1083-1105 |
| AD-62954 | 398 | UUUCAAUGGGUGUCCUAGGAA | 447 | UUCCUAGGACACCCAUUGAAAAG | 1303-1325 |
| AD-62959 | 399 | AAUGGGUGUCCUAGGAACCUU | 448 | AAGGUUCCUAGGACACCCAUUGA | 1307-1329 |
| AD-62964 | 400 | GACAGUGCACAAUAUUUUCCA | 449 | UGGAAAAUAUUGUGCACUGUCAG | 1134-1156_C21A |
| AD-62969 | 401 | ACUUUUCAAUGGGUGUCCUAA | 450 | UUAGGACACCCAUUGAAAAGUCA | 1300-1322_G21A |
| AD-62934 | 402 | AAGUCAUCGACAAGACAUUGA | 451 | UCAAUGUCUUGUCGAUGACUUUC | 1080-1102_G21A |
| AD-62940 | 403 | AUCGACAAGACAUUGGUGAGA | 452 | UCUCACCAAUGUCUUGUCGAUGA | 1085-1107_G21A |
| AD-62945 | 404 | GGGAGAAAGGUGUUCAAGAUA | 453 | UAUCUUGAACACCUUUCUCCCCC | 996-1018_G21A |
| AD-62950 | 405 | CUUUUCAAUGGGUGUCCUAGA | 454 | UCUAGGACACCCAUUGAAAAGUC | 1301-1323_G21A |
| AD-62955 | 406 | UCAAUGGGUGUCCUAGGAACA | 455 | UGUUCCUAGGACACCCAUUGAAA | 1305-1327_C21A |
| AD-62960 | 407 | UUGACUUUUCAAUGGGUGUCA | 456 | UGACACCCAUUGAAAAGUCAAAA | 1297-1319_C21A |
| AD-62965 | 408 | AAAGUCAUCGACAAGACAUUA | 457 | UAAUGUCUUGUCGAUGACUUUCA | 1079-1101_G21A |
| AD-62970 | 409 | CAGGGGGAGAAAGGUGUUCAA | 458 | UUGAACACCUUUCUCCCCCUGGA | 992-1014 |
| AD-62935 | 410 | CAUUGGUGAGGAAAAAUCCUU | 459 | AAGGAUUUUUCCUCACCAAUGUC | 1095-1117 |
| AD-62941 | 411 | ACAUUGGUGAGGAAAAAUCCU | 460 | AGGAUUUUUCCUCACCAAUGUCU | 1094-1116 |
| AD-62946 | 412 | AGGGGGAGAAAGGUGUUCAAA | 461 | UUUGAACACCUUUCUCCCCCUGG | 993-1015_G21A |
| AD-62974 | 413 | CUCAGGAUGAAAAAUUUUGAA | 462 | UUCAAAAUUUUUCAUCCUGAGUU | 563-585 |
| AD-62978 | 414 | CAGCAUGUAUUACUUGACAAA | 463 | UUUGUCAAGUAAUACAUGCUGAA | 1173-1195 |
| AD-62982 | 415 | UAUGAACAACAUGCUAAAUCA | 464 | UGAUUUAGCAUGUUGUUCAUAAU | 53-75 |
| AD-62986 | 416 | AUAUAUCCAAAUGUUUUAGGA | 465 | UCCUAAAACAUUUGGAUAUAUUC | 1679-1701 |
| AD-62990 | 417 | CCAGAUGGAAGCUGUAUCCAA | 466 | UUGGAUACAGCUUCCAUCUGGAA | 156-178 |
| AD-62994 | 418 | GACUUUCAUCCUGGAAAUAUA | 467 | UAUAUUUCCAGGAUGAAAGUCCA | 1341-1363 |
| AD-62998 | 419 | CCCCGGCUAAUUUGUAUCAAU | 468 | AUUGAUACAAAUUAGCCGGGGGA | 29-51 |
| AD-63002 | 420 | UUAAACAUGGCUUGAAUGGGA | 469 | UCCCAUUCAAGCCAUGUUUAACA | 765-787 |
| AD-62975 | 421 | AAUGUGUUUAGACAACGUCAU | 470 | AUGACGUUGUCUAAACACAUUUU | 1388-1410 |
| AD-62979 | 422 | ACUAAAGGAAGAAUUCCGGUU | 471 | AACCGGAAUUCUUCCUUUAGUAU | 1027-1049 |
| AD-62983 | 423 | UAUAUCCAAAUGUUUUAGGAU | 472 | AUCCUAAAACAUUUGGAUAUAUU | 1680-1702 |
| AD-62987 | 424 | GUGCGGAAAGGCACUGAUGUU | 473 | AACAUCAGUGCCUUUCCGCACAC | 902-924 |
| AD-62991 | 425 | UAAAACAGUGGUUCUUAAAUU | 474 | AAUUUAAGAACCACUGUUUUAAA | 1521-1543 |
| AD-62995 | 426 | AUGAAAAAUUUUGAAACCAGU | 475 | ACUGGUUUCAAAAUUUUUCAUCC | 569-591 |
| AD-62999 | 427 | AACAAAAUAGCAAUCCCUUUU | 476 | AAAAGGGAUUGCUAUUUUGUUGG | 1264-1286 |
| AD-63003 | 428 | CUGAAACAGAUCUGUCGACUU | 477 | AAGUCGACAGAUCUGUUUCAGCA | 195-217 |
| AD-62976 | 429 | UUGUUGCAAAGGGCAUUUUGA | 478 | UCAAAAUGCCCUUUGCAACAAUU | 720-742 |
| AD-62980 | 430 | CUCAUUGUUUAUUAACCUGUA | 479 | UACAGGUUAAUAAACAAUGAGAU | 1483-1505 |
| AD-62984 | 431 | CAACAAAAUAGCAAUCCCUUU | 480 | AAAGGGAUUGCUAUUUUGUUGGA | 1263-1285 |
| AD-62992 | 432 | CAUUGUUUAUUAACCUGUAUU | 481 | AAUACAGGUUAAUAAACAAUGAG | 1485-1507 |
| AD-62996 | 433 | UAUCAGCUGGGAAGAUAUCAA | 482 | UUGAUAUCUUCCCAGCUGAUAGA | 670-692 |
| AD-63000 | 434 | UGUCCUAGGAACCUUUUAGAA | 483 | UUCUAAAAGGUUCCUAGGACACC | 1313-1335 |
| AD-63004 | 435 | UCCAACAAAAUAGCAAUCCCU | 484 | AGGGAUUGCUAUUUUGUUGGAAA | 1261-1283 |
| AD-62977 | 436 | GGUGUGCGGAAAGGCACUGAU | 485 | AUCAGUGCCUUUCCGCACACCCC | 899-921 |
| AD-62981 | 437 | UUGAAACCAGUACUUUAUCAU | 486 | AUGAUAAAGUACUGGUUUCAAAA | 579-601 |
| AD-62985 | 438 | UACUUCCAAAGUCUAUAUAUA | 487 | UAUAUAUAGACUUUGGAAGUACU | 75-97_G21A |
| AD-62989 | 439 | UCCUAGGAACCUUUUAGAAAU | 488 | AUUUCUAAAAGGUUCCUAGGACA | 1315-1337_G21U |
| AD-62993 | 440 | CUCCUGAGGAAAAUUUUGGAA | 489 | UUCCAAAAUUUUCCUCAGGAGAA | 603-625_G21A |
| AD-62997 | 441 | GCUCCGGAAUGUUGCUGAAAU | 490 | AUUUCAGCAACAUUCCGGAGCAU | 181-203_C21U |
| AD-63001 | 442 | GUGUUUGUGGGGAGACCAAUA | 491 | UAUUGGUCUCCCCACAAACACAG | 953-975_C21A |

TABLE 10
Unmodified Mouse and Mouse/Rat HAO1 iRNA Sequences

| | SEQ | Sense | SEQ | Antisense | |
|---|---|---|---|---|---|
| Duplex | ID | strand sequence | ID | strand sequence | Position in |
| Name | NO: | 5′ to 3′ | NO: | 5′ to 3′ | NM_010403.2 |
| AD-62951 | 492 | AUGGUGGUAAUUUGUGAUUUU | 514 | AAAAUCACAAAUUACCACCAUCC | 1642-1664 |
| AD-62956 | 493 | GACUUGCAUCCUGGAAAUAUA | 515 | UAUAUUUCCAGGAUGCAAGUCCA | 1338-1360 |
| AD-62961 | 494 | GGAAGGGAAGGUAGAAGUCUU | 516 | AAGACUUCUACCUUCCCUUCCAC | 864-886 |
| AD-62966 | 495 | UGUCUUCUGUUUAGAUUUCCU | 517 | AGGAAAUCUAAACAGAAGACAGG | 1506-1528 |
| AD-62971 | 496 | CUUUGGCUGUUUCCAAGAUCU | 518 | AGAUCUUGGAAACAGCCAAAGGA | 1109-1131 |
| AD-62936 | 497 | AAUGUGUUUGGGCAACGUCAU | 519 | AUGACGUUGCCCAAACACAUUUU | 1385-1407 |
| AD-62942 | 498 | UGUGACUGUGGACACCCCUUA | 520 | UAAGGGGUGUCCACAGUCACAAA | 486-508 |
| AD-62947 | 499 | GAUGGGGUGCCAGCUACUAUU | 521 | AAUAGUAGCUGGCACCCCAUCCA | 814-836 |
| AD-62952 | 500 | GAAAAUGUGUUUGGGCAACGU | 522 | ACGUUGCCCAAACACAUUUUCAA | 1382-1404 |
| AD-62957 | 501 | GGCUGUUUCCAAGAUCUGACA | 523 | UGUCAGAUCUUGGAAACAGCCAA | 1113-1135 |
| AD-62962 | 502 | UCCAACAAAAUAGCCACCCCU | 524 | AGGGGUGGCUAUUUUGUUGGAAA | 1258-1280 |
| AD-62967 | 503 | GUCUUCUGUUUAGAUUUCCUU | 525 | AAGGAAAUCUAAACAGAAGACAG | 1507-1529 |
| AD-62972 | 504 | UGGAAGGGAAGGUAGAAGUCU | 526 | AGACUUCUACCUUCCCUUCCACA | 863-885 |
| AD-62937 | 505 | UCCUUUGGCUGUUUCCAAGAU | 527 | AUCUUGGAAACAGCCAAAGGAUU | 1107-1129 |
| AD-62943 | 506 | CAUCUCUCAGCUGGGAUGAUA | 528 | UAUCAUCCCAGCUGAGAGAUGGG | 662-684 |
| AD-62948 | 507 | GGGGUGCCAGCUACUAUUGAU | 529 | AUCAAUAGUAGCUGGCACCCCAU | 817-839 |
| AD-62953 | 508 | AUGUGUUUGGGCAACGUCAUA | 530 | UAUGACGUUGCCCAAACACAUUU | 1386-1408_C21A |
| AD-62958 | 509 | CUGUUUAGAUUUCCUUAAGAA | 531 | UUCUUAAGGAAAUCUAAACAGAA | 1512-1534_C21A |
| AD-62963 | 510 | AGAAAGAAAUGGACUUGCAUA | 532 | UAUGCAAGUCCAUUUCUUUCUAG | 1327-1349_C21A |
| AD-62968 | 511 | GCAUCCUGGAAAUAUAUUAAA | 533 | UUUAAUAUAUUUCCAGGAUGCAA | 1343-1365_C21A |
| AD-62973 | 512 | CCUGUCAGACCAUGGGAACUA | 534 | UAGUUCCCAUGGUCUGACAGGCU | 308-330_G21A |
| AD-62938 | 513 | AAACAUGGUGUGGAUGGGAUA | 535 | UAUCCCAUCCACACCAUGUUUAA | 763-785_C21A |

TABLE 11
Additional Unmodified Human/Cyno/Mouse/Rat, Human/Mouse/Cyno,
Human/Cyno, and Mouse/Rat

| Duplex | SEQ ID | Sense stran | SEQ ID | Antisense strand | Position in |
|---|---|---|---|---|---|
| Name | NO: | dsequence 5′ to 3′ | NO: | sequence 5′ to 3′ | NM_017545.2 |
| AD-62933.2 | 394 | GAAUGUGAAAGUCAUCGACAA | 443 | UUGUCGAUGACUUUCACAUUCUG | 1072-1094 |
| AD-62939.2 | 395 | UUUUCAAUGGGUGUCCUAGGA | 444 | UCCUAGGACACCCAUUGAAAAGU | 1302-1324 |
| AD-62944.2 | 396 | GAAAGUCAUCGACAAGACAUU | 445 | AAUGUCUUGUCGAUGACUUUCAC | 1078-1100 |
| AD-62949.2 | 397 | UCAUCGACAAGACAUUGGUGA | 446 | UCACCAAUGUCUUGUCGAUGACU | 1083-1105 |
| AD-62954.2 | 398 | UUUCAAUGGGUGUCCUAGGAA | 447 | UUCCUAGGACACCCAUUGAAAAG | 1303-1325 |
| AD-62959.2 | 399 | AAUGGGUGUCCUAGGAACCUU | 448 | AAGGUUCCUAGGACACCCAUUGA | 1307-1329 |
| AD-62964.2 | 400 | GACAGUGCACAAUAUUUUCCA | 449 | UGGAAAAUAUUGUGCACUGUCAG | 1134-1156_C21A |
| AD-62969.2 | 401 | ACUUUUCAAUGGGUGUCCUAA | 450 | UUAGGACACCCAUUGAAAAGUCA | 1300-1322_G21A |
| AD-62934.2 | 402 | AAGUCAUCGACAAGACAUUGA | 451 | UCAAUGUCUUGUCGAUGACUUUC | 1080-1102_G21A |
| AD-62940.2 | 403 | AUCGACAAGACAUUGGUGAGA | 452 | UCUCACCAAUGUCUUGUCGAUGA | 1085-1107_G21A |
| AD-62945.2 | 404 | GGGAGAAAGGUGUUCAAGAUA | 453 | UAUCUUGAACACCUUUCUCCCCC | 996-1018_G21A |
| AD-62950.2 | 405 | CUUUUCAAUGGGUGUCCUAGA | 454 | UCUAGGACACCCAUUGAAAAGUC | 1301-1323_G21A |
| AD-62955.2 | 406 | UCAAUGGGUGUCCUAGGAACA | 455 | UGUUCCUAGGACACCCAUUGAAA | 1305-1327_C21A |
| AD-62960.2 | 407 | UUGACUUUUCAAUGGGUGUCA | 456 | UGACACCCAUUGAAAAGUCAAAA | 1297-1319_C21A |
| AD-62965.2 | 408 | AAAGUCAUCGACAAGACAUUA | 457 | UAAUGUCUUGUCGAUGACUUUCA | 1079-1101_G21A |
| AD-62970.2 | 409 | CAGGGGGAGAAAGGUGUUCAA | 458 | UUGAACACCUUUCUCCCCCUGGA | 992-1014 |
| AD-62935.2 | 410 | CAUUGGUGAGGAAAAAUCCUU | 459 | AAGGAUUUUUCCUCACCAAUGUC | 1095-1117 |
| AD-62941.2 | 411 | ACAUUGGUGAGGAAAAAUCCU | 460 | AGGAUUUUUCCUCACCAAUGUCU | 1094-1116 |
| AD-62946.2 | 412 | AGGGGGAGAAAGGUGUUCAAA | 461 | UUUGAACACCUUUCUCCCCCUGG | 993-1015_G21A |
| AD-62974.2 | 413 | CUCAGGAUGAAAAAUUUUGAA | 462 | UUCAAAAUUUUUCAUCCUGAGUU | 563-585 |
| AD-62978.2 | 414 | CAGCAUGUAUUACUUGACAAA | 463 | UUUGUCAAGUAAUACAUGCUGAA | 1173-1195 |
| AD-62982.2 | 415 | UAUGAACAACAUGCUAAAUCA | 464 | UGAUUUAGCAUGUUGUUCAUAAU | 53-75 |
| AD-62986.2 | 416 | AUAUAUCCAAAUGUUUUAGGA | 465 | UCCUAAAACAUUUGGAUAUAUUC | 1679-1701 |
| AD-62990.2 | 417 | CCAGAUGGAAGCUGUAUCCAA | 466 | UUGGAUACAGCUUCCAUCUGGAA | 156-178 |
| AD-62994.2 | 418 | GACUUUCAUCCUGGAAAUAUA | 467 | UAUAUUUCCAGGAUGAAAGUCCA | 1341-1363 |
| AD-62998.2 | 419 | CCCCGGCUAAUUUGUAUCAAU | 468 | AUUGAUACAAAUUAGCCGGGGGA | 29-51 |
| AD-63002.2 | 420 | UUAAACAUGGCUUGAAUGGGA | 469 | UCCCAUUCAAGCCAUGUUUAACA | 765-787 |
| AD-62975.2 | 421 | AAUGUGUUUAGACAACGUCAU | 470 | AUGACGUUGUCUAAACACAUUUU | 1388-1410 |
| AD-62979.2 | 422 | ACUAAAGGAAGAAUUCCGGUU | 471 | AACCGGAAUUCUUCCUUUAGUAU | 1027-1049 |
| AD-62983.2 | 423 | UAUAUCCAAAUGUUUUAGGAU | 472 | AUCCUAAAACAUUUGGAUAUAUU | 1680-1702 |
| AD-62987.2 | 424 | GUGCGGAAAGGCACUGAUGUU | 473 | AACAUCAGUGCCUUUCCGCACAC | 902-924 |
| AD-62991.2 | 425 | UAAAACAGUGGUUCUUAAAUU | 474 | AAUUUAAGAACCACUGUUUUAAA | 1521-1543 |
| AD-62995.2 | 426 | AUGAAAAAUUUUGAAACCAGU | 475 | ACUGGUUUCAAAAUUUUUCAUCC | 569-591 |
| AD-62999.2 | 427 | AACAAAAUAGCAAUCCCUUUU | 476 | AAAAGGGAUUGCUAUUUUGUUGG | 1264-1286 |
| AD-63003.2 | 428 | CUGAAACAGAUCUGUCGACUU | 477 | AAGUCGACAGAUCUGUUUCAGCA | 195-217 |
| AD-62976.2 | 429 | UUGUUGCAAAGGGCAUUUUGA | 478 | UCAAAAUGCCCUUUGCAACAAUU | 720-742 |
| AD-62980.2 | 430 | CUCAUUGUUUAUUAACCUGUA | 479 | UACAGGUUAAUAAACAAUGAGAU | 1483-1505 |
| AD-62984.2 | 431 | CAACAAAAUAGCAAUCCCUUU | 480 | AAAGGGAUUGCUAUUUUGUUGGA | 1263-1285 |
| AD-62992.2 | 432 | CAUUGUUUAUUAACCUGUAUU | 481 | AAUACAGGUUAAUAAACAAUGAG | 1485-1507 |
| AD-62996.2 | 433 | UAUCAGCUGGGAAGAUAUCAA | 482 | UUGAUAUCUUCCCAGCUGAUAGA | 670-692 |
| AD-63000.2 | 434 | UGUCCUAGGAACCUUUUAGAA | 483 | UUCUAAAAGGUUCCUAGGACACC | 1313-1335 |
| AD-63004.2 | 435 | UCCAACAAAAUAGCAAUCCCU | 484 | AGGGAUUGCUAUUUUGUUGGAAA | 1261-1283 |
| AD-62977.2 | 436 | GGUGUGCGGAAAGGCACUGAU | 485 | AUCAGUGCCUUUCCGCACACCCC | 899-921 |
| AD-62981.2 | 437 | UUGAAACCAGUACUUUAUCAU | 486 | AUGAUAAAGUACUGGUUUCAAAA | 579-601 |
| AD-62985.2 | 438 | UACUUCCAAAGUCUAUAUAUA | 487 | UAUAUAUAGACUUUGGAAGUACU | 75-97_G21A |
| AD-62989.2 | 439 | UCCUAGGAACCUUUUAGAAAU | 488 | AUUUCUAAAAGGUUCCUAGGACA | 1315-1337_G21U |
| AD-62993.2 | 440 | CUCCUGAGGAAAAUUUUGGAA | 489 | UUCCAAAAUUUUCCUCAGGAGAA | 603-625_G21A |
| AD-62997.2 | 441 | GCUCCGGAAUGUUGCUGAAAU | 490 | AUUUCAGCAACAUUCCGGAGCAU | 181-203_C21U |
| AD-63001.2 | 442 | GUGUUUGUGGGGAGACCAAUA | 491 | UAUUGGUCUCCCCACAAACACAG | 953-975_C21A |
| AD-62951.2 | 492 | AUGGUGGUAAUUUGUGAUUUU | 514 | AAAAUCACAAAUUACCACCAUCC | 1642-1664 |
| AD-62956.2 | 493 | GACUUGCAUCCUGGAAAUAUA | 515 | UAUAUUUCCAGGAUGCAAGUCCA | 1338-1360 |
| AD-62961.2 | 494 | GGAAGGGAAGGUAGAAGUCUU | 516 | AAGACUUCUACCUUCCCUUCCAC | 864-886 |
| AD-62966.2 | 495 | UGUCUUCUGUUUAGAUUUCCU | 517 | AGGAAAUCUAAACAGAAGACAGG | 1506-1528 |
| AD-62971.2 | 496 | CUUUGGCUGUUUCCAAGAUCU | 518 | AGAUCUUGGAAACAGCCAAAGGA | 1109-1131 |
| AD-62936.2 | 497 | AAUGUGUUUGGGCAACGUCAU | 519 | AUGACGUUGCCCAAACACAUUUU | 1385-1407 |
| AD-62942.2 | 498 | UGUGACUGUGGACACCCCUUA | 520 | UAAGGGGUGUCCACAGUCACAAA | 486-508 |
| AD-62947.2 | 499 | GAUGGGGUGCCAGCUACUAUU | 521 | AAUAGUAGCUGGCACCCCAUCCA | 814-836 |
| AD-62952.2 | 500 | GAAAAUGUGUUUGGGCAACGU | 522 | ACGUUGCCCAAACACAUUUUCAA | 1382-1404 |
| AD-62957.2 | 501 | GGCUGUUUCCAAGAUCUGACA | 523 | UGUCAGAUCUUGGAAACAGCCAA | 1113-1135 |
| AD-62962.2 | 502 | UCCAACAAAAUAGCCACCCCU | 524 | AGGGGUGGCUAUUUUGUUGGAAA | 1258-1280 |
| AD-62967.2 | 503 | GUCUUCUGUUUAGAUUUCCUU | 525 | AAGGAAAUCUAAACAGAAGACAG | 1507-1529 |
| AD-62972.2 | 504 | UGGAAGGGAAGGUAGAAGUCU | 526 | AGACUUCUACCUUCCCUUCCACA | 863-885 |
| AD-62937.2 | 505 | UCCUUUGGCUGUUUCCAAGAU | 527 | AUCUUGGAAACAGCCAAAGGAUU | 1107-1129 |
| AD-62943.2 | 506 | CAUCUCUCAGCUGGGAUGAUA | 528 | UAUCAUCCCAGCUGAGAGAUGGG | 662-684 |
| AD-62948.2 | 507 | GGGGUGCCAGCUACUAUUGAU | 529 | AUCAAUAGUAGCUGGCACCCCAU | 817-839 |
| AD-62953.2 | 508 | AUGUGUUUGGGCAACGUCAUA | 530 | UAUGACGUUGCCCAAACACAUUU | 1386-1408_C21A |
| AD-62958.2 | 509 | CUGUUUAGAUUUCCUUAAGAA | 531 | UUCUUAAGGAAAUCUAAACAGAA | 1512-1534_C21A |
| AD-62963.2 | 510 | AGAAAGAAAUGGACUUGCAUA | 532 | UAUGCAAGUCCAUUUCUUUCUAG | 1327-1349_C21A |
| AD-62968.2 | 511 | GCAUCCUGGAAAUAUAUUAAA | 533 | UUUAAUAUAUUUCCAGGAUGCAA | 1343-1365_C21A |
| AD-62973.2 | 512 | CCUGUCAGACCAUGGGAACUA | 534 | UAGUUCCCAUGGUCUGACAGGCU | 308-330_G21A |
| AD-62938.2 | 513 | AAACAUGGUGUGGAUGGGAUA | 535 | UAUCCCAUCCACACCAUGUUUAA | 763-785_C21A |
| AD-62933.1 | 536 | GAAUGUGAAAGUCAUCGACAA | 653 | UUGUCGAUGACUUUCACAUUCUG | 1072-1094 |
| AD-65630.1 | 537 | GAAUGUGAAAGUCAUCGACAA | 654 | UUGUCGAUGACUUUCACAUUCUG | 1072-1094 |
| AD-65636.1 | 538 | GAAUGUGAAAGUCAUCGACAA | 655 | UUGUCGAUGACUUUCACAUUCUG | 1072-1094 |
| AD-65642.1 | 539 | GAAUGUGAAAGUCAUCGACAA | 656 | UUGUCGAUGACUUUCACAUUCUG | 1072-1094 |
| AD-65647.1 | 540 | GAAUGUGAAAGUCAUCGACAA | 657 | UUGUCGAUGACUUUCACAUUCUG | 1072-1094 |
| AD-65652.1 | 541 | GAAUGUGAAAGUCAUCGACAA | 658 | UUGUCGAUGACUUUCACAUUCUG | 1072-1094 |
| AD-65657.1 | 542 | GAAUGUGAAAGUCAUCGACAA | 659 | UUGUCGAUGACUUUCACAUUCUG | 1072-1094 |
| AD-65662.1 | 543 | GAAUGUGAAAGUCAUCGACAA | 660 | UUGUCGAUGACUUUCACAUUCUG | 1072-1094 |
| AD-65625.1 | 544 | AUGUGAAAGUCAUCGACAA | 661 | UUGUCGAUGACUUUCACAUUC | 1072-1094 |
| AD-65631.1 | 545 | AUGUGAAAGUCAUCGACAA | 662 | UUGUCGAUGACUUUCACAUUC | 1072-1094 |
| AD-65637.1 | 546 | GAAUGUGAAAGUCAUCGACAA | 663 | UUGUCGAUGACUUUCACAUUCUG | 1072-1094 |
| AD-65643.1 | 547 | GAAUGUGAAAGUCAUCGACAA | 664 | UUGUCGAUGACUUUCACAUUCUG | 1072-1094 |
| AD-65648.1 | 548 | GAAUGUGAAAGUCAUCGACAA | 665 | UUGUCGAUGACUUUCACAUUCUG | 1072-1094 |
| AD-65653.1 | 549 | GAAUGUGAAAGUCAUCGACAA | 666 | UUGUCGAUGACUUUCACAUUCUG | 1072-1094 |
| AD-65658.1 | 550 | GAAUGUGAAAGUCAUCGACAA | 667 | UUGUCGAUGACUUUCACAUUCUG | 1072-1094 |
| AD-65663.1 | 551 | GAAUGUGAAAGUCAUCGACAA | 668 | UUGUCGAUGACUUUCACAUUCUG | 1072-1094 |
| AD-65626.1 | 552 | GAAUGUGAAAGUCAUCGACAA | 669 | UUGUCGAUGACUUUCACAUUCUG | 1072-1094 |
| AD-65638.1 | 553 | GAAUGUGAAAGUCAUCGACAA | 670 | UUGUCGAUGACUUUCACAUUCUG | 1072-1094 |
| AD-65644.1 | 554 | GAAUGUGAAAGUCAUCGACAA | 671 | UUGUCGAUGACUUUCACAUUCUG | 1072-1094 |
| AD-65649.1 | 555 | GAAUGUGAAAGUCAUCGACAA | 672 | UUGUCGAUGACUUUCACAUUCUG | 1072-1094 |
| AD-65654.1 | 556 | GAAUGUGAAAGUCAUCGACAA | 673 | UUGUCGAUGACUUUCACAUUCUG | 1072-1094 |
| AD-65659.1 | 557 | GAAUGTGAAAGUCAUCGACAA | 674 | UUGUCGAUGACUUUCACAUUCUG | 1072-1094 |
| AD-65627.1 | 558 | GAAUGUGAAAGUCAUCGACAA | 675 | UUGUCGAUGACUUUCACAUUCUG | 1072-1094 |
| AD-65633.1 | 559 | GAAUGTGAAAGUCAUCGACAA | 676 | UUGUCGAUGACUUUCACAUUCUG | 1072-1094 |
| AD-65639.1 | 560 | GAAUGUGAAAGUCAUCGACAA | 677 | UUGUCGAUGACUUUCACAUUCUG | 1072-1094 |
| AD-65645.1 | 561 | GAAUGUGAAAGUCAUCGACAA | 678 | UUGUCGAUGACUUUCACAUUCUG | 1072-1094 |
| AD-65650.1 | 562 | GAAUGUGAAAGUCAUCTACAA | 679 | UUGUCGAUGACUUUCACAUUCUG | 1072-1094 |
| AD-65655.1 | 563 | GAAUGUGAAAGUCAUCACAA | 680 | UUGUCGAUGACUUUCACAUUCUG | 1072-1094 |
| AD-65660.1 | 564 | GAAUGUGAAAGUCATCTACAA | 681 | UUGUCGAUGACUUUCACAUUCUG | 1072-1094 |
| AD-65665.1 | 565 | GAAUGUGAAAGUCAUCGACAA | 682 | UUGUCGAUGACUUUCACAUUCUG | 1072-1094 |
| AD-65628.1 | 566 | GAAUGUGAAAGUCAUCTACAA | 683 | UUGUCGAUGACUUUCACAUUCUG | 1072-1094 |
| AD-65634.1 | 567 | GAAUGUGAAAGUCAUCACAA | 684 | UUGUCGAUGACUUUCACAUUCUG | 1072-1094 |
| AD-65646.1 | 568 | GAAUGUGAAAGUCAUCGACAA | 685 | UTGUCGAUGACUUTCACAUUCUG | 1072-1094 |
| AD-65656.1 | 569 | GAAUGUGAAAGUCAUCGACAA | 686 | UUGUCGAUGACUUTCACAUUCUG | 1072-1094 |
| AD-65661.1 | 570 | GAAUGUGAAAGUCAUCGACAA | 687 | UTGUCGAUGACUUTCACAUUCUG | 1072-1094 |
| AD-65666.1 | 571 | GAAUGUGAAAGUCAUCGACAA | 688 | UUGUCGAUGACUUTCACAUUCUG | 1072-1094 |
| AD-65629.1 | 572 | GAAUGUGAAAGUCAUCGACAA | 689 | UTGUCGAUGACUUTCACAUUCUG | 1072-1094 |
| AD-65635.1 | 573 | GAAUGUGAAAGUCAUCGACAA | 690 | UTGUCGAUGACUUTCACAUUCUG | 1072-1094 |
| AD-65641.1 | 574 | GAAUGUGAAAGUCAUCGACAA | 691 | UTGUCGAUGACUUTCACAUUCUG | 1072-1094 |
| AD-62994.1 | 575 | GACUUUCAUCCUGGAAAUAUA | 692 | UAUAUUUCCAGGAUGAAAGUCCA | 1341-1363 |
| AD-65595.1 | 576 | GACUUUCAUCCUGGAAAUAUA | 693 | UAUAUUUCCAGGAUGAAAGUCCA | 1341-1363 |
| AD-65600.1 | 577 | GACUUUCAUCCUGGAAAUAUA | 694 | UAUAUUUCCAGGAUGAAAGUCCA | 1341-1363 |
| AD-65610.1 | 578 | GACUUUCAUCCUGGAAAUAUA | 695 | UAUAUUUCCAGGAUGAAAGUCCA | 1341-1363 |
| AD-65615.1 | 579 | GACUUUCAUCCUGGAAAUAUA | 696 | UAUAUUUCCAGGAUGAAAGUCCA | 1341-1363 |
| AD-65620.1 | 580 | GACUUUCAUCCUGGAAAUAUA | 697 | UAUAUUUCCAGGAUGAAAGUCCA | 1341-1363 |
| AD-65584.1 | 581 | CUUUCAUCCUGGAAAUAUA | 698 | UAUAUUUCCAGGAUGAAAGUC | 1341-1361 |
| AD-65590.1 | 582 | CUUUCAUCCUGGAAAUAUA | 699 | UAUAUUUCCAGGAUGAAAGUC | 1341-1361 |
| AD-65596.1 | 583 | GACUUUCAUCCUGGAAAUAUA | 700 | UAUAUUUCCAGGAUGAAAGUCCA | 1341-1363 |
| AD-65601.1 | 584 | GACUUUCAUCCUGGAAAUAUA | 701 | UAUAUUUCCAGGAUGAAAGUCCA | 1341-1363 |
| AD-65606.1 | 585 | GACUUUCAUCCUGGAAAUAUA | 702 | UAUAUUUCCAGGAUGAAAGUCCA | 1341-1363 |
| AD-65611.1 | 586 | GACUUUCAUCCUGGAAAUAUA | 703 | UAUAUUUCCAGGAUGAAAGUCCA | 1341-1363 |
| AD-65616.1 | 587 | GACUUUCAUCCUGGAAAUAUA | 704 | UAUAUUUCCAGGAUGAAAGUCCA | 1341-1363 |
| AD-65621.1 | 588 | GACUUUCAUCCUGGAAAUAUA | 705 | UAUAUUUCCAGGAUGAAAGUCCA | 1341-1363 |
| AD-65585.1 | 589 | GACUUUCAUCCUGGAAAUAUA | 706 | UAUAUUUCCAGGAUGAAAGUCCA | 1341-1363 |
| AD-65591.1 | 590 | GACUUUCAUCCUGGAAAUAUA | 707 | UAUAUUUCCAGGAUGAAAGUCCA | 1341-1363 |
| AD-65597.1 | 591 | GACUUUCAUCCUGGAAAUAUA | 708 | UAUAUUUCCAGGAUGAAAGUCCA | 1341-1363 |
| AD-65602.1 | 592 | GACUUUCAUCCUGGAAAUAUA | 709 | UAUAUUUCCAGGAUGAAAGUCCA | 1341-1363 |
| AD-65607.1 | 593 | GACUUUCAUCCUGGAAAUAUA | 710 | UAUAUUUCCAGGAUGAAAGUCCA | 1341-1363 |
| AD-65612.1 | 594 | GACUUUCAUCCUGGAAAUAUA | 711 | UAUAUUUCCAGGAUGAAAGUCCA | 1341-1363 |
| AD-65622.1 | 595 | GACUUUCAUCCUGGAAAUAUA | 712 | UAUAUUUCCAGGAUGAAAGUCCA | 1341-1363 |
| AD-65586.1 | 596 | GACUTUCAUCCUGGAAAUAUA | 713 | UAUAUUUCCAGGAUGAAAGUCCA | 1341-1363 |
| AD-65592.1 | 597 | GACUUTCAUCCUGGAAAUAUA | 714 | UAUAUUUCCAGGAUGAAAGUCCA | 1341-1363 |
| AD-65598.1 | 598 | GACUUUCAUCCUGGAAAUAUA | 715 | UAUAUUUCCAGGAUGAAAGUCCA | 1341-1363 |
| AD-65603.1 | 599 | GACUUUCAUCCUGGAAAUAUA | 716 | UAUAUUUCCAGGAUGAAAGUCCA | 1341-1363 |
| AD-65608.1 | 600 | GACUUUCAUCCUGGAATUAUA | 717 | UAUAUUUCCAGGAUGAAAGUCCA | 1341-1363 |
| AD-65613.1 | 601 | GACUUUCAUCCUGGAAUAUA | 718 | UAUAUUUCCAGGAUGAAAGUCCA | 1341-1363 |
| AD-65618.1 | 602 | GACUUUCAUCCUGGAATUAUA | 719 | UAUAUUUCCAGGAUGAAAGUCCA | 1341-1363 |
| AD-65623.1 | 603 | GACUUUCAUCCUGGAATUAUA | 720 | UAUAUUUCCAGGAUGAAAGUCCA | 1341-1363 |
| AD-65587.1 | 604 | GACUUUCAUCCUGGAAAUAUA | 721 | UAUAUUUCCAGGAUGAAAGUCCA | 1341-1363 |
| AD-65593.1 | 605 | GACUUTCAUCCUGGAAAUAUA | 722 | UAUAUUUCCAGGAUGAAAGUCCA | 1341-1363 |
| AD-65599.1 | 606 | GACUUUCAUCCUGGAAAUAUA | 723 | UAUAUUUCCAGGATGAAAGUCCA | 1341-1363 |
| AD-65604.1 | 607 | GACUUUCAUCCUGGAAAUAUA | 724 | UAUAUUUCCAGGATGAAAGUCCA | 1341-1363 |
| AD-65609.1 | 608 | GACUUUCAUCCUGGAAAUAUA | 725 | UAUAUUUCCAGGATGAAAGUCCA | 1341-1363 |
| AD-65614.1 | 609 | GACUUUCAUCCUGGAAAUAUA | 726 | UAUAUTUCCAGGATGAAAGUCCA | 1341-1363 |
| AD-65619.1 | 610 | GACUUUCAUCCUGGAAAUAUA | 727 | UAUAUTUCCAGGATGAAAGUCCA | 1341-1363 |
| AD-65624.1 | 611 | GACUUUCAUCCUGGAAAUAUA | 728 | UAUAUUUCCAGGATGAAAGUCCA | 1341-1363 |
| AD-65588.1 | 612 | GACUUUCAUCCUGGAAAUAUA | 729 | UAUAUTUCCAGGATGAAAGUCCA | 1341-1363 |
| AD-65594.1 | 613 | GACUUUCAUCCUGGAAAUAUA | 730 | UAUAUUUCCAGGATGAAAGUCCA | 1341-1363 |
| AD-68309.1 | 614 | AGAAAGGUGUUCAAGAUGUCA | 731 | UGACAUCUUGAACACCUUUCUCC | 1001-1022_C21A |
| AD-68303.1 | 615 | CAUCCUGGAAAUAUAUUAACU | 732 | AGUUAAUAUAUUUCCAGGAUGAA | 1349-1370 |
| AD-65626.5 | 616 | GAAUGUGAAAGUCAUCGACAA | 733 | UUGUCGAUGACUUUCACAUUCUG | 1072-1094 |
| AD-68295.1 | 617 | AGUGCACAAUAUUUUCCCAUA | 734 | UAUGGGAAAAUAUUGUGCACUGU | 1139-1160_C21A |
| AD-68273.1 | 618 | GAAAGUCAUCGACAAGACAUU | 735 | AAUGUCUUGUCGAUGACUUUCAC | 1080-1100 |
| AD-68297.1 | 619 | AAUGUGAAAGUCAUCGACAAA | 736 | UUUGUCGAUGACUUUCACAUUCU | 1075-1096_G21A |
| AD-68287.1 | 620 | CUGGAAAUAUAUUAACUGUUA | 737 | UAACAGUUAAUAUAUUUCCAGGA | 1353-1374 |
| AD-68300.1 | 621 | AUUUUCCCAUCUGUAUUAUUU | 738 | AAAUAAUACAGAUGGGAAAAUAU | 1149-1170 |
| AD-68306.1 | 622 | UGUCGUUCUUUUCCAACAAAA | 739 | UUUUGUUGGAAAAGAACGACACC | 1252-1273 |
| AD-68292.1 | 623 | AUCCUGGAAAUAUAUUAACUA | 740 | UAGUUAAUAUAUUUCCAGGAUGA | 1350-1371_G21A |
| AD-68298.1 | 624 | GCAUUUUGAGAGGUGAUGAUA | 741 | UAUCAUCACCUCUCAAAAUGCCC | 734-755_G21A |
| AD-68277.1 | 625 | CAGGGGGAGAAAGGUGUUCAA | 742 | UUGAACACCUUUCUCCCCCUGGA | 994-1014 |
| AD-68289.1 | 626 | GGAAAUAUAUUAACUGUUAAA | 743 | UUUAACAGUUAAUAUAUUUCCAG | 1355-1376 |
| AD-68272.1 | 627 | CAUUGGUGAGGAAAAAUCCUU | 744 | AAGGAUUUUUCCUCACCAAUGUC | 1097-1117 |
| AD-68282.1 | 628 | GGGAGAAAGGUGUUCAAGAUA | 745 | UAUCUUGAACACCUUUCUCCCCC | 998-1018_G21A |
| AD-68285.1 | 629 | GGCAUUUUGAGAGGUGAUGAU | 746 | AUCAUCACCUCUCAAAAUGCCCU | 733-754 |
| AD-68290.1 | 630 | UACAAAGGGUGUCGUUCUUUU | 747 | AAAAGAACGACACCCUUUGUAUU | 1243-1264 |
| AD-68296.1 | 631 | UGGGAUCUUGGUGUCGAAUCA | 748 | UGAUUCGACACCAAGAUCCCAUU | 783-804 |
| AD-68288.1 | 632 | CUGACAGUGCACAAUAUUUUA | 749 | UAAAAUAUUGUGCACUGUCAGAU | 1134-1155_C21A |
| AD-68299.1 | 633 | CAGUGCACAAUAUUUUCCCAU | 750 | AUGGGAAAAUAUUGUGCACUGUC | 1138-1159 |
| AD-68275.1 | 634 | ACUUUUCAAUGGGUGUCCUAA | 751 | UUAGGACACCCAUUGAAAAGUCA | 1302-1322_G21A |
| AD-68274.1 | 635 | ACAUUGGUGAGGAAAAAUCCU | 752 | AGGAUUUUUCCUCACCAAUGUCU | 1096-1116 |
| AD-68294.1 | 636 | UUGCUUUUGACUUUUCAAUGA | 753 | UCAUUGAAAAGUCAAAAGCAAUG | 1293-1314_G21A |
| AD-68302.1 | 637 | CAUUUUGAGAGGUGAUGAUGA | 754 | UCAUCAUCACCUCUCAAAAUGCC | 735-756_C21A |
| AD-68279.1 | 638 | UUGACUUUUCAAUGGGUGUCA | 755 | UGACACCCAUUGAAAAGUCAAAA | 1299-1319_C21A |
| AD-68304.1 | 639 | CGACUUCUGUUUUAGGACAGA | 756 | UCUGUCCUAAAACAGAAGUCGAC | 212-233 |
| AD-68286.1 | 640 | CUCUGAGUGGGUGCCAGAAUA | 757 | UAUUCUGGCACCCACUCAGAGCC | 1058-1079_G21A |
| AD-68291.1 | 641 | GGGUGCCAGAAUGUGAAAGUA | 758 | UACUUUCACAUUCUGGCACCCAC | 1066-1087_C21A |
| AD-68283.1 | 642 | UCAAUGGGUGUCCUAGGAACA | 759 | UGUUCCUAGGACACCCAUUGAAA | 1307-1327_C21A |
| AD-68280.1 | 643 | AAAGUCAUCGACAAGACAUUA | 760 | UAAUGUCUUGUCGAUGACUUUCA | 1081-1101_G21A |
| AD-68293.1 | 644 | AUUUUGAGAGGUGAUGAUGCA | 761 | UGCAUCAUCACCUCUCAAAAUGC | 736-757_C21A |
| AD-68276.1 | 645 | AUCGACAAGACAUUGGUGAGA | 762 | UCUCACCAAUGUCUUGUCGAUGA | 1087-1107_G21A |
| AD-68308.1 | 646 | GGUGCCAGAAUGUGAAAGUCA | 763 | UGACUUUCACAUUCUGGCACCCA | 1067-1088 |
| AD-68278.1 | 647 | GACAGUGCACAAUAUUUUCCA | 764 | UGGAAAAUAUUGUGCACUGUCAG | 1136-1156_C21A |
| AD-68307.1 | 648 | ACAAAGAGACACUGUGCAGAA | 765 | UUCUGCACAGUGUCUCUUUGUCA | 1191-1212_G21A |
| AD-68284.1 | 649 | UUUUCAAUGGGUGUCCUAGGA | 766 | UCCUAGGACACCCAUUGAAAAGU | 1304-1324 |
| AD-68301.1 | 650 | CCGUUUCCAAGAUCUGACAGU | 767 | ACUGUCAGAUCUUGGAAACGGCC | 1121-1142 |
| AD-68281.1 | 651 | AGGGGGAGAAAGGUGUUCAAA | 768 | UUUGAACACCUUUCUCCCCCUGG | 995-1015_G21A |
| AD-68305.1 | 652 | AGUCAUCGACAAGACAUUGGU | 769 | ACCAAUGUCUUGUCGAUGACUUU | 1083-1104 |

TABLE 12
Additional Human/Mouse/Cyno HAO1 Modified and
Unmodified Sense Strand iRNA Sequences

| | Modified sense | Unmodified sense | |
|---|---|---|---|
| Duplex | strand sequence | strand sequence | |
| Name | 5′ to 3′ | 5′ to 3′ | SEQ ID NO: |
| AD-40257.1 | uucAAuGGGuGuccuAGGAdTsdT | UUCAAUGGGUGUCCUAGGA | 770 & 771 |
| AD-40257.2 | uucAAuGGGuGuccuAGGAdTsdT | UUCAAUGGGUGUCCUAGGA | 770 & 771 |
| AD-63102.1 | AcAAcuGGAGGGAcAucGudTsdT | ACAACUGGAGGGACAUCGU | 772 & 773 |
| AD-63102.2 | AcAAcuGGAGGGAcAucGudTsdT | ACAACUGGAGGGACAUCGU | 772 & 773 |
| AD-63102.3 | AcAAcuGGAGGGAcAucGudTsdT | ACAACUGGAGGGACAUCGU | 772 & 773 |

TABLE 13
Additional Human/Mouse/Cyno HAO1 Modified and
Unmodified Antisense Strand iRNA Sequences

| | Modified | Unmodified | |
|---|---|---|---|
| Duplex | antisense strand | antisense strand | |
| Name | sequence 5′ to 3′ | sequence 5′ to 3′ | SEQ ID NO: |
| AD-40257.1 | UCCuAGGAcACCcAUUGAAdTsdT | UCCUAGGACACCCAUUGAA | 774 & 775 |
| AD-40257.2 | UCCuAGGAcACCcAUUGAAdTsdT | UCCUAGGACACCCAUUGAA | 774 & 775 |
| AD-63102.1 | ACGAUGUCCCUCcAGUUGUdTsdT | ACGAUGUCCCUCCAGUUGU | 776 & 777 |
| AD-63102.2 | ACGAUGUCCCUCcAGUUGUdTsdT | ACGAUGUCCCUCCAGUUGU | 776 & 777 |
| AD-63102.3 | ACGAUGUCCCUCcAGUUGUdTsdT | ACGAUGUCCCUCCAGUUGU | 776 & 777 |

TABLE 14
Additional Human/Cyno/Mouse/Rat and Human/Cyno/Rat
HAO1 Modified Sense Strand iRNA Sequences

| | | SEQ |
|---|---|---|
| Duplex | | ID |
| Name | Modified sense strand sequence | NO: |
| AD-62989.2 | UfscsCfuAfgGfaAfCfCfuUfuUfaGfaAfaUfL96 | 778 |
| AD-62994.2 | GfsasCfuUfuCfaUfCfCfuGfgAfaAfuAfuAfL96 | 779 |
| AD-62933.2 | GfsasAfuGfuGfaAfAfGfuCfaUfcGfaCfaAfL96 | 780 |
| AD-62935.2 | CfsasUfuGfgUfgAfGfGfaAfaAfaUfcCfuUfL96 | 781 |
| AD-62940.2 | AfsusCfgAfcAfaGfAfCfaUfuGfgUfgAfgAfL96 | 782 |
| AD-62941.2 | AfscsAfuUfgGfuGfAfGfgAfaAfaAfuCfcUfL96 | 783 |
| AD-62944.2 | GfsasAfaGfuCfaUfCfGfaCfaAfgAfcAfuUfL96 | 784 |
| AD-62965.2 | AfsasAfgUfcAfuCfGfAfcAfaGfaCfaUfuAfL96 | 785 |

TABLE 15
Additional Human/Cyno/Mouse/Rat and Human/Cyno/Rat
HAO1 Modified Antisense Strand iRNA Sequences

| Duplex | | SEQ ID |
|---|---|---|
| Name | Modified antisense strand | NO: |
| AD-62989.2 | asUfsuUfcUfaAfaAfgguUfcCfuAfgGfascsa | 786 |
| AD-62994.2 | usAfsuAfuUfuCfcAfggaUfgAfaAfgUfcscsa | 787 |
| AD-62933.2 | usUfsgUfcGfaUfgAfcuuUfcAfcAfuUfcsusg | 788 |
| AD-62935.2 | asAfsgGfaUfuUfuUfccuCfaCfcAfaUfgsusc | 789 |
| AD-62940.2 | usCfsuCfaCfcAfaUfgucUfuGfuCfgAfusgsa | 790 |
| AD-62941.2 | asGfsgAfuUfuUfuCfcucAfcCfaAfuGfuscsu | 791 |
| AD-62944.2 | asAfsuGfuCfuUfgUfcgaUfgAfcUfuUfcsasc | 792 |
| AD-62965.2 | usAfsaUfgUfcUfuGfucgAfuGfaCfuUfuscsa | 793 |

TABLE 16
Additional Human Unmodified and Modified Sense and Antisense Strand HAO1 iRNA Sequences Targeting
NM_017545.2

| | SEQ | | SEQ | | |
|---|---|---|---|---|---|
| | ID | | ID | | |
| Unmodified sequence 5′ to 3′ | NO: | Modified sequence 5′ to 3′ | NO: | Strand | Length |
| AUGUAUGUUACUUCUUAGAGA | 794 | asusguauGfuUfAfCfuucuuagagaL96 | 1890 | sense | 21 |
| UCUCUAAGAAGUAACAUACAUCC | 795 | usCfsucuAfaGfAfaguaAfcAfuacauscsc | 1891 | antisense | 23 |
| UGUAUGUUACUUCUUAGAGAG | 796 | usgsuaugUfuAfCfUfucuuagagagL96 | 1892 | sense | 21 |
| CUCUCUAAGAAGUAACAUACAUC | 797 | csUfscucUfaAfGfaaguAfaCfauacasusc | 1893 | antisense | 23 |
| UAGGAUGUAUGUUACUUCUUA | 798 | usasggauGfuAfUfGfuuacuucuuaL96 | 1894 | sense | 21 |
| UAAGAAGUAACAUACAUCCUAAA | 799 | usAfsagaAfgUfAfacauAfcAfuccuasasa | 1895 | antisense | 23 |
| UUAGGAUGUAUGUUACUUCUU | 800 | ususaggaUfgUfAfUfguuacuucuuL96 | 1896 | sense | 21 |
| AAGAAGUAACAUACAUCCUAAAA | 801 | asAfsgaaGfuAfAfcauaCfaUfccuaasasa | 1897 | antisense | 23 |
| AGAAAGGUGUUCAAGAUGUCC | 802 | asgsaaagGfuGfUfUfcaagauguccL96 | 1898 | sense | 21 |
| GGACAUCUUGAACACCUUUCUCC | 803 | gsGfsacaUfcUfUfgaacAfcCfuuucuscsc | 1899 | antisense | 23 |
| GAAAGGUGUUCAAGAUGUCCU | 804 | gsasaaggUfgUfUfCfaagauguccuL96 | 1900 | sense | 21 |
| AGGACAUCUUGAACACCUUUCUC | 805 | asGfsgacAfuCfUfugaaCfaCfcuuucsusc | 1901 | antisense | 23 |
| GGGGAGAAAGGUGUUCAAGAU | 806 | gsgsggagAfaAfGfGfuguucaagauL96 | 1902 | sense | 21 |
| AUCUUGAACACCUUUCUCCCCCU | 807 | asUfscuuGfaAfCfaccuUfuCfuccccscsu | 1903 | antisense | 23 |
| GGGGGAGAAAGGUGUUCAAGA | 808 | gsgsgggaGfaAfAfGfguguucaagaL96 | 1904 | sense | 21 |
| UCUUGAACACCUUUCUCCCCCUG | 809 | usCfsuugAfaCfAfccuuUfcUfcccccsusg | 1905 | antisense | 23 |
| AGAAACUUUGGCUGAUAAUAU | 810 | asgsaaacUfuUfGfGfcugauaauauL96 | 1906 | sense | 21 |
| AUAUUAUCAGCCAAAGUUUCUUC | 811 | asUfsauuAfuCfAfgccaAfaGfuuucususc | 1907 | antisense | 23 |
| GAAACUUUGGCUGAUAAUAUU | 812 | gsasaacuUfuGfGfCfugauaauauuL96 | 1908 | sense | 21 |
| AAUAUUAUCAGCCAAAGUUUCUU | 813 | asAfsuauUfaUfCfagccAfaAfguuucsusu | 1909 | antisense | 23 |
| AUGAAGAAACUUUGGCUGAUA | 814 | asusgaagAfaAfCfUfuuggcugauaL96 | 1910 | sense | 21 |
| UAUCAGCCAAAGUUUCUUCAUCA | 815 | usAfsucaGfcCfAfaaguUfuCfuucauscsa | 1911 | antisense | 23 |
| GAUGAAGAAACUUUGGCUGAU | 816 | gsasugaaGfaAfAfCfuuuggcugauL96 | 1912 | sense | 21 |
| AUCAGCCAAAGUUUCUUCAUCAU | 817 | asUfscagCfcAfAfaguuUfcUfucaucsasu | 1913 | antisense | 23 |
| AAGGCACUGAUGUUCUGAAAG | 818 | asasggcaCfuGfAfUfguucugaaagL96 | 1914 | sense | 21 |
| CUUUCAGAACAUCAGUGCCUUUC | 819 | csUfsuucAfgAfAfcaucAfgUfgccuususc | 1915 | antisense | 23 |
| AGGCACUGAUGUUCUGAAAGC | 820 | asgsgcacUfgAfUfGfuucugaaagcL96 | 1916 | sense | 21 |
| GCUUUCAGAACAUCAGUGCCUUU | 821 | gsCfsuuuCfaGfAfacauCfaGfugccususu | 1917 | antisense | 23 |
| CGGAAAGGCACUGAUGUUCUG | 822 | csgsgaaaGfgCfAfCfugauguucugL96 | 1918 | sense | 21 |
| CAGAACAUCAGUGCCUUUCCGCA | 823 | csAfsgaaCfaUfCfagugCfcUfuuccgscsa | 1919 | antisense | 23 |
| GCGGAAAGGCACUGAUGUUCU | 824 | gscsggaaAfgGfCfAfcugauguucuL96 | 1920 | sense | 21 |
| AGAACAUCAGUGCCUUUCCGCAC | 825 | asGfsaacAfuCfAfgugcCfuUfuccgcsasc | 1921 | antisense | 23 |
| AGAAGACUGACAUCAUUGCCA | 826 | asgsaagaCfuGfAfCfaucauugccaL96 | 1922 | sense | 21 |
| UGGCAAUGAUGUCAGUCUUCUCA | 827 | usGfsgcaAfuGfAfugucAfgUfcuucuscsa | 1923 | antisense | 23 |
| GAAGACUGACAUCAUUGCCAA | 828 | gsasagacUfgAfCfAfucauugccaaL96 | 1924 | sense | 21 |
| UUGGCAAUGAUGUCAGUCUUCUC | 829 | usUfsggcAfaUfGfauguCfaGfucuucsusc | 1925 | antisense | 23 |
| GCUGAGAAGACUGACAUCAUU | 830 | gscsugagAfaGfAfCfugacaucauuL96 | 1926 | sense | 21 |
| AAUGAUGUCAGUCUUCUCAGCCA | 831 | asAfsugaUfgUfCfagucUfuCfucagescsa | 1927 | antisense | 23 |
| GGCUGAGAAGACUGACAUCAU | 832 | gsgscugaGfaAfGfAfcugacaucauL96 | 1928 | sense | 21 |
| AUGAUGUCAGUCUUCUCAGCCAU | 833 | asUfsgauGfuCfAfgucuUfcUfcagccsasu | 1929 | antisense | 23 |
| UAAUGCCUGAUUCACAACUUU | 834 | usasaugcCfuGfAfUfucacaacuuuL96 | 1930 | sense | 21 |
| AAAGUUGUGAAUCAGGCAUUACC | 835 | asAfsaguUfgUfGfaaucAfgGfcauuascsc | 1931 | antisense | 23 |
| AAUGCCUGAUUCACAACUUUG | 836 | asasugccUfgAfUfUfcacaacuuugL96 | 1932 | sense | 21 |
| CAAAGUUGUGAAUCAGGCAUUAC | 837 | csAfsaagUfuGfUfgaauCfaGfgcauusasc | 1933 | antisense | 23 |
| UUGGUAAUGCCUGAUUCACAA | 838 | ususgguaAfuGfCfCfugauucacaaL96 | 1934 | sense | 21 |
| UUGUGAAUCAGGCAUUACCAACA | 839 | usUfsgugAfaUfCfaggcAfuUfaccaascsa | 1935 | antisense | 23 |
| GUUGGUAAUGCCUGAUUCACA | 840 | gsusugguAfaUfGfCfcugauucacaL96 | 1936 | sense | 21 |
| UGUGAAUCAGGCAUUACCAACAC | 841 | usGfsugaAfuCfAfggcaUfuAfccaacsasc | 1937 | antisense | 23 |
| UAUCAAAUGGCUGAGAAGACU | 842 | usasucaaAfuGfGfCfugagaagacuL96 | 1938 | sense | 21 |
| AGUCUUCUCAGCCAUUUGAUAUC | 843 | asGfsucuUfcUfCfagccAfuUfugauasusc | 1939 | antisense | 23 |
| AUCAAAUGGCUGAGAAGACUG | 844 | asuscaaaUfgGfCfUfgagaagacugL96 | 1940 | sense | 21 |
| CAGUCUUCUCAGCCAUUUGAUAU | 845 | csAfsgucUfuCfUfcagcCfaUfuugausasu | 1941 | antisense | 23 |
| AAGAUAUCAAAUGGCUGAGAA | 846 | asasgauaUfcAfAfAfuggcugagaaL96 | 1942 | sense | 21 |
| UUCUCAGCCAUUUGAUAUCUUCC | 847 | usUfscucAfgCfCfauuuGfaUfaucuuscsc | 1943 | antisense | 23 |
| GAAGAUAUCAAAUGGCUGAGA | 848 | gsasagauAfuCfAfAfauggcugagaL96 | 1944 | sense | 21 |
| UCUCAGCCAUUUGAUAUCUUCCC | 849 | usCfsucaGfcCfAfuuugAfuAfucuucscsc | 1945 | antisense | 23 |
| UCUGACAGUGCACAAUAUUUU | 850 | uscsugacAfgUfGfCfacaauauuuuL96 | 1946 | sense | 21 |
| AAAAUAUUGUGCACUGUCAGAUC | 851 | asAfsaauAfuUfGfugcaCfuGfucagasusc | 1947 | antisense | 23 |
| CUGACAGUGCACAAUAUUUUC | 852 | csusgacaGfuGfCfAfcaauauuuucL96 | 1948 | sense | 21 |
| GAAAAUAUUGUGCACUGUCAGAU | 853 | gsAfsaaaUfaUfUfgugcAfcUfgucagsasu | 1949 | antisense | 23 |
| AAGAUCUGACAGUGCACAAUA | 854 | asasgaucUfgAfCfAfgugcacaauaL96 | 1950 | sense | 21 |
| UAUUGUGCACUGUCAGAUCUUGG | 855 | usAfsuugUfgCfAfcuguCfaGfaucuusgsg | 1951 | antisense | 23 |
| CAAGAUCUGACAGUGCACAAU | 856 | csasagauCfuGfAfCfagugcacaauL96 | 1952 | sense | 21 |
| AUUGUGCACUGUCAGAUCUUGGA | 857 | asUfsuguGfcAfCfugucAfgAfucuugsgsa | 1953 | antisense | 23 |
| ACUGAUGUUCUGAAAGCUCUG | 858 | ascsugauGfuUfCfUfgaaagcucugL96 | 1954 | sense | 21 |
| CAGAGCUUUCAGAACAUCAGUGC | 859 | csAfsgagCfuUfUfcagaAfcAfucagusgsc | 1955 | antisense | 23 |
| CUGAUGUUCUGAAAGCUCUGG | 860 | csusgaugUfuCfUfGfaaagcucuggL96 | 1956 | sense | 21 |
| CCAGAGCUUUCAGAACAUCAGUG | 861 | csCfsagaGfcUfUfucagAfaCfaucagsusg | 1957 | antisense | 23 |
| AGGCACUGAUGUUCUGAAAGC | 862 | asgsgcacUfgAfUfGfuucugaaagcL96 | 1958 | sense | 21 |
| GCUUUCAGAACAUCAGUGCCUUU | 863 | gsCfsuuuCfaGfAfacauCfaGfugccususu | 1959 | antisense | 23 |
| AAGGCACUGAUGUUCUGAAAG | 864 | asasggcaCfuGfAfUfguucugaaagL96 | 1960 | sense | 21 |
| CUUUCAGAACAUCAGUGCCUUUC | 865 | csUfsuucAfgAfAfcaucAfgUfgccuususc | 1961 | antisense | 23 |
| AACAACAUGCUAAAUCAGUAC | 866 | asascaacAfuGfCfUfaaaucaguacL96 | 1962 | sense | 21 |
| GUACUGAUUUAGCAUGUUGUUCA | 867 | gsUfsacuGfaUfUfuagcAfuGfuuguuscsa | 1963 | antisense | 23 |
| ACAACAUGCUAAAUCAGUACU | 868 | ascsaacaUfgCfUfAfaaucaguacuL96 | 1964 | sense | 21 |
| AGUACUGAUUUAGCAUGUUGUUC | 869 | asGfsuacUfgAfUfuuagCfaUfguugususc | 1965 | antisense | 23 |
| UAUGAACAACAUGCUAAAUCA | 870 | usasugaaCfaAfCfAfugcuaaaucaL96 | 1966 | sense | 21 |
| UGAUUUAGCAUGUUGUUCAUAAU | 871 | usGfsauuUfaGfCfauguUfgUfucauasasu | 1967 | antisense | 23 |
| UUAUGAACAACAUGCUAAAUC | 872 | ususaugaAfcAfAfCfaugcuaaaucL96 | 1968 | sense | 21 |
| GAUUUAGCAUGUUGUUCAUAAUC | 873 | gsAfsuuuAfgCfAfuguuGfuUfcauaasusc | 1969 | antisense | 23 |
| UCUUUAGUGUCUGAAUAUAUC | 874 | uscsuuuaGfuGfUfCfugaauauaucL96 | 1970 | sense | 21 |
| GAUAUAUUCAGACACUAAAGAUG | 875 | gsAfsuauAfuUfCfagacAfcUfaaagasusg | 1971 | antisense | 23 |
| CUUUAGUGUCUGAAUAUAUCC | 876 | csusuuagUfgUfCfUfgaauauauccL96 | 1972 | sense | 21 |
| GGAUAUAUUCAGACACUAAAGAU | 877 | gsGfsauaUfaUfUfcagaCfaCfuaaagsasu | 1973 | antisense | 23 |
| CACAUCUUUAGUGUCUGAAUA | 878 | csascaucUfuUfAfGfugucugaauaL96 | 1974 | sense | 21 |
| UAUUCAGACACUAAAGAUGUGAU | 879 | usAfsuucAfgAfCfacuaAfaGfaugugsasu | 1975 | antisense | 23 |
| UCACAUCUUUAGUGUCUGAAU | 880 | uscsacauCfuUfUfAfgugucugaauL96 | 1976 | sense | 21 |
| AUUCAGACACUAAAGAUGUGAUU | 881 | asUfsucaGfaCfAfcuaaAfgAfugugasusu | 1977 | antisense | 23 |
| UGAUACUUCUUUGAAUGUAGA | 882 | usgsauacUfuCfUfUfugaauguagaL96 | 1978 | sense | 21 |
| UCUACAUUCAAAGAAGUAUCACC | 883 | usCfsuacAfuUfCfaaagAfaGfuaucascsc | 1979 | antisense | 23 |
| GAUACUUCUUUGAAUGUAGAU | 884 | gsasuacuUfcUfUfUfgaauguagauL96 | 1980 | sense | 21 |
| AUCUACAUUCAAAGAAGUAUCAC | 885 | asUfscuaCfaUfUfcaaaGfaAfguaucsasc | 1981 | antisense | 23 |
| UUGGUGAUACUUCUUUGAAUG | 886 | ususggugAfuAfCfUfucuuugaaugL96 | 1982 | sense | 21 |
| CAUUCAAAGAAGUAUCACCAAUU | 887 | csAfsuucAfaAfGfaaguAfuCfaccaasusu | 1983 | antisense | 23 |
| AUUGGUGAUACUUCUUUGAAU | 888 | asusugguGfaUfAfCfuucuuugaauL96 | 1984 | sense | 21 |
| AUUCAAAGAAGUAUCACCAAUUA | 889 | asUfsucaAfaGfAfaguaUfcAfccaaususa | 1985 | antisense | 23 |
| AAUAACCUGUGAAAAUGCUCC | 890 | asasuaacCfuGfUfGfaaaaugcuccL96 | 1986 | sense | 21 |
| GGAGCAUUUUCACAGGUUAUUGC | 891 | gsGfsagcAfuUfUfucacAfgGfuuauusgsc | 1987 | antisense | 23 |
| AUAACCUGUGAAAAUGCUCCC | 892 | asusaaccUfgUfGfAfaaaugcucccL96 | 1988 | sense | 21 |
| GGGAGCAUUUUCACAGGUUAUUG | 893 | gsGfsgagCfaUfUfuucaCfaGfguuaususg | 1989 | antisense | 23 |
| UAGCAAUAACCUGUGAAAAUG | 894 | usasgcaaUfaAfCfCfugugaaaaugL96 | 1990 | sense | 21 |
| CAUUUUCACAGGUUAUUGCUAUC | 895 | csAfsuuuUfcAfCfagguUfaUfugcuasusc | 1991 | antisense | 23 |
| AUAGCAAUAACCUGUGAAAAU | 896 | asusagcaAfuAfAfCfcugugaaaauL96 | 1992 | sense | 21 |
| AUUUUCACAGGUUAUUGCUAUCC | 897 | asUfsuuuCfaCfAfgguuAfuUfgcuauscsc | 1993 | antisense | 23 |
| AAUCACAUCUUUAGUGUCUGA | 898 | asasucacAfuCfUfUfuagugucugaL96 | 1994 | sense | 21 |
| UCAGACACUAAAGAUGUGAUUGG | 899 | usCfsagaCfaCfUfaaagAfuGfugauusgsg | 1995 | antisense | 23 |
| AUCACAUCUUUAGUGUCUGAA | 900 | asuscacaUfcUfUfUfagugucugaaL96 | 1996 | sense | 21 |
| UUCAGACACUAAAGAUGUGAUUG | 901 | usUfscagAfcAfCfuaaaGfaUfgugaususg | 1997 | antisense | 23 |
| UUCCAAUCACAUCUUUAGUGU | 902 | ususccaaUfcAfCfAfucuuuaguguL96 | 1998 | sense | 21 |
| ACACUAAAGAUGUGAUUGGAAAU | 903 | asCfsacuAfaAfGfauguGfaUfuggaasasu | 1999 | antisense | 23 |
| UUUCCAAUCACAUCUUUAGUG | 904 | ususuccaAfuCfAfCfaucuuuagugL96 | 2000 | sense | 21 |
| CACUAAAGAUGUGAUUGGAAAUC | 905 | csAfscuaAfaGfAfugugAfuUfggaaasusc | 2001 | antisense | 23 |
| ACGGGCAUGAUGUUGAGUUCC | 906 | ascsgggcAfuGfAfUfguugaguuccL96 | 2002 | sense | 21 |
| GGAACUCAACAUCAUGCCCGUUC | 907 | gsGfsaacUfcAfAfcaucAfuGfcccgususc | 2003 | antisense | 23 |
| CGGGCAUGAUGUUGAGUUCCU | 908 | csgsggcaUfgAfUfGfuugaguuccuL96 | 2004 | sense | 21 |
| AGGAACUCAACAUCAUGCCCGUU | 909 | asGfsgaaCfuCfAfacauCfaUfgcccgsusu | 2005 | antisense | 23 |
| GGGAACGGGCAUGAUGUUGAG | 910 | gsgsgaacGfgGfCfAfugauguugagL96 | 2006 | sense | 21 |
| CUCAACAUCAUGCCCGUUCCCAG | 911 | csUfscaaCfaUfCfaugcCfcGfuucccsasg | 2007 | antisense | 23 |
| UGGGAACGGGCAUGAUGUUGA | 912 | usgsggaaCfgGfGfCfaugauguugaL96 | 2008 | sense | 21 |
| UCAACAUCAUGCCCGUUCCCAGG | 913 | usCfsaacAfuCfAfugccCfgUfucccasgsg | 2009 | antisense | 23 |
| ACUAAGGUGAAAAGAUAAUGA | 914 | ascsuaagGfuGfAfAfaagauaaugaL96 | 2010 | sense | 21 |
| UCAUUAUCUUUUCACCUUAGUGU | 915 | usCfsauuAfuCfUfuuucAfcCfuuagusgsu | 2011 | antisense | 23 |
| CUAAGGUGAAAAGAUAAUGAU | 916 | csusaaggUfgAfAfAfagauaaugauL96 | 2012 | sense | 21 |
| AUCAUUAUCUUUUCACCUUAGUG | 917 | asUfscauUfaUfCfuuuuCfaCfcuuagsusg | 2013 | antisense | 23 |
| AAACACUAAGGUGAAAAGAUA | 918 | asasacacUfaAfGfGfugaaaagauaL96 | 2014 | sense | 21 |
| UAUCUUUUCACCUUAGUGUUUGC | 919 | usAfsucuUfuUfCfaccuUfaGfuguuusgsc | 2015 | antisense | 23 |
| CAAACACUAAGGUGAAAAGAU | 920 | csasaacaCfuAfAfGfgugaaaagauL96 | 2016 | sense | 21 |
| AUCUUUUCACCUUAGUGUUUGCU | 921 | asUfscuuUfuCfAfccuuAfgUfguuugscsu | 2017 | antisense | 23 |
| AGGUAGCACUGGAGAGAAUUG | 922 | asgsguagCfaCfUfGfgagagaauugL96 | 2018 | sense | 21 |
| CAAUUCUCUCCAGUGCUACCUUC | 923 | csAfsauuCfuCfUfccagUfgCfuaccususc | 2019 | antisense | 23 |
| GGUAGCACUGGAGAGAAUUGG | 924 | gsgsuagcAfcUfGfGfagagaauuggL96 | 2020 | sense | 21 |
| CCAAUUCUCUCCAGUGCUACCUU | 925 | csCfsaauUfcUfCfuccaGfuGfcuaccsusu | 2021 | antisense | 23 |
| GAGAAGGUAGCACUGGAGAGA | 926 | gsasgaagGfuAfGfCfacuggagagaL96 | 2022 | sense | 21 |
| UCUCUCCAGUGCUACCUUCUCAA | 927 | usCfsucuCfcAfGfugcuAfcCfuucucsasa | 2023 | antisense | 23 |
| UGAGAAGGUAGCACUGGAGAG | 928 | usgsagaaGfgUfAfGfcacuggagagL96 | 2024 | sense | 21 |
| CUCUCCAGUGCUACCUUCUCAAA | 929 | csUfscucCfaGfUfgcuaCfcUfucucasasa | 2025 | antisense | 23 |
| AGUGGACUUGCUGCAUAUGUG | 930 | asgsuggaCfuUfGfCfugcauaugugL96 | 2026 | sense | 21 |
| CACAUAUGCAGCAAGUCCACUGU | 931 | csAfscauAfuGfCfagcaAfgUfccacusgsu | 2027 | antisense | 23 |
| GUGGACUUGCUGCAUAUGUGG | 932 | gsusggacUfuGfCfUfgcauauguggL96 | 2028 | sense | 21 |
| CCACAUAUGCAGCAAGUCCACUG | 933 | csCfsacaUfaUfGfcagcAfaGfuccacsusg | 2029 | antisense | 23 |
| CGACAGUGGACUUGCUGCAUA | 934 | csgsacagUfgGfAfCfuugcugcauaL96 | 2030 | sense | 21 |
| UAUGCAGCAAGUCCACUGUCGUC | 935 | usAfsugcAfgCfAfagucCfaCfugucgsusc | 2031 | antisense | 23 |
| ACGACAGUGGACUUGCUGCAU | 936 | ascsgacaGfuGfGfAfcuugcugcauL96 | 2032 | sense | 21 |
| AUGCAGCAAGUCCACUGUCGUCU | 937 | asUfsgcaGfcAfAfguccAfcUfgucguscsu | 2033 | antisense | 23 |
| AAGGUGUUCAAGAUGUCCUCG | 938 | asasggugUfuCfAfAfgauguccucgL96 | 2034 | sense | 21 |
| CGAGGACAUCUUGAACACCUUUC | 939 | csGfsaggAfcAfUfcuugAfaCfaccuususc | 2035 | antisense | 23 |
| AGGUGUUCAAGAUGUCCUCGA | 940 | asgsguguUfcAfAfGfauguccucgaL96 | 2036 | sense | 21 |
| UCGAGGACAUCUUGAACACCUUU | 941 | usCfsgagGfaCfAfucuuGfaAfcaccususu | 2037 | antisense | 23 |
| GAGAAAGGUGUUCAAGAUGUC | 942 | gsasgaaaGfgUfGfUfucaagaugucL96 | 2038 | sense | 21 |
| GACAUCUUGAACACCUUUCUCCC | 943 | gsAfscauCfuUfGfaacaCfcUfuucucscsc | 2039 | antisense | 23 |
| GGAGAAAGGUGUUCAAGAUGU | 944 | gsgsagaaAfgGfUfGfuucaagauguL96 | 2040 | sense | 21 |
| ACAUCUUGAACACCUUUCUCCCC | 945 | asCfsaucUfuGfAfacacCfuUfucuccscsc | 2041 | antisense | 23 |
| AACCGUCUGGAUGAUGUGCGU | 946 | asasccguCfuGfGfAfugaugugcguL96 | 2042 | sense | 21 |
| ACGCACAUCAUCCAGACGGUUGC | 947 | asCfsgcaCfaUfCfauccAfgAfcgguusgsc | 2043 | antisense | 23 |
| ACCGUCUGGAUGAUGUGCGUA | 948 | ascscgucUfgGfAfUfgaugugcguaL96 | 2044 | sense | 21 |
| UACGCACAUCAUCCAGACGGUUG | 949 | usAfscgcAfcAfUfcaucCfaGfacggususg | 2045 | antisense | 23 |
| GGGCAACCGUCUGGAUGAUGU | 950 | gsgsgcaaCfcGfUfCfuggaugauguL96 | 2046 | sense | 21 |
| ACAUCAUCCAGACGGUUGCCCAG | 951 | asCfsaucAfuCfCfagacGfgUfugcccsasg | 2047 | antisense | 23 |
| UGGGCAACCGUCUGGAUGAUG | 952 | usgsggcaAfcCfGfUfcuggaugaugL96 | 2048 | sense | 21 |
| CAUCAUCCAGACGGUUGCCCAGG | 953 | csAfsucaUfcCfAfgacgGfuUfgcccasgsg | 2049 | antisense | 23 |
| GAAACUUUGGCUGAUAAUAUU | 954 | gsasaacuUfuGfGfCfugauaauauuL96 | 2050 | sense | 21 |
| AAUAUUAUCAGCCAAAGUUUCUU | 955 | asAfsuauUfaUfCfagccAfaAfguuucsusu | 2051 | antisense | 23 |
| AAACUUUGGCUGAUAAUAUUG | 956 | asasacuuUfgGfCfUfgauaauauugL96 | 2052 | sense | 21 |
| CAAUAUUAUCAGCCAAAGUUUCU | 957 | csAfsauaUfuAfUfcagcCfaAfaguuuscsu | 2053 | antisense | 23 |
| UGAAGAAACUUUGGCUGAUAA | 958 | usgsaagaAfaCfUfUfuggcugauaaL96 | 2054 | sense | 21 |
| UUAUCAGCCAAAGUUUCUUCAUC | 959 | usUfsaucAfgCfCfaaagUfuUfcuucasusc | 2055 | antisense | 23 |
| AUGAAGAAACUUUGGCUGAUA | 960 | asusgaagAfaAfCfUfuuggcugauaL96 | 2056 | sense | 21 |
| UAUCAGCCAAAGUUUCUUCAUCA | 961 | usAfsucaGfcCfAfaaguUfuCfuucauscsa | 2057 | antisense | 23 |
| AAAGGUGUUCAAGAUGUCCUC | 962 | asasagguGfuUfCfAfagauguccucL96 | 2058 | sense | 21 |
| GAGGACAUCUUGAACACCUUUCU | 963 | gsAfsggaCfaUfCfuugaAfcAfccuuuscsu | 2059 | antisense | 23 |
| AAGGUGUUCAAGAUGUCCUCG | 964 | asasggugUfuCfAfAfgauguccucgL96 | 2060 | sense | 21 |
| CGAGGACAUCUUGAACACCUUUC | 965 | csGfsaggAfcAfUfcuugAfaCfaccuususc | 2061 | antisense | 23 |
| GGAGAAAGGUGUUCAAGAUGU | 966 | gsgsagaaAfgGfUfGfuucaagauguL96 | 2062 | sense | 21 |
| ACAUCUUGAACACCUUUCUCCCC | 967 | asCfsaucUfuGfAfacacCfuUfucuccscsc | 2063 | antisense | 23 |
| GGGAGAAAGGUGUUCAAGAUG | 968 | gsgsgagaAfaGfGfUfguucaagaugL96 | 2064 | sense | 21 |
| CAUCUUGAACACCUUUCUCCCCC | 969 | csAfsucuUfgAfAfcaccUfuUfcucccscsc | 2065 | antisense | 23 |
| AAAUCAGUACUUCCAAAGUCU | 970 | asasaucaGfuAfCfUfuccaaagucuL96 | 2066 | sense | 21 |
| AGACUUUGGAAGUACUGAUUUAG | 971 | asGfsacuUfuGfGfaaguAfcUfgauuusasg | 2067 | antisense | 23 |
| AAUCAGUACUUCCAAAGUCUA | 972 | asasucagUfaCfUfUfccaaagucuaL96 | 2068 | sense | 21 |
| UAGACUUUGGAAGUACUGAUUUA | 973 | usAfsgacUfuUfGfgaagUfaCfugauususa | 2069 | antisense | 23 |
| UGCUAAAUCAGUACUUCCAAA | 974 | usgscuaaAfuCfAfGfuacuuccaaaL96 | 2070 | sense | 21 |
| UUUGGAAGUACUGAUUUAGCAUG | 975 | usUfsuggAfaGfUfacugAfuUfuagcasusg | 2071 | antisense | 23 |
| AUGCUAAAUCAGUACUUCCAA | 976 | asusgcuaAfaUfCfAfguacuuccaaL96 | 2072 | sense | 21 |
| UUGGAAGUACUGAUUUAGCAUGU | 977 | usUfsggaAfgUfAfcugaUfuUfagcausgsu | 2073 | antisense | 23 |
| ACAUCUUUAGUGUCUGAAUAU | 978 | ascsaucuUfuAfGfUfgucugaauauL96 | 2074 | sense | 21 |
| AUAUUCAGACACUAAAGAUGUGA | 979 | asUfsauuCfaGfAfcacuAfaAfgaugusgsa | 2075 | antisense | 23 |
| CAUCUUUAGUGUCUGAAUAUA | 980 | csasucuuUfaGfUfGfucugaauauaL96 | 2076 | sense | 21 |
| UAUAUUCAGACACUAAAGAUGUG | 981 | usAfsuauUfcAfGfacacUfaAfagaugsusg | 2077 | antisense | 23 |
| AAUCACAUCUUUAGUGUCUGA | 982 | asasucacAfuCfUfUfuagugucugaL96 | 2078 | sense | 21 |
| UCAGACACUAAAGAUGUGAUUGG | 983 | usCfsagaCfaCfUfaaagAfuGfugauusgsg | 2079 | antisense | 23 |
| CAAUCACAUCUUUAGUGUCUG | 984 | csasaucaCfaUfCfUfuuagugucugL96 | 2080 | sense | 21 |
| CAGACACUAAAGAUGUGAUUGGA | 985 | csAfsgacAfcUfAfaagaUfgUfgauugsgsa | 2081 | antisense | 23 |
| GCAUGUAUUACUUGACAAAGA | 986 | gscsauguAfuUfAfCfuugacaaagaL96 | 2082 | sense | 21 |
| UCUUUGUCAAGUAAUACAUGCUG | 987 | usCfsuuuGfuCfAfaguaAfuAfcaugcsusg | 2083 | antisense | 23 |
| CAUGUAUUACUUGACAAAGAG | 988 | csasuguaUfuAfCfUfugacaaagagL96 | 2084 | sense | 21 |
| CUCUUUGUCAAGUAAUACAUGCU | 989 | csUfscuuUfgUfCfaaguAfaUfacaugscsu | 2085 | antisense | 23 |
| UUCAGCAUGUAUUACUUGACA | 990 | ususcagcAfuGfUfAfuuacuugacaL96 | 2086 | sense | 21 |
| UGUCAAGUAAUACAUGCUGAAAA | 991 | usGfsucaAfgUfAfauacAfuGfcugaasasa | 2087 | antisense | 23 |
| UUUCAGCAUGUAUUACUUGAC | 992 | ususucagCfaUfGfUfauuacuugacL96 | 2088 | sense | 21 |
| GUCAAGUAAUACAUGCUGAAAAA | 993 | gsUfscaaGfuAfAfuacaUfgCfugaaasasa | 2089 | antisense | 23 |
| AUGUUACUUCUUAGAGAGAAA | 994 | asusguuaCfuUfCfUfuagagagaaaL96 | 2090 | sense | 21 |
| UUUCUCUCUAAGAAGUAACAUAC | 995 | usUfsucuCfuCfUfaagaAfgUfaacausasc | 2091 | antisense | 23 |
| UGUUACUUCUUAGAGAGAAAU | 996 | usgsuuacUfuCfUfUfagagagaaauL96 | 2092 | sense | 21 |
| AUUUCUCUCUAAGAAGUAACAUA | 997 | asUfsuucUfcUfCfuaagAfaGfuaacasusa | 2093 | antisense | 23 |
| AUGUAUGUUACUUCUUAGAGA | 998 | asusguauGfuUfAfCfuucuuagagaL96 | 2094 | sense | 21 |
| UCUCUAAGAAGUAACAUACAUCC | 999 | usCfsucuAfaGfAfaguaAfcAfuacauscsc | 2095 | antisense | 23 |
| GAUGUAUGUUACUUCUUAGAG | 1000 | gsasuguaUfgUfUfAfcuucuuagagL96 | 2096 | sense | 21 |
| CUCUAAGAAGUAACAUACAUCCU | 1001 | csUfscuaAfgAfAfguaaCfaUfacaucscsu | 2097 | antisense | 23 |
| ACAACUUUGAGAAGGUAGCAC | 1002 | ascsaacuUfuGfAfGfaagguagcacL96 | 2098 | sense | 21 |
| GUGCUACCUUCUCAAAGUUGUGA | 1003 | gsUfsgcuAfcCfUfucucAfaAfguugusgsa | 2099 | antisense | 23 |
| CAACUUUGAGAAGGUAGCACU | 1004 | csasacuuUfgAfGfAfagguagcacuL96 | 2100 | sense | 21 |
| AGUGCUACCUUCUCAAAGUUGUG | 1005 | asGfsugcUfaCfCfuucuCfaAfaguugsusg | 2101 | antisense | 23 |
| AUUCACAACUUUGAGAAGGUA | 1006 | asusucacAfaCfUfUfugagaagguaL96 | 2102 | sense | 21 |
| UACCUUCUCAAAGUUGUGAAUCA | 1007 | usAfsccuUfcUfCfaaagUfuGfugaauscsa | 2103 | antisense | 23 |
| GAUUCACAACUUUGAGAAGGU | 1008 | gsasuucaCfaAfCfUfuugagaagguL96 | 2104 | sense | 21 |
| ACCUUCUCAAAGUUGUGAAUCAG | 1009 | asCfscuuCfuCfAfaaguUfgUfgaaucsasg | 2105 | antisense | 23 |
| AACAUGCUAAAUCAGUACUUC | 1010 | asascaugCfuAfAfAfucaguacuucL96 | 2106 | sense | 21 |
| GAAGUACUGAUUUAGCAUGUUGU | 1011 | gsAfsaguAfcUfGfauuuAfgCfauguusgsu | 2107 | antisense | 23 |
| ACAUGCUAAAUCAGUACUUCC | 1012 | ascsaugcUfaAfAfUfcaguacuuccL96 | 2108 | sense | 21 |
| GGAAGUACUGAUUUAGCAUGUUG | 1013 | gsGfsaagUfaCfUfgauuUfaGfcaugususg | 2109 | antisense | 23 |
| GAACAACAUGCUAAAUCAGUA | 1014 | gsasacaaCfaUfGfCfuaaaucaguaL96 | 2110 | sense | 21 |
| UACUGAUUUAGCAUGUUGUUCAU | 1015 | usAfscugAfuUfUfagcaUfgUfuguucsasu | 2111 | antisense | 23 |
| UGAACAACAUGCUAAAUCAGU | 1016 | usgsaacaAfcAfUfGfcuaaaucaguL96 | 2112 | sense | 21 |
| ACUGAUUUAGCAUGUUGUUCAUA | 1017 | asCfsugaUfuUfAfgcauGfuUfguucasusa | 2113 | antisense | 23 |
| AAACCAGUACUUUAUCAUUUU | 1018 | asasaccaGfuAfCfUfuuaucauuuuL96 | 2114 | sense | 21 |
| AAAAUGAUAAAGUACUGGUUUCA | 1019 | asAfsaauGfaUfAfaaguAfcUfgguuuscsa | 2115 | antisense | 23 |
| AACCAGUACUUUAUCAUUUUC | 1020 | asasccagUfaCfUfUfuaucauuuucL96 | 2116 | sense | 21 |
| GAAAAUGAUAAAGUACUGGUUUC | 1021 | gsAfsaaaUfgAfUfaaagUfaCfugguususc | 2117 | antisense | 23 |
| UUUGAAACCAGUACUUUAUCA | 1022 | ususugaaAfcCfAfGfuacuuuaucaL96 | 2118 | sense | 21 |
| UGAUAAAGUACUGGUUUCAAAAU | 1023 | usGfsauaAfaGfUfacugGfuUfucaaasasu | 2119 | antisense | 23 |
| UUUUGAAACCAGUACUUUAUC | 1024 | ususuugaAfaCfCfAfguacuuuaucL96 | 2120 | sense | 21 |
| GAUAAAGUACUGGUUUCAAAAUU | 1025 | gsAfsuaaAfgUfAfcuggUfuUfcaaaasusu | 2121 | antisense | 23 |
| GAGAAGAUGGGCUACAAGGCC | 1026 | gsasgaagAfuGfGfGfcuacaaggccL96 | 2122 | sense | 21 |
| GGCCUUGUAGCCCAUCUUCUCUG | 1027 | gsGfsccuUfgUfAfgcccAfuCfuucucsusg | 2123 | antisense | 23 |
| AGAAGAUGGGCUACAAGGCCA | 1028 | asgsaagaUfgGfGfCfuacaaggccaL96 | 2124 | sense | 21 |
| UGGCCUUGUAGCCCAUCUUCUCU | 1029 | usGfsgccUfuGfUfagccCfaUfcuucuscsu | 2125 | antisense | 23 |
| GGCAGAGAAGAUGGGCUACAA | 1030 | gsgscagaGfaAfGfAfugggcuacaaL96 | 2126 | sense | 21 |
| UUGUAGCCCAUCUUCUCUGCCUG | 1031 | usUfsguaGfcCfCfaucuUfcUfcugccsusg | 2127 | antisense | 23 |
| AGGCAGAGAAGAUGGGCUACA | 1032 | asgsgcagAfgAfAfGfaugggcuacaL96 | 2128 | sense | 21 |
| UGUAGCCCAUCUUCUCUGCCUGC | 1033 | usGfsuagCfcCfAfucuuCfuCfugccusgsc | 2129 | antisense | 23 |
| AACGGGCAUGAUGUUGAGUUC | 1034 | asascgggCfaUfGfAfuguugaguucL96 | 2130 | sense | 21 |
| GAACUCAACAUCAUGCCCGUUCC | 1035 | gsAfsacuCfaAfCfaucaUfgCfccguuscsc | 2131 | antisense | 23 |
| ACGGGCAUGAUGUUGAGUUCC | 1036 | ascsgggcAfuGfAfUfguugaguuccL96 | 2132 | sense | 21 |
| GGAACUCAACAUCAUGCCCGUUC | 1037 | gsGfsaacUfcAfAfcaucAfuGfcccgususc | 2133 | antisense | 23 |
| UGGGAACGGGCAUGAUGUUGA | 1038 | usgsggaaCfgGfGfCfaugauguugaL96 | 2134 | sense | 21 |
| UCAACAUCAUGCCCGUUCCCAGG | 1039 | usCfsaacAfuCfAfugccCfgUfucccasgsg | 2135 | antisense | 23 |
| CUGGGAACGGGCAUGAUGUUG | 1040 | csusgggaAfcGfGfGfcaugauguugL96 | 2136 | sense | 21 |
| CAACAUCAUGCCCGUUCCCAGGG | 1041 | csAfsacaUfcAfUfgcccGfuUfcccagsgsg | 2137 | antisense | 23 |
| AUGUGGCUAAAGCAAUAGACC | 1042 | asusguggCfuAfAfAfgcaauagaccL96 | 2138 | sense | 21 |
| GGUCUAUUGCUUUAGCCACAUAU | 1043 | gsGfsucuAfuUfGfcuuuAfgCfcacausasu | 2139 | antisense | 23 |
| UGUGGCUAAAGCAAUAGACCC | 1044 | usgsuggcUfaAfAfGfcaauagacccL96 | 2140 | sense | 21 |
| GGGUCUAUUGCUUUAGCCACAUA | 1045 | gsGfsgucUfaUfUfgcuuUfaGfccacasusa | 2141 | antisense | 23 |
| GCAUAUGUGGCUAAAGCAAUA | 1046 | gscsauauGfuGfGfCfuaaagcaauaL96 | 2142 | sense | 21 |
| UAUUGCUUUAGCCACAUAUGCAG | 1047 | usAfsuugCfuUfUfagccAfcAfuaugcsasg | 2143 | antisense | 23 |
| UGCAUAUGUGGCUAAAGCAAU | 1048 | usgscauaUfgUfGfGfcuaaagcaauL96 | 2144 | sense | 21 |
| AUUGCUUUAGCCACAUAUGCAGC | 1049 | asUfsugcUfuUfAfgccaCfaUfaugcasgsc | 2145 | antisense | 23 |
| AGGAUGCUCCGGAAUGUUGCU | 1050 | asgsgaugCfuCfCfGfgaauguugcuL96 | 2146 | sense | 21 |
| AGCAACAUUCCGGAGCAUCCUUG | 1051 | asGfscaaCfaUfUfccggAfgCfauccususg | 2147 | antisense | 23 |
| GGAUGCUCCGGAAUGUUGCUG | 1052 | gsgsaugcUfcCfGfGfaauguugcugL96 | 2148 | sense | 21 |
| CAGCAACAUUCCGGAGCAUCCUU | 1053 | csAfsgcaAfcAfUfuccgGfaGfcauccsusu | 2149 | antisense | 23 |
| UCCAAGGAUGCUCCGGAAUGU | 1054 | uscscaagGfaUfGfCfuccggaauguL96 | 2150 | sense | 21 |
| ACAUUCCGGAGCAUCCUUGGAUA | 1055 | asCfsauuCfcGfGfagcaUfcCfuuggasusa | 2151 | antisense | 23 |
| AUCCAAGGAUGCUCCGGAAUG | 1056 | asusccaaGfgAfUfGfcuccggaaugL96 | 2152 | sense | 21 |
| CAUUCCGGAGCAUCCUUGGAUAC | 1057 | csAfsuucCfgGfAfgcauCfcUfuggausasc | 2153 | antisense | 23 |
| UCACAUCUUUAGUGUCUGAAU | 1058 | uscsacauCfuUfUfAfgugucugaauL96 | 2154 | sense | 21 |
| AUUCAGACACUAAAGAUGUGAUU | 1059 | asUfsucaGfaCfAfcuaaAfgAfugugasusu | 2155 | antisense | 23 |
| CACAUCUUUAGUGUCUGAAUA | 1060 | csascaucUfuUfAfGfugucugaauaL96 | 2156 | sense | 21 |
| UAUUCAGACACUAAAGAUGUGAU | 1061 | usAfsuucAfgAfCfacuaAfaGfaugugsasu | 2157 | antisense | 23 |
| CCAAUCACAUCUUUAGUGUCU | 1062 | cscsaaucAfcAfUfCfuuuagugucuL96 | 2158 | sense | 21 |
| AGACACUAAAGAUGUGAUUGGAA | 1063 | asGfsacaCfuAfAfagauGfuGfauuggsasa | 2159 | antisense | 23 |
| UCCAAUCACAUCUUUAGUGUC | 1064 | uscscaauCfaCfAfUfcuuuagugucL96 | 2160 | sense | 21 |
| GACACUAAAGAUGUGAUUGGAAA | 1065 | gsAfscacUfaAfAfgaugUfgAfuuggasasa | 2161 | antisense | 23 |
| AAAUGUGUUUAGACAACGUCA | 1066 | asasauguGfuUfUfAfgacaacgucaL96 | 2162 | sense | 21 |
| UGACGUUGUCUAAACACAUUUUC | 1067 | usGfsacgUfuGfUfcuaaAfcAfcauuususc | 2163 | antisense | 23 |
| AAUGUGUUUAGACAACGUCAU | 1068 | asasugugUfuUfAfGfacaacgucauL96 | 2164 | sense | 21 |
| AUGACGUUGUCUAAACACAUUUU | 1069 | asUfsgacGfuUfGfucuaAfaCfacauususu | 2165 | antisense | 23 |
| UUGAAAAUGUGUUUAGACAAC | 1070 | ususgaaaAfuGfUfGfuuuagacaacL96 | 2166 | sense | 21 |
| GUUGUCUAAACACAUUUUCAAUG | 1071 | gsUfsuguCfuAfAfacacAfuUfuucaasusg | 2167 | antisense | 23 |
| AUUGAAAAUGUGUUUAGACAA | 1072 | asusugaaAfaUfGfUfguuuagacaaL96 | 2168 | sense | 21 |
| UUGUCUAAACACAUUUUCAAUGU | 1073 | usUfsgucUfaAfAfcacaUfuUfucaausgsu | 2169 | antisense | 23 |
| UACUAAAGGAAGAAUUCCGGU | 1074 | usascuaaAfgGfAfAfgaauuccgguL96 | 2170 | sense | 21 |
| ACCGGAAUUCUUCCUUUAGUAUC | 1075 | asCfscggAfaUfUfcuucCfuUfuaguasusc | 2171 | antisense | 23 |
| ACUAAAGGAAGAAUUCCGGUU | 1076 | ascsuaaaGfgAfAfGfaauuccgguuL96 | 2172 | sense | 21 |
| AACCGGAAUUCUUCCUUUAGUAU | 1077 | asAfsccgGfaAfUfucuuCfcUfuuagusasu | 2173 | antisense | 23 |
| GAGAUACUAAAGGAAGAAUUC | 1078 | gsasgauaCfuAfAfAfggaagaauucL96 | 2174 | sense | 21 |
| GAAUUCUUCCUUUAGUAUCUCGA | 1079 | gsAfsauuCfuUfCfcuuuAfgUfaucucsgsa | 2175 | antisense | 23 |
| CGAGAUACUAAAGGAAGAAUU | 1080 | csgsagauAfcUfAfAfaggaagaauuL96 | 2176 | sense | 21 |
| AAUUCUUCCUUUAGUAUCUCGAG | 1081 | asAfsuucUfuCfCfuuuaGfuAfucucgsasg | 2177 | antisense | 23 |
| AACUUUGGCUGAUAAUAUUGC | 1082 | asascuuuGfgCfUfGfauaauauugcL96 | 2178 | sense | 21 |
| GCAAUAUUAUCAGCCAAAGUUUC | 1083 | gsCfsaauAfuUfAfucagCfcAfaaguususc | 2179 | antisense | 23 |
| ACUUUGGCUGAUAAUAUUGCA | 1084 | ascsuuugGfcUfGfAfuaauauugcaL96 | 2180 | sense | 21 |
| UGCAAUAUUAUCAGCCAAAGUUU | 1085 | usGfscaaUfaUfUfaucaGfcCfaaagususu | 2181 | antisense | 23 |
| AAGAAACUUUGGCUGAUAAUA | 1086 | asasgaaaCfuUfUfGfgcugauaauaL96 | 2182 | sense | 21 |
| UAUUAUCAGCCAAAGUUUCUUCA | 1087 | usAfsuuaUfcAfGfccaaAfgUfuucuuscsa | 2183 | antisense | 23 |
| GAAGAAACUUUGGCUGAUAAU | 1088 | gsasagaaAfcUfUfUfggcugauaauL96 | 2184 | sense | 21 |
| AUUAUCAGCCAAAGUUUCUUCAU | 1089 | asUfsuauCfaGfCfcaaaGfuUfucuucsasu | 2185 | antisense | 23 |
| AAAUGGCUGAGAAGACUGACA | 1090 | asasauggCfuGfAfGfaagacugacaL96 | 2186 | sense | 21 |
| UGUCAGUCUUCUCAGCCAUUUGA | 1091 | usGfsucaGfuCfUfucucAfgCfcauuusgsa | 2187 | antisense | 23 |
| AAUGGCUGAGAAGACUGACAU | 1092 | asasuggcUfgAfGfAfagacugacauL96 | 2188 | sense | 21 |
| AUGUCAGUCUUCUCAGCCAUUUG | 1093 | asUfsgucAfgUfCfuucuCfaGfccauususg | 2189 | antisense | 23 |
| UAUCAAAUGGCUGAGAAGACU | 1094 | usasucaaAfuGfGfCfugagaagacuL96 | 2190 | sense | 21 |
| AGUCUUCUCAGCCAUUUGAUAUC | 1095 | asGfsucuUfcUfCfagccAfuUfugauasusc | 2191 | antisense | 23 |
| AUAUCAAAUGGCUGAGAAGAC | 1096 | asusaucaAfaUfGfGfcugagaagacL96 | 2192 | sense | 21 |
| GUCUUCUCAGCCAUUUGAUAUCU | 1097 | gsUfscuuCfuCfAfgccaUfuUfgauauscsu | 2193 | antisense | 23 |
| GUGGUUCUUAAAUUGUAAGCU | 1098 | gsusgguuCfuUfAfAfauuguaagcuL96 | 2194 | sense | 21 |
| AGCUUACAAUUUAAGAACCACUG | 1099 | asGfscuuAfcAfAfuuuaAfgAfaccacsusg | 2195 | antisense | 23 |
| UGGUUCUUAAAUUGUAAGCUC | 1100 | usgsguucUfuAfAfAfuuguaagcucL96 | 2196 | sense | 21 |
| GAGCUUACAAUUUAAGAACCACU | 1101 | gsAfsgcuUfaCfAfauuuAfaGfaaccascsu | 2197 | antisense | 23 |
| AACAGUGGUUCUUAAAUUGUA | 1102 | asascaguGfgUfUfCfuuaaauuguaL96 | 2198 | sense | 21 |
| UACAAUUUAAGAACCACUGUUUU | 1103 | usAfscaaUfuUfAfagaaCfcAfcuguususu | 2199 | antisense | 23 |
| AAACAGUGGUUCUUAAAUUGU | 1104 | asasacagUfgGfUfUfcuuaaauuguL96 | 2200 | sense | 21 |
| ACAAUUUAAGAACCACUGUUUUA | 1105 | asCfsaauUfuAfAfgaacCfaCfuguuususa | 2201 | antisense | 23 |
| AAGUCAUCGACAAGACAUUGG | 1106 | asasgucaUfcGfAfCfaagacauuggL96 | 2202 | sense | 21 |
| CCAAUGUCUUGUCGAUGACUUUC | 1107 | csCfsaauGfuCfUfugucGfaUfgacuususc | 2203 | antisense | 23 |
| AGUCAUCGACAAGACAUUGGU | 1108 | asgsucauCfgAfCfAfagacauugguL96 | 2204 | sense | 21 |
| ACCAAUGUCUUGUCGAUGACUUU | 1109 | asCfscaaUfgUfCfuuguCfgAfugacususu | 2205 | antisense | 23 |
| GUGAAAGUCAUCGACAAGACA | 1110 | gsusgaaaGfuCfAfUfcgacaagacaL96 | 2206 | sense | 21 |
| UGUCUUGUCGAUGACUUUCACAU | 1111 | usGfsucuUfgUfCfgaugAfcUfuucacsasu | 2207 | antisense | 23 |
| UGUGAAAGUCAUCGACAAGAC | 1112 | usgsugaaAfgUfCfAfucgacaagacL96 | 2208 | sense | 21 |
| GUCUUGUCGAUGACUUUCACAUU | 1113 | gsUfscuuGfuCfGfaugaCfuUfucacasusu | 2209 | antisense | 23 |
| GAUAAUAUUGCAGCAUUUUCC | 1114 | gsasuaauAfuUfGfCfagcauuuuccL96 | 2210 | sense | 21 |
| GGAAAAUGCUGCAAUAUUAUCAG | 1115 | gsGfsaaaAfuGfCfugcaAfuAfuuaucsasg | 2211 | antisense | 23 |
| AUAAUAUUGCAGCAUUUUCCA | 1116 | asusaauaUfuGfCfAfgcauuuuccaL96 | 2212 | sense | 21 |
| UGGAAAAUGCUGCAAUAUUAUCA | 1117 | usGfsgaaAfaUfGfcugcAfaUfauuauscsa | 2213 | antisense | 23 |
| GGCUGAUAAUAUUGCAGCAUU | 1118 | gsgscugaUfaAfUfAfuugcagcauuL96 | 2214 | sense | 21 |
| AAUGCUGCAAUAUUAUCAGCCAA | 1119 | asAfsugcUfgCfAfauauUfaUfcagccsasa | 2215 | antisense | 23 |
| UGGCUGAUAAUAUUGCAGCAU | 1120 | usgsgcugAfuAfAfUfauugcagcauL96 | 2216 | sense | 21 |
| AUGCUGCAAUAUUAUCAGCCAAA | 1121 | asUfsgcuGfcAfAfuauuAfuCfagccasasa | 2217 | antisense | 23 |
| GCUAAUUUGUAUCAAUGAUUA | 1122 | gscsuaauUfuGfUfAfucaaugauuaL96 | 2218 | sense | 21 |
| UAAUCAUUGAUACAAAUUAGCCG | 1123 | usAfsaucAfuUfGfauacAfaAfuuagcscsg | 2219 | antisense | 23 |
| CUAAUUUGUAUCAAUGAUUAU | 1124 | csusaauuUfgUfAfUfcaaugauuauL96 | 2220 | sense | 21 |
| AUAAUCAUUGAUACAAAUUAGCC | 1125 | asUfsaauCfaUfUfgauaCfaAfauuagscsc | 2221 | antisense | 23 |
| CCCGGCUAAUUUGUAUCAAUG | 1126 | cscscggcUfaAfUfUfuguaucaaugL96 | 2222 | sense | 21 |
| CAUUGAUACAAAUUAGCCGGGGG | 1127 | csAfsuugAfuAfCfaaauUfaGfccgggsgsg | 2223 | antisense | 23 |
| CCCCGGCUAAUUUGUAUCAAU | 1128 | cscsccggCfuAfAfUfuuguaucaauL96 | 2224 | sense | 21 |
| AUUGAUACAAAUUAGCCGGGGGA | 1129 | asUfsugaUfaCfAfaauuAfgCfcggggsgsa | 2225 | antisense | 23 |
| UAAUUGGUGAUACUUCUUUGA | 1130 | usasauugGfuGfAfUfacuucuuugaL96 | 2226 | sense | 21 |
| UCAAAGAAGUAUCACCAAUUACC | 1131 | usCfsaaaGfaAfGfuaucAfcCfaauuascsc | 2227 | antisense | 23 |
| AAUUGGUGAUACUUCUUUGAA | 1132 | asasuuggUfgAfUfAfcuucuuugaaL96 | 2228 | sense | 21 |
| UUCAAAGAAGUAUCACCAAUUAC | 1133 | usUfscaaAfgAfAfguauCfaCfcaauusasc | 2229 | antisense | 23 |
| GCGGUAAUUGGUGAUACUUCU | 1134 | gscsgguaAfuUfGfGfugauacuucuL96 | 2230 | sense | 21 |
| AGAAGUAUCACCAAUUACCGCCA | 1135 | asGfsaagUfaUfCfaccaAfuUfaccgcscsa | 2231 | antisense | 23 |
| GGCGGUAAUUGGUGAUACUUC | 1136 | gsgscgguAfaUfUfGfgugauacuucL96 | 2232 | sense | 21 |
| GAAGUAUCACCAAUUACCGCCAC | 1137 | gsAfsaguAfuCfAfccaaUfuAfccgccsasc | 2233 | antisense | 23 |
| CAGUGGUUCUUAAAUUGUAAG | 1138 | csasguggUfuCfUfUfaaauuguaagL96 | 2234 | sense | 21 |
| CUUACAAUUUAAGAACCACUGUU | 1139 | csUfsuacAfaUfUfuaagAfaCfcacugsusu | 2235 | antisense | 23 |
| AGUGGUUCUUAAAUUGUAAGC | 1140 | asgsugguUfcUfUfAfaauuguaagcL96 | 2236 | sense | 21 |
| GCUUACAAUUUAAGAACCACUGU | 1141 | gsCfsuuaCfaAfUfuuaaGfaAfccacusgsu | 2237 | antisense | 23 |
| AAAACAGUGGUUCUUAAAUUG | 1142 | asasaacaGfuGfGfUfucuuaaauugL96 | 2238 | sense | 21 |
| CAAUUUAAGAACCACUGUUUUAA | 1143 | csAfsauuUfaAfGfaaccAfcUfguuuusasa | 2239 | antisense | 23 |
| UAAAACAGUGGUUCUUAAAUU | 1144 | usasaaacAfgUfGfGfuucuuaaauuL96 | 2240 | sense | 21 |
| AAUUUAAGAACCACUGUUUUAAA | 1145 | asAfsuuuAfaGfAfaccaCfuGfuuuuasasa | 2241 | antisense | 23 |
| ACCUGUAUUCUGUUUACAUGU | 1146 | ascscuguAfuUfCfUfguuuacauguL96 | 2242 | sense | 21 |
| ACAUGUAAACAGAAUACAGGUUA | 1147 | asCfsaugUfaAfAfcagaAfuAfcaggususa | 2243 | antisense | 23 |
| CCUGUAUUCUGUUUACAUGUC | 1148 | cscsuguaUfuCfUfGfuuuacaugucL96 | 2244 | sense | 21 |
| GACAUGUAAACAGAAUACAGGUU | 1149 | gsAfscauGfuAfAfacagAfaUfacaggsusu | 2245 | antisense | 23 |
| AUUAACCUGUAUUCUGUUUAC | 1150 | asusuaacCfuGfUfAfuucuguuuacL96 | 2246 | sense | 21 |
| GUAAACAGAAUACAGGUUAAUAA | 1151 | gsUfsaaaCfaGfAfauacAfgGfuuaausasa | 2247 | antisense | 23 |
| UAUUAACCUGUAUUCUGUUUA | 1152 | usasuuaaCfcUfGfUfauucuguuuaL96 | 2248 | sense | 21 |
| UAAACAGAAUACAGGUUAAUAAA | 1153 | usAfsaacAfgAfAfuacaGfgUfuaauasasa | 2249 | antisense | 23 |
| AAGAAACUUUGGCUGAUAAUA | 1154 | asasgaaaCfuUfUfGfgcugauaauaL96 | 2250 | sense | 21 |
| UAUUAUCAGCCAAAGUUUCUUCA | 1155 | usAfsuuaUfcAfGfccaaAfgUfuucuuscsa | 2251 | antisense | 23 |
| AGAAACUUUGGCUGAUAAUAU | 1156 | asgsaaacUfuUfGfGfcugauaauauL96 | 2252 | sense | 21 |
| AUAUUAUCAGCCAAAGUUUCUUC | 1157 | asUfsauuAfuCfAfgccaAfaGfuuucususc | 2253 | antisense | 23 |
| GAUGAAGAAACUUUGGCUGAU | 1158 | gsasugaaGfaAfAfCfuuuggcugauL96 | 2254 | sense | 21 |
| AUCAGCCAAAGUUUCUUCAUCAU | 1159 | asUfscagCfcAfAfaguuUfcUfucaucsasu | 2255 | antisense | 23 |
| UGAUGAAGAAACUUUGGCUGA | 1160 | usgsaugaAfgAfAfAfcuuuggcugaL96 | 2256 | sense | 21 |
| UCAGCCAAAGUUUCUUCAUCAUU | 1161 | usCfsagcCfaAfAfguuuCfuUfcaucasusu | 2257 | antisense | 23 |
| GAAAGGUGUUCAAGAUGUCCU | 1162 | gsasaaggUfgUfUfCfaagauguccuL96 | 2258 | sense | 21 |
| AGGACAUCUUGAACACCUUUCUC | 1163 | asGfsgacAfuCfUfugaaCfaCfcuuucsusc | 2259 | antisense | 23 |
| AAAGGUGUUCAAGAUGUCCUC | 1164 | asasagguGfuUfCfAfagauguccucL96 | 2260 | sense | 21 |
| GAGGACAUCUUGAACACCUUUCU | 1165 | gsAfsggaCfaUfCfuugaAfcAfccuuuscsu | 2261 | antisense | 23 |
| GGGAGAAAGGUGUUCAAGAUG | 1166 | gsgsgagaAfaGfGfUfguucaagaugL96 | 2262 | sense | 21 |
| CAUCUUGAACACCUUUCUCCCCC | 1167 | csAfsucuUfgAfAfcaccUfuUfcucccscsc | 2263 | antisense | 23 |
| GGGGAGAAAGGUGUUCAAGAU | 1168 | gsgsggagAfaAfGfGfuguucaagauL96 | 2264 | sense | 21 |
| AUCUUGAACACCUUUCUCCCCCU | 1169 | asUfscuuGfaAfCfaccuUfuCfuccccscsu | 2265 | antisense | 23 |
| AUCUUGGUGUCGAAUCAUGGG | 1170 | asuscuugGfuGfUfCfgaaucaugggL96 | 2266 | sense | 21 |
| CCCAUGAUUCGACACCAAGAUCC | 1171 | csCfscauGfaUfUfcgacAfcCfaagauscsc | 2267 | antisense | 23 |
| UCUUGGUGUCGAAUCAUGGGG | 1172 | uscsuuggUfgUfCfGfaaucauggggL96 | 2268 | sense | 21 |
| CCCCAUGAUUCGACACCAAGAUC | 1173 | csCfsccaUfgAfUfucgaCfaCfcaagasusc | 2269 | antisense | 23 |
| UGGGAUCUUGGUGUCGAAUCA | 1174 | usgsggauCfuUfGfGfugucgaaucaL96 | 2270 | sense | 21 |
| UGAUUCGACACCAAGAUCCCAUU | 1175 | usGfsauuCfgAfCfaccaAfgAfucccasusu | 2271 | antisense | 23 |
| AUGGGAUCUUGGUGUCGAAUC | 1176 | asusgggaUfcUfUfGfgugucgaaucL96 | 2272 | sense | 21 |
| GAUUCGACACCAAGAUCCCAUUC | 1177 | gsAfsuucGfaCfAfccaaGfaUfcccaususc | 2273 | antisense | 23 |
| GCUACAAGGCCAUAUUUGUGA | 1178 | gscsuacaAfgGfCfCfauauuugugaL96 | 2274 | sense | 21 |
| UCACAAAUAUGGCCUUGUAGCCC | 1179 | usCfsacaAfaUfAfuggcCfuUfguagcscsc | 2275 | antisense | 23 |
| CUACAAGGCCAUAUUUGUGAC | 1180 | csusacaaGfgCfCfAfuauuugugacL96 | 2276 | sense | 21 |
| GUCACAAAUAUGGCCUUGUAGCC | 1181 | gsUfscacAfaAfUfauggCfcUfuguagscsc | 2277 | antisense | 23 |
| AUGGGCUACAAGGCCAUAUUU | 1182 | asusgggcUfaCfAfAfggccauauuuL96 | 2278 | sense | 21 |
| AAAUAUGGCCUUGUAGCCCAUCU | 1183 | asAfsauaUfgGfCfcuugUfaGfcccauscsu | 2279 | antisense | 23 |
| GAUGGGCUACAAGGCCAUAUU | 1184 | gsasugggCfuAfCfAfaggccauauuL96 | 2280 | sense | 21 |
| AAUAUGGCCUUGUAGCCCAUCUU | 1185 | asAfsuauGfgCfCfuuguAfgCfccaucsusu | 2281 | antisense | 23 |
| ACUGGAGAGAAUUGGAAUGGG | 1186 | ascsuggaGfaGfAfAfuuggaaugggL96 | 2282 | sense | 21 |
| CCCAUUCCAAUUCUCUCCAGUGC | 1187 | csCfscauUfcCfAfauucUfcUfccagusgsc | 2283 | antisense | 23 |
| CUGGAGAGAAUUGGAAUGGGU | 1188 | csusggagAfgAfAfUfuggaauggguL96 | 2284 | sense | 21 |
| ACCCAUUCCAAUUCUCUCCAGUG | 1189 | asCfsccaUfuCfCfaauuCfuCfuccagsusg | 2285 | antisense | 23 |
| UAGCACUGGAGAGAAUUGGAA | 1190 | usasgcacUfgGfAfGfagaauuggaaL96 | 2286 | sense | 21 |
| UUCCAAUUCUCUCCAGUGCUACC | 1191 | usUfsccaAfuUfCfucucCfaGfugcuascsc | 2287 | antisense | 23 |
| GUAGCACUGGAGAGAAUUGGA | 1192 | gsusagcaCfuGfGfAfgagaauuggaL96 | 2288 | sense | 21 |
| UCCAAUUCUCUCCAGUGCUACCU | 1193 | usCfscaaUfuCfUfcuccAfgUfgcuacscsu | 2289 | antisense | 23 |
| ACAGUGGACACACCUUACCUG | 1194 | ascsagugGfaCfAfCfaccuuaccugL96 | 2290 | sense | 21 |
| CAGGUAAGGUGUGUCCACUGUCA | 1195 | csAfsgguAfaGfGfugugUfcCfacuguscsa | 2291 | antisense | 23 |
| CAGUGGACACACCUUACCUGG | 1196 | csasguggAfcAfCfAfccuuaccuggL96 | 2292 | sense | 21 |
| CCAGGUAAGGUGUGUCCACUGUC | 1197 | csCfsaggUfaAfGfguguGfuCfcacugsusc | 2293 | antisense | 23 |
| UGUGACAGUGGACACACCUUA | 1198 | usgsugacAfgUfGfGfacacaccuuaL96 | 2294 | sense | 21 |
| UAAGGUGUGUCCACUGUCACAAA | 1199 | usAfsaggUfgUfGfuccaCfuGfucacasasa | 2295 | antisense | 23 |
| UUGUGACAGUGGACACACCUU | 1200 | ususgugaCfaGfUfGfgacacaccuuL96 | 2296 | sense | 21 |
| AAGGUGUGUCCACUGUCACAAAU | 1201 | asAfsgguGfuGfUfccacUfgUfcacaasasu | 2297 | antisense | 23 |
| GAAGACUGACAUCAUUGCCAA | 1202 | gsasagacUfgAfCfAfucauugccaaL96 | 2298 | sense | 21 |
| UUGGCAAUGAUGUCAGUCUUCUC | 1203 | usUfsggcAfaUfGfauguCfaGfucuucsusc | 2299 | antisense | 23 |
| AAGACUGACAUCAUUGCCAAU | 1204 | asasgacuGfaCfAfUfcauugccaauL96 | 2300 | sense | 21 |
| AUUGGCAAUGAUGUCAGUCUUCU | 1205 | asUfsuggCfaAfUfgaugUfcAfgucuuscsu | 2301 | antisense | 23 |
| CUGAGAAGACUGACAUCAUUG | 1206 | csusgagaAfgAfCfUfgacaucauugL96 | 2302 | sense | 21 |
| CAAUGAUGUCAGUCUUCUCAGCC | 1207 | csAfsaugAfuGfUfcaguCfuUfcucagscsc | 2303 | antisense | 23 |
| GCUGAGAAGACUGACAUCAUU | 1208 | gscsugagAfaGfAfCfugacaucauuL96 | 2304 | sense | 21 |
| AAUGAUGUCAGUCUUCUCAGCCA | 1209 | asAfsugaUfgUfCfagucUfuCfucagescsa | 2305 | antisense | 23 |
| GCUCAGGUUCAAAGUGUUGGU | 1210 | gscsucagGfuUfCfAfaaguguugguL96 | 2306 | sense | 21 |
| ACCAACACUUUGAACCUGAGCUU | 1211 | asCfscaaCfaCfUfuugaAfcCfugagcsusu | 2307 | antisense | 23 |
| CUCAGGUUCAAAGUGUUGGUA | 1212 | csuscaggUfuCfAfAfaguguugguaL96 | 2308 | sense | 21 |
| UACCAACACUUUGAACCUGAGCU | 1213 | usAfsccaAfcAfCfuuugAfaCfcugagscsu | 2309 | antisense | 23 |
| GUAAGCUCAGGUUCAAAGUGU | 1214 | gsusaagcUfcAfGfGfuucaaaguguL96 | 2310 | sense | 21 |
| ACACUUUGAACCUGAGCUUACAA | 1215 | asCfsacuUfuGfAfaccuGfaGfcuuacsasa | 2311 | antisense | 23 |
| UGUAAGCUCAGGUUCAAAGUG | 1216 | usgsuaagCfuCfAfGfguucaaagugL96 | 2312 | sense | 21 |
| CACUUUGAACCUGAGCUUACAAU | 1217 | csAfscuuUfgAfAfccugAfgCfuuacasasu | 2313 | antisense | 23 |
| AUGUAUUACUUGACAAAGAGA | 1218 | asusguauUfaCfUfUfgacaaagagaL96 | 2314 | sense | 21 |
| UCUCUUUGUCAAGUAAUACAUGC | 1219 | usCfsucuUfuGfUfcaagUfaAfuacausgsc | 2315 | antisense | 23 |
| UGUAUUACUUGACAAAGAGAC | 1220 | usgsuauuAfcUfUfGfacaaagagacL96 | 2316 | sense | 21 |
| GUCUCUUUGUCAAGUAAUACAUG | 1221 | gsUfscucUfuUfGfucaaGfuAfauacasusg | 2317 | antisense | 23 |
| CAGCAUGUAUUACUUGACAAA | 1222 | csasgcauGfuAfUfUfacuugacaaaL96 | 2318 | sense | 21 |
| UUUGUCAAGUAAUACAUGCUGAA | 1223 | usUfsuguCfaAfGfuaauAfcAfugcugsasa | 2319 | antisense | 23 |
| UCAGCAUGUAUUACUUGACAA | 1224 | uscsagcaUfgUfAfUfuacuugacaaL96 | 2320 | sense | 21 |
| UUGUCAAGUAAUACAUGCUGAAA | 1225 | usUfsgucAfaGfUfaauaCfaUfgcugasasa | 2321 | antisense | 23 |
| CUGCAACUGUAUAUCUACAAG | 1226 | csusgcaaCfuGfUfAfuaucuacaagL96 | 2322 | sense | 21 |
| CUUGUAGAUAUACAGUUGCAGCC | 1227 | csUfsuguAfgAfUfauacAfgUfugcagscsc | 2323 | antisense | 23 |
| UGCAACUGUAUAUCUACAAGG | 1228 | usgscaacUfgUfAfUfaucuacaaggL96 | 2324 | sense | 21 |
| CCUUGUAGAUAUACAGUUGCAGC | 1229 | csCfsuugUfaGfAfuauaCfaGfuugcasgsc | 2325 | antisense | 23 |
| UUGGCUGCAACUGUAUAUCUA | 1230 | ususggcuGfcAfAfCfuguauaucuaL96 | 2326 | sense | 21 |
| UAGAUAUACAGUUGCAGCCAACG | 1231 | usAfsgauAfuAfCfaguuGfcAfgccaascsg | 2327 | antisense | 23 |
| GUUGGCUGCAACUGUAUAUCU | 1232 | gsusuggcUfgCfAfAfcuguauaucuL96 | 2328 | sense | 21 |
| AGAUAUACAGUUGCAGCCAACGA | 1233 | asGfsauaUfaCfAfguugCfaGfccaacsgsa | 2329 | antisense | 23 |
| CAAAUGAUGAAGAAACUUUGG | 1234 | csasaaugAfuGfAfAfgaaacuuuggL96 | 2330 | sense | 21 |
| CCAAAGUUUCUUCAUCAUUUGCC | 1235 | csCfsaaaGfuUfUfcuucAfuCfauuugscsc | 2331 | antisense | 23 |
| AAAUGAUGAAGAAACUUUGGC | 1236 | asasaugaUfgAfAfGfaaacuuuggcL96 | 2332 | sense | 21 |
| GCCAAAGUUUCUUCAUCAUUUGC | 1237 | gsCfscaaAfgUfUfucuuCfaUfcauuusgsc | 2333 | antisense | 23 |
| GGGGCAAAUGAUGAAGAAACU | 1238 | gsgsggcaAfaUfGfAfugaagaaacuL96 | 2334 | sense | 21 |
| AGUUUCUUCAUCAUUUGCCCCAG | 1239 | asGfsuuuCfuUfCfaucaUfuUfgccccsasg | 2335 | antisense | 23 |
| UGGGGCAAAUGAUGAAGAAAC | 1240 | usgsgggcAfaAfUfGfaugaagaaacL96 | 2336 | sense | 21 |
| GUUUCUUCAUCAUUUGCCCCAGA | 1241 | gsUfsuucUfuCfAfucauUfuGfccccasgsa | 2337 | antisense | 23 |
| CAAAGGGUGUCGUUCUUUUCC | 1242 | csasaaggGfuGfUfCfguucuuuuccL96 | 2338 | sense | 21 |
| GGAAAAGAACGACACCCUUUGUA | 1243 | gsGfsaaaAfgAfAfcgacAfcCfcuuugsusa | 2339 | antisense | 23 |
| AAAGGGUGUCGUUCUUUUCCA | 1244 | asasagggUfgUfCfGfuucuuuuccaL96 | 2340 | sense | 21 |
| UGGAAAAGAACGACACCCUUUGU | 1245 | usGfsgaaAfaGfAfacgaCfaCfccuuusgsu | 2341 | antisense | 23 |
| AAUACAAAGGGUGUCGUUCUU | 1246 | asasuacaAfaGfGfGfugucguucuuL96 | 2342 | sense | 21 |
| AAGAACGACACCCUUUGUAUUGA | 1247 | asAfsgaaCfgAfCfacccUfuUfguauusgsa | 2343 | antisense | 23 |
| CAAUACAAAGGGUGUCGUUCU | 1248 | csasauacAfaAfGfGfgugucguucuL96 | 2344 | sense | 21 |
| AGAACGACACCCUUUGUAUUGAA | 1249 | asGfsaacGfaCfAfcccuUfuGfuauugsasa | 2345 | antisense | 23 |
| AAAGGCACUGAUGUUCUGAAA | 1250 | asasaggcAfcUfGfAfuguucugaaaL96 | 2346 | sense | 21 |
| UUUCAGAACAUCAGUGCCUUUCC | 1251 | usUfsucaGfaAfCfaucaGfuGfccuuuscsc | 2347 | antisense | 23 |
| AAGGCACUGAUGUUCUGAAAG | 1252 | asasggcaCfuGfAfUfguucugaaagL96 | 2348 | sense | 21 |
| CUUUCAGAACAUCAGUGCCUUUC | 1253 | csUfsuucAfgAfAfcaucAfgUfgccuususc | 2349 | antisense | 23 |
| GCGGAAAGGCACUGAUGUUCU | 1254 | gscsggaaAfgGfCfAfcugauguucuL96 | 2350 | sense | 21 |
| AGAACAUCAGUGCCUUUCCGCAC | 1255 | asGfsaacAfuCfAfgugcCfuUfuccgcsasc | 2351 | antisense | 23 |
| UGCGGAAAGGCACUGAUGUUC | 1256 | usgscggaAfaGfGfCfacugauguucL96 | 2352 | sense | 21 |
| GAACAUCAGUGCCUUUCCGCACA | 1257 | gsAfsacaUfcAfGfugccUfuUfccgcascsa | 2353 | antisense | 23 |
| AAGGAUGCUCCGGAAUGUUGC | 1258 | asasggauGfcUfCfCfggaauguugcL96 | 2354 | sense | 21 |
| GCAACAUUCCGGAGCAUCCUUGG | 1259 | gsCfsaacAfuUfCfcggaGfcAfuccuusgsg | 2355 | antisense | 23 |
| AGGAUGCUCCGGAAUGUUGCU | 1260 | asgsgaugCfuCfCfGfgaauguugcuL96 | 2356 | sense | 21 |
| AGCAACAUUCCGGAGCAUCCUUG | 1261 | asGfscaaCfaUfUfccggAfgCfauccususg | 2357 | antisense | 23 |
| AUCCAAGGAUGCUCCGGAAUG | 1262 | asusccaaGfgAfUfGfcuccggaaugL96 | 2358 | sense | 21 |
| CAUUCCGGAGCAUCCUUGGAUAC | 1263 | csAfsuucCfgGfAfgcauCfcUfuggausasc | 2359 | antisense | 23 |
| UAUCCAAGGAUGCUCCGGAAU | 1264 | usasuccaAfgGfAfUfgcuccggaauL96 | 2360 | sense | 21 |
| AUUCCGGAGCAUCCUUGGAUACA | 1265 | asUfsuccGfgAfGfcaucCfuUfggauascsa | 2361 | antisense | 23 |
| AAUGGGUGGCGGUAAUUGGUG | 1266 | asasugggUfgGfCfGfguaauuggugL96 | 2362 | sense | 21 |
| CACCAAUUACCGCCACCCAUUCC | 1267 | csAfsccaAfuUfAfccgcCfaCfccauuscsc | 2363 | antisense | 23 |
| AUGGGUGGCGGUAAUUGGUGA | 1268 | asusggguGfgCfGfGfuaauuggugaL96 | 2364 | sense | 21 |
| UCACCAAUUACCGCCACCCAUUC | 1269 | usCfsaccAfaUfUfaccgCfcAfcccaususc | 2365 | antisense | 23 |
| UUGGAAUGGGUGGCGGUAAUU | 1270 | ususggaaUfgGfGfUfggcgguaauuL96 | 2366 | sense | 21 |
| AAUUACCGCCACCCAUUCCAAUU | 1271 | asAfsuuaCfcGfCfcaccCfaUfuccaasusu | 2367 | antisense | 23 |
| AUUGGAAUGGGUGGCGGUAAU | 1272 | asusuggaAfuGfGfGfuggcgguaauL96 | 2368 | sense | 21 |
| AUUACCGCCACCCAUUCCAAUUC | 1273 | asUfsuacCfgCfCfacccAfuUfccaaususc | 2369 | antisense | 23 |
| GGAAAGGCACUGAUGUUCUGA | 1274 | gsgsaaagGfcAfCfUfgauguucugaL96 | 2370 | sense | 21 |
| UCAGAACAUCAGUGCCUUUCCGC | 1275 | usCfsagaAfcAfUfcaguGfcCfuuuccsgsc | 2371 | antisense | 23 |
| GAAAGGCACUGAUGUUCUGAA | 1276 | gsasaaggCfaCfUfGfauguucugaaL96 | 2372 | sense | 21 |
| UUCAGAACAUCAGUGCCUUUCCG | 1277 | usUfscagAfaCfAfucagUfgCfcuuucscsg | 2373 | antisense | 23 |
| GUGCGGAAAGGCACUGAUGUU | 1278 | gsusgcggAfaAfGfGfcacugauguuL96 | 2374 | sense | 21 |
| AACAUCAGUGCCUUUCCGCACAC | 1279 | asAfscauCfaGfUfgccuUfuCfcgcacsasc | 2375 | antisense | 23 |
| UGUGCGGAAAGGCACUGAUGU | 1280 | usgsugcgGfaAfAfGfgcacugauguL96 | 2376 | sense | 21 |
| ACAUCAGUGCCUUUCCGCACACC | 1281 | asCfsaucAfgUfGfccuuUfcCfgcacascsc | 2377 | antisense | 23 |
| AAUUGUAAGCUCAGGUUCAAA | 1282 | asasuuguAfaGfCfUfcagguucaaaL96 | 2378 | sense | 21 |
| UUUGAACCUGAGCUUACAAUUUA | 1283 | usUfsugaAfcCfUfgagcUfuAfcaauususa | 2379 | antisense | 23 |
| AUUGUAAGCUCAGGUUCAAAG | 1284 | asusuguaAfgCfUfCfagguucaaagL96 | 2380 | sense | 21 |
| CUUUGAACCUGAGCUUACAAUUU | 1285 | csUfsuugAfaCfCfugagCfuUfacaaususu | 2381 | antisense | 23 |
| CUUAAAUUGUAAGCUCAGGUU | 1286 | csusuaaaUfuGfUfAfagcucagguuL96 | 2382 | sense | 21 |
| AACCUGAGCUUACAAUUUAAGAA | 1287 | asAfsccuGfaGfCfuuacAfaUfuuaagsasa | 2383 | antisense | 23 |
| UCUUAAAUUGUAAGCUCAGGU | 1288 | uscsuuaaAfuUfGfUfaagcucagguL96 | 2384 | sense | 21 |
| ACCUGAGCUUACAAUUUAAGAAC | 1289 | asCfscugAfgCfUfuacaAfuUfuaagasasc | 2385 | antisense | 23 |
| GCAAACACUAAGGUGAAAAGA | 1290 | gscsaaacAfcUfAfAfggugaaaagaL96 | 2386 | sense | 21 |
| UCUUUUCACCUUAGUGUUUGCUA | 1291 | usCfsuuuUfcAfCfcuuaGfuGfuuugcsusa | 2387 | antisense | 23 |
| CAAACACUAAGGUGAAAAGAU | 1292 | csasaacaCfuAfAfGfgugaaaagauL96 | 2388 | sense | 21 |
| AUCUUUUCACCUUAGUGUUUGCU | 1293 | asUfscuuUfuCfAfccuuAfgUfguuugscsu | 2389 | antisense | 23 |
| GGUAGCAAACACUAAGGUGAA | 1294 | gsgsuagcAfaAfCfAfcuaaggugaaL96 | 2390 | sense | 21 |
| UUCACCUUAGUGUUUGCUACCUC | 1295 | usUfscacCfuUfAfguguUfuGfcuaccsusc | 2391 | antisense | 23 |
| AGGUAGCAAACACUAAGGUGA | 1296 | asgsguagCfaAfAfCfacuaaggugaL96 | 2392 | sense | 21 |
| UCACCUUAGUGUUUGCUACCUCC | 1297 | usCfsaccUfuAfGfuguuUfgCfuaccuscsc | 2393 | antisense | 23 |
| AGGUAGCAAACACUAAGGUGA | 1298 | asgsguagCfaAfAfCfacuaaggugaL96 | 2394 | sense | 21 |
| UCACCUUAGUGUUUGCUACCUCC | 1299 | usCfsaccUfuAfGfuguuUfgCfuaccuscsc | 2395 | antisense | 23 |
| GGUAGCAAACACUAAGGUGAA | 1300 | gsgsuagcAfaAfCfAfcuaaggugaaL96 | 2396 | sense | 21 |
| UUCACCUUAGUGUUUGCUACCUC | 1301 | usUfscacCfuUfAfguguUfuGfcuaccsusc | 2397 | antisense | 23 |
| UUGGAGGUAGCAAACACUAAG | 1302 | ususggagGfuAfGfCfaaacacuaagL96 | 2398 | sense | 21 |
| CUUAGUGUUUGCUACCUCCAAUU | 1303 | csUfsuagUfgUfUfugcuAfcCfuccaasusu | 2399 | antisense | 23 |
| AUUGGAGGUAGCAAACACUAA | 1304 | asusuggaGfgUfAfGfcaaacacuaaL96 | 2400 | sense | 21 |
| UUAGUGUUUGCUACCUCCAAUUU | 1305 | usUfsaguGfuUfUfgcuaCfcUfccaaususu | 2401 | antisense | 23 |
| UAAAGUGCUGUAUCCUUUAGU | 1306 | usasaaguGfcUfGfUfauccuuuaguL96 | 2402 | sense | 21 |
| ACUAAAGGAUACAGCACUUUAGC | 1307 | asCfsuaaAfgGfAfuacaGfcAfcuuuasgsc | 2403 | antisense | 23 |
| AAAGUGCUGUAUCCUUUAGUA | 1308 | asasagugCfuGfUfAfuccuuuaguaL96 | 2404 | sense | 21 |
| UACUAAAGGAUACAGCACUUUAG | 1309 | usAfscuaAfaGfGfauacAfgCfacuuusasg | 2405 | antisense | 23 |
| AGGCUAAAGUGCUGUAUCCUU | 1310 | asgsgcuaAfaGfUfGfcuguauccuuL96 | 2406 | sense | 21 |
| AAGGAUACAGCACUUUAGCCUGC | 1311 | asAfsggaUfaCfAfgcacUfuUfagccusgsc | 2407 | antisense | 23 |
| CAGGCUAAAGUGCUGUAUCCU | 1312 | csasggcuAfaAfGfUfgcuguauccuL96 | 2408 | sense | 21 |
| AGGAUACAGCACUUUAGCCUGCC | 1313 | asGfsgauAfcAfGfcacuUfuAfgccugscsc | 2409 | antisense | 23 |
| AAGACAUUGGUGAGGAAAAAU | 1314 | asasgacaUfuGfGfUfgaggaaaaauL96 | 2410 | sense | 21 |
| AUUUUUCCUCACCAAUGUCUUGU | 1315 | asUfsuuuUfcCfUfcaccAfaUfgucuusgsu | 2411 | antisense | 23 |
| AGACAUUGGUGAGGAAAAAUC | 1316 | asgsacauUfgGfUfGfaggaaaaaucL96 | 2412 | sense | 21 |
| GAUUUUUCCUCACCAAUGUCUUG | 1317 | gsAfsuuuUfuCfCfucacCfaAfugucususg | 2413 | antisense | 23 |
| CGACAAGACAUUGGUGAGGAA | 1318 | csgsacaaGfaCfAfUfuggugaggaaL96 | 2414 | sense | 21 |
| UUCCUCACCAAUGUCUUGUCGAU | 1319 | usUfsccuCfaCfCfaaugUfcUfugucgsasu | 2415 | antisense | 23 |
| UCGACAAGACAUUGGUGAGGA | 1320 | uscsgacaAfgAfCfAfuuggugaggaL96 | 2416 | sense | 21 |
| UCCUCACCAAUGUCUUGUCGAUG | 1321 | usCfscucAfcCfAfauguCfuUfgucgasusg | 2417 | antisense | 23 |
| AAGAUGUCCUCGAGAUACUAA | 1322 | asasgaugUfcCfUfCfgagauacuaaL96 | 2418 | sense | 21 |
| UUAGUAUCUCGAGGACAUCUUGA | 1323 | usUfsaguAfuCfUfcgagGfaCfaucuusgsa | 2419 | antisense | 23 |
| AGAUGUCCUCGAGAUACUAAA | 1324 | asgsauguCfcUfCfGfagauacuaaaL96 | 2420 | sense | 21 |
| UUUAGUAUCUCGAGGACAUCUUG | 1325 | usUfsuagUfaUfCfucgaGfgAfcaucususg | 2421 | antisense | 23 |
| GUUCAAGAUGUCCUCGAGAUA | 1326 | gsusucaaGfaUfGfUfccucgagauaL96 | 2422 | sense | 21 |
| UAUCUCGAGGACAUCUUGAACAC | 1327 | usAfsucuCfgAfGfgacaUfcUfugaacsasc | 2423 | antisense | 23 |
| UGUUCAAGAUGUCCUCGAGAU | 1328 | usgsuucaAfgAfUfGfuccucgagauL96 | 2424 | sense | 21 |
| AUCUCGAGGACAUCUUGAACACC | 1329 | asUfscucGfaGfGfacauCfuUfgaacascsc | 2425 | antisense | 23 |
| GAGAAAGGUGUUCAAGAUGUC | 1330 | gsasgaaaGfgUfGfUfucaagaugucL96 | 2426 | sense | 21 |
| GACAUCUUGAACACCUUUCUCCC | 1331 | gsAfscauCfuUfGfaacaCfcUfuucucscsc | 2427 | antisense | 23 |
| AGAAAGGUGUUCAAGAUGUCC | 1332 | asgsaaagGfuGfUfUfcaagauguccL96 | 2428 | sense | 21 |
| GGACAUCUUGAACACCUUUCUCC | 1333 | gsGfsacaUfcUfUfgaacAfcCfuuucuscsc | 2429 | antisense | 23 |
| GGGGGAGAAAGGUGUUCAAGA | 1334 | gsgsgggaGfaAfAfGfguguucaagaL96 | 2430 | sense | 21 |
| UCUUGAACACCUUUCUCCCCCUG | 1335 | usCfsuugAfaCfAfccuuUfcUfcccccsusg | 2431 | antisense | 23 |
| AGGGGGAGAAAGGUGUUCAAG | 1336 | asgsggggAfgAfAfAfgguguucaagL96 | 2432 | sense | 21 |
| CUUGAACACCUUUCUCCCCCUGG | 1337 | csUfsugaAfcAfCfcuuuCfuCfccccusgsg | 2433 | antisense | 23 |
| GCUGGGAAGAUAUCAAAUGGC | 1338 | gscsugggAfaGfAfUfaucaaauggcL96 | 2434 | sense | 21 |
| GCCAUUUGAUAUCUUCCCAGCUG | 1339 | gsCfscauUfuGfAfuaucUfuCfccagcsusg | 2435 | antisense | 23 |
| CUGGGAAGAUAUCAAAUGGCU | 1340 | csusgggaAfgAfUfAfucaaauggcuL96 | 2436 | sense | 21 |
| AGCCAUUUGAUAUCUUCCCAGCU | 1341 | asGfsccaUfuUfGfauauCfuUfcccagscsu | 2437 | antisense | 23 |
| AUCAGCUGGGAAGAUAUCAAA | 1342 | asuscagcUfgGfGfAfagauaucaaaL96 | 2438 | sense | 21 |
| UUUGAUAUCUUCCCAGCUGAUAG | 1343 | usUfsugaUfaUfCfuuccCfaGfcugausasg | 2439 | antisense | 23 |
| UAUCAGCUGGGAAGAUAUCAA | 1344 | usasucagCfuGfGfGfaagauaucaaL96 | 2440 | sense | 21 |
| UUGAUAUCUUCCCAGCUGAUAGA | 1345 | usUfsgauAfuCfUfucccAfgCfugauasgsa | 2441 | antisense | 23 |
| UCUGUCGACUUCUGUUUUAGG | 1346 | uscsugucGfaCfUfUfcuguuuuaggL96 | 2442 | sense | 21 |
| CCUAAAACAGAAGUCGACAGAUC | 1347 | csCfsuaaAfaCfAfgaagUfcGfacagasusc | 2443 | antisense | 23 |
| CUGUCGACUUCUGUUUUAGGA | 1348 | csusgucgAfcUfUfCfuguuuuaggaL96 | 2444 | sense | 21 |
| UCCUAAAACAGAAGUCGACAGAU | 1349 | usCfscuaAfaAfCfagaaGfuCfgacagsasu | 2445 | antisense | 23 |
| CAGAUCUGUCGACUUCUGUUU | 1350 | csasgaucUfgUfCfGfacuucuguuuL96 | 2446 | sense | 21 |
| AAACAGAAGUCGACAGAUCUGUU | 1351 | asAfsacaGfaAfGfucgaCfaGfaucugsusu | 2447 | antisense | 23 |
| ACAGAUCUGUCGACUUCUGUU | 1352 | ascsagauCfuGfUfCfgacuucuguuL96 | 2448 | sense | 21 |
| AACAGAAGUCGACAGAUCUGUUU | 1353 | asAfscagAfaGfUfcgacAfgAfucugususu | 2449 | antisense | 23 |
| UACUUCUUUGAAUGUAGAUUU | 1354 | usascuucUfuUfGfAfauguagauuuL96 | 2450 | sense | 21 |
| AAAUCUACAUUCAAAGAAGUAUC | 1355 | asAfsaucUfaCfAfuucaAfaGfaaguasusc | 2451 | antisense | 23 |
| ACUUCUUUGAAUGUAGAUUUC | 1356 | ascsuucuUfuGfAfAfuguagauuucL96 | 2452 | sense | 21 |
| GAAAUCUACAUUCAAAGAAGUAU | 1357 | gsAfsaauCfuAfCfauucAfaAfgaagusasu | 2453 | antisense | 23 |
| GUGAUACUUCUUUGAAUGUAG | 1358 | gsusgauaCfuUfCfUfuugaauguagL96 | 2454 | sense | 21 |
| CUACAUUCAAAGAAGUAUCACCA | 1359 | csUfsacaUfuCfAfaagaAfgUfaucacscsa | 2455 | antisense | 23 |
| GGUGAUACUUCUUUGAAUGUA | 1360 | gsgsugauAfcUfUfCfuuugaauguaL96 | 2456 | sense | 21 |
| UACAUUCAAAGAAGUAUCACCAA | 1361 | usAfscauUfcAfAfagaaGfuAfucaccsasa | 2457 | antisense | 23 |
| UGGGAAGAUAUCAAAUGGCUG | 1362 | usgsggaaGfaUfAfUfcaaauggcugL96 | 2458 | sense | 21 |
| CAGCCAUUUGAUAUCUUCCCAGC | 1363 | csAfsgccAfuUfUfgauaUfcUfucccasgsc | 2459 | antisense | 23 |
| GGGAAGAUAUCAAAUGGCUGA | 1364 | gsgsgaagAfuAfUfCfaaauggcugaL96 | 2460 | sense | 21 |
| UCAGCCAUUUGAUAUCUUCCCAG | 1365 | usCfsagcCfaUfUfugauAfuCfuucccsasg | 2461 | antisense | 23 |
| CAGCUGGGAAGAUAUCAAAUG | 1366 | csasgcugGfgAfAfGfauaucaaaugL96 | 2462 | sense | 21 |
| CAUUUGAUAUCUUCCCAGCUGAU | 1367 | csAfsuuuGfaUfAfucuuCfcCfagcugsasu | 2463 | antisense | 23 |
| UCAGCUGGGAAGAUAUCAAAU | 1368 | uscsagcuGfgGfAfAfgauaucaaauL96 | 2464 | sense | 21 |
| AUUUGAUAUCUUCCCAGCUGAUA | 1369 | asUfsuugAfuAfUfcuucCfcAfgcugasusa | 2465 | antisense | 23 |
| UCCAAAGUCUAUAUAUGACUA | 1370 | uscscaaaGfuCfUfAfuauaugacuaL96 | 2466 | sense | 21 |
| UAGUCAUAUAUAGACUUUGGAAG | 1371 | usAfsgucAfuAfUfauagAfcUfuuggasasg | 2467 | antisense | 23 |
| CCAAAGUCUAUAUAUGACUAU | 1372 | cscsaaagUfcUfAfUfauaugacuauL96 | 2468 | sense | 21 |
| AUAGUCAUAUAUAGACUUUGGAA | 1373 | asUfsaguCfaUfAfuauaGfaCfuuuggsasa | 2469 | antisense | 23 |
| UACUUCCAAAGUCUAUAUAUG | 1374 | usascuucCfaAfAfGfucuauauaugL96 | 2470 | sense | 21 |
| CAUAUAUAGACUUUGGAAGUACU | 1375 | csAfsuauAfuAfGfacuuUfgGfaaguascsu | 2471 | antisense | 23 |
| GUACUUCCAAAGUCUAUAUAU | 1376 | gsusacuuCfcAfAfAfgucuauauauL96 | 2472 | sense | 21 |
| AUAUAUAGACUUUGGAAGUACUG | 1377 | asUfsauaUfaGfAfcuuuGfgAfaguacsusg | 2473 | antisense | 23 |
| UUAUGAACAACAUGCUAAAUC | 1378 | ususaugaAfcAfAfCfaugcuaaaucL96 | 2474 | sense | 21 |
| GAUUUAGCAUGUUGUUCAUAAUC | 1379 | gsAfsuuuAfgCfAfuguuGfuUfcauaasusc | 2475 | antisense | 23 |
| UAUGAACAACAUGCUAAAUCA | 1380 | usasugaaCfaAfCfAfugcuaaaucaL96 | 2476 | sense | 21 |
| UGAUUUAGCAUGUUGUUCAUAAU | 1381 | usGfsauuUfaGfCfauguUfgUfucauasasu | 2477 | antisense | 23 |
| AUGAUUAUGAACAACAUGCUA | 1382 | asusgauuAfuGfAfAfcaacaugcuaL96 | 2478 | sense | 21 |
| UAGCAUGUUGUUCAUAAUCAUUG | 1383 | usAfsgcaUfgUfUfguucAfuAfaucaususg | 2479 | antisense | 23 |
| AAUGAUUAUGAACAACAUGCU | 1384 | asasugauUfaUfGfAfacaacaugcuL96 | 2480 | sense | 21 |
| AGCAUGUUGUUCAUAAUCAUUGA | 1385 | asGfscauGfuUfGfuucaUfaAfucauusgsa | 2481 | antisense | 23 |
| AAUUCCCCACUUCAAUACAAA | 1386 | asasuuccCfcAfCfUfucaauacaaaL96 | 2482 | sense | 21 |
| UUUGUAUUGAAGUGGGGAAUUAC | 1387 | usUfsuguAfuUfGfaaguGfgGfgaauusasc | 2483 | antisense | 23 |
| AUUCCCCACUUCAAUACAAAG | 1388 | asusucccCfaCfUfUfcaauacaaagL96 | 2484 | sense | 21 |
| CUUUGUAUUGAAGUGGGGAAUUA | 1389 | csUfsuugUfaUfUfgaagUfgGfggaaususa | 2485 | antisense | 23 |
| CUGUAAUUCCCCACUUCAAUA | 1390 | csusguaaUfuCfCfCfcacuucaauaL96 | 2486 | sense | 21 |
| UAUUGAAGUGGGGAAUUACAGAC | 1391 | usAfsuugAfaGfUfggggAfaUfuacagsasc | 2487 | antisense | 23 |
| UCUGUAAUUCCCCACUUCAAU | 1392 | uscsuguaAfuUfCfCfccacuucaauL96 | 2488 | sense | 21 |
| AUUGAAGUGGGGAAUUACAGACU | 1393 | asUfsugaAfgUfGfgggaAfuUfacagascsu | 2489 | antisense | 23 |
| UGAUGUGCGUAACAGAUUCAA | 1394 | usgsauguGfcGfUfAfacagauucaaL96 | 2490 | sense | 21 |
| UUGAAUCUGUUACGCACAUCAUC | 1395 | usUfsgaaUfcUfGfuuacGfcAfcaucasusc | 2491 | antisense | 23 |
| GAUGUGCGUAACAGAUUCAAA | 1396 | gsasugugCfgUfAfAfcagauucaaaL96 | 2492 | sense | 21 |
| UUUGAAUCUGUUACGCACAUCAU | 1397 | usUfsugaAfuCfUfguuaCfgCfacaucsasu | 2493 | antisense | 23 |
| UGGAUGAUGUGCGUAACAGAU | 1398 | usgsgaugAfuGfUfGfcguaacagauL96 | 2494 | sense | 21 |
| AUCUGUUACGCACAUCAUCCAGA | 1399 | asUfscugUfuAfCfgcacAfuCfauccasgsa | 2495 | antisense | 23 |
| CUGGAUGAUGUGCGUAACAGA | 1400 | csusggauGfaUfGfUfgcguaacagaL96 | 2496 | sense | 21 |
| UCUGUUACGCACAUCAUCCAGAC | 1401 | usCfsuguUfaCfGfcacaUfcAfuccagsasc | 2497 | antisense | 23 |
| GAAUGGGUGGCGGUAAUUGGU | 1402 | gsasauggGfuGfGfCfgguaauugguL96 | 2498 | sense | 21 |
| ACCAAUUACCGCCACCCAUUCCA | 1403 | asCfscaaUfuAfCfcgccAfcCfcauucscsa | 2499 | antisense | 23 |
| AAUGGGUGGCGGUAAUUGGUG | 1404 | asasugggUfgGfCfGfguaauuggugL96 | 2500 | sense | 21 |
| CACCAAUUACCGCCACCCAUUCC | 1405 | csAfsccaAfuUfAfccgcCfaCfccauuscsc | 2501 | antisense | 23 |
| AUUGGAAUGGGUGGCGGUAAU | 1406 | asusuggaAfuGfGfGfuggcgguaauL96 | 2502 | sense | 21 |
| AUUACCGCCACCCAUUCCAAUUC | 1407 | asUfsuacCfgCfCfacccAfuUfccaaususc | 2503 | antisense | 23 |
| AAUUGGAAUGGGUGGCGGUAA | 1408 | asasuuggAfaUfGfGfguggcgguaaL96 | 2504 | sense | 21 |
| UUACCGCCACCCAUUCCAAUUCU | 1409 | usUfsaccGfcCfAfcccaUfuCfcaauuscsu | 2505 | antisense | 23 |
| UCCGGAAUGUUGCUGAAACAG | 1410 | uscscggaAfuGfUfUfgcugaaacagL96 | 2506 | sense | 21 |
| CUGUUUCAGCAACAUUCCGGAGC | 1411 | csUfsguuUfcAfGfcaacAfuUfccggasgsc | 2507 | antisense | 23 |
| CCGGAAUGUUGCUGAAACAGA | 1412 | cscsggaaUfgUfUfGfcugaaacagaL96 | 2508 | sense | 21 |
| UCUGUUUCAGCAACAUUCCGGAG | 1413 | usCfsuguUfuCfAfgcaaCfaUfuccggsasg | 2509 | antisense | 23 |
| AUGCUCCGGAAUGUUGCUGAA | 1414 | asusgcucCfgGfAfAfuguugcugaaL96 | 2510 | sense | 21 |
| UUCAGCAACAUUCCGGAGCAUCC | 1415 | usUfscagCfaAfCfauucCfgGfagcauscsc | 2511 | antisense | 23 |
| GAUGCUCCGGAAUGUUGCUGA | 1416 | gsasugcuCfcGfGfAfauguugcugaL96 | 2512 | sense | 21 |
| UCAGCAACAUUCCGGAGCAUCCU | 1417 | usCfsagcAfaCfAfuuccGfgAfgcaucscsu | 2513 | antisense | 23 |
| UGUCCUCGAGAUACUAAAGGA | 1418 | usgsuccuCfgAfGfAfuacuaaaggaL96 | 2514 | sense | 21 |
| UCCUUUAGUAUCUCGAGGACAUC | 1419 | usCfscuuUfaGfUfaucuCfgAfggacasusc | 2515 | antisense | 23 |
| GUCCUCGAGAUACUAAAGGAA | 1420 | gsusccucGfaGfAfUfacuaaaggaaL96 | 2516 | sense | 21 |
| UUCCUUUAGUAUCUCGAGGACAU | 1421 | usUfsccuUfuAfGfuaucUfcGfaggacsasu | 2517 | antisense | 23 |
| AAGAUGUCCUCGAGAUACUAA | 1422 | asasgaugUfcCfUfCfgagauacuaaL96 | 2518 | sense | 21 |
| UUAGUAUCUCGAGGACAUCUUGA | 1423 | usUfsaguAfuCfUfcgagGfaCfaucuusgsa | 2519 | antisense | 23 |
| CAAGAUGUCCUCGAGAUACUA | 1424 | csasagauGfuCfCfUfcgagauacuaL96 | 2520 | sense | 21 |
| UAGUAUCUCGAGGACAUCUUGAA | 1425 | usAfsguaUfcUfCfgaggAfcAfucuugsasa | 2521 | antisense | 23 |
| ACAACAUGCUAAAUCAGUACU | 1426 | ascsaacaUfgCfUfAfaaucaguacuL96 | 2522 | sense | 21 |
| AGUACUGAUUUAGCAUGUUGUUC | 1427 | asGfsuacUfgAfUfuuagCfaUfguugususc | 2523 | antisense | 23 |
| CAACAUGCUAAAUCAGUACUU | 1428 | csasacauGfcUfAfAfaucaguacuuL96 | 2524 | sense | 21 |
| AAGUACUGAUUUAGCAUGUUGUU | 1429 | asAfsguaCfuGfAfuuuaGfcAfuguugsusu | 2525 | antisense | 23 |
| AUGAACAACAUGCUAAAUCAG | 1430 | asusgaacAfaCfAfUfgcuaaaucagL96 | 2526 | sense | 21 |
| CUGAUUUAGCAUGUUGUUCAUAA | 1431 | csUfsgauUfuAfGfcaugUfuGfuucausasa | 2527 | antisense | 23 |
| UAUGAACAACAUGCUAAAUCA | 1432 | usasugaaCfaAfCfAfugcuaaaucaL96 | 2528 | sense | 21 |
| UGAUUUAGCAUGUUGUUCAUAAU | 1433 | usGfsauuUfaGfCfauguUfgUfucauasasu | 2529 | antisense | 23 |
| GCCAAGGCUGUGUUUGUGGGG | 1434 | gscscaagGfcUfGfUfguuuguggggL96 | 2530 | sense | 21 |
| CCCCACAAACACAGCCUUGGCGC | 1435 | csCfsccaCfaAfAfcacaGfcCfuuggcsgsc | 2531 | antisense | 23 |
| CCAAGGCUGUGUUUGUGGGGA | 1436 | cscsaaggCfuGfUfGfuuuguggggaL96 | 2532 | sense | 21 |
| UCCCCACAAACACAGCCUUGGCG | 1437 | usCfscccAfcAfAfacacAfgCfcuuggscsg | 2533 | antisense | 23 |
| UGGCGCCAAGGCUGUGUUUGU | 1438 | usgsgcgcCfaAfGfGfcuguguuuguL96 | 2534 | sense | 21 |
| ACAAACACAGCCUUGGCGCCAAG | 1439 | asCfsaaaCfaCfAfgccuUfgGfcgccasasg | 2535 | antisense | 23 |
| UUGGCGCCAAGGCUGUGUUUG | 1440 | ususggcgCfcAfAfGfgcuguguuugL96 | 2536 | sense | 21 |
| CAAACACAGCCUUGGCGCCAAGA | 1441 | csAfsaacAfcAfGfccuuGfgCfgccaasgsa | 2537 | antisense | 23 |
| UGAAAGCUCUGGCUCUUGGCG | 1442 | usgsaaagCfuCfUfGfgcucuuggcgL96 | 2538 | sense | 21 |
| CGCCAAGAGCCAGAGCUUUCAGA | 1443 | csGfsccaAfgAfGfccagAfgCfuuucasgsa | 2539 | antisense | 23 |
| GAAAGCUCUGGCUCUUGGCGC | 1444 | gsasaagcUfcUfGfGfcucuuggcgcL96 | 2540 | sense | 21 |
| GCGCCAAGAGCCAGAGCUUUCAG | 1445 | gsCfsgccAfaGfAfgccaGfaGfcuuucsasg | 2541 | antisense | 23 |
| GUUCUGAAAGCUCUGGCUCUU | 1446 | gsusucugAfaAfGfCfucuggcucuuL96 | 2542 | sense | 21 |
| AAGAGCCAGAGCUUUCAGAACAU | 1447 | asAfsgagCfcAfGfagcuUfuCfagaacsasu | 2543 | antisense | 23 |
| UGUUCUGAAAGCUCUGGCUCU | 1448 | usgsuucuGfaAfAfGfcucuggcucuL96 | 2544 | sense | 21 |
| AGAGCCAGAGCUUUCAGAACAUC | 1449 | asGfsagcCfaGfAfgcuuUfcAfgaacasusc | 2545 | antisense | 23 |
| CAGCCACUAUUGAUGUUCUGC | 1450 | csasgccaCfuAfUfUfgauguucugcL96 | 2546 | sense | 21 |
| GCAGAACAUCAAUAGUGGCUGGC | 1451 | gsCfsagaAfcAfUfcaauAfgUfggcugsgsc | 2547 | antisense | 23 |
| AGCCACUAUUGAUGUUCUGCC | 1452 | asgsccacUfaUfUfGfauguucugccL96 | 2548 | sense | 21 |
| GGCAGAACAUCAAUAGUGGCUGG | 1453 | gsGfscagAfaCfAfucaaUfaGfuggcusgsg | 2549 | antisense | 23 |
| GUGCCAGCCACUAUUGAUGUU | 1454 | gsusgccaGfcCfAfCfuauugauguuL96 | 2550 | sense | 21 |
| AACAUCAAUAGUGGCUGGCACCC | 1455 | asAfscauCfaAfUfagugGfcUfggcacscsc | 2551 | antisense | 23 |
| GGUGCCAGCCACUAUUGAUGU | 1456 | gsgsugccAfgCfCfAfcuauugauguL96 | 2552 | sense | 21 |
| ACAUCAAUAGUGGCUGGCACCCC | 1457 | asCfsaucAfaUfAfguggCfuGfgcaccscsc | 2553 | antisense | 23 |
| ACAAGGACCGAGAAGUCACCA | 1458 | ascsaaggAfcCfGfAfgaagucaccaL96 | 2554 | sense | 21 |
| UGGUGACUUCUCGGUCCUUGUAG | 1459 | usGfsgugAfcUfUfcucgGfuCfcuugusasg | 2555 | antisense | 23 |
| CAAGGACCGAGAAGUCACCAA | 1460 | csasaggaCfcGfAfGfaagucaccaaL96 | 2556 | sense | 21 |
| UUGGUGACUUCUCGGUCCUUGUA | 1461 | usUfsgguGfaCfUfucucGfgUfccuugsusa | 2557 | antisense | 23 |
| AUCUACAAGGACCGAGAAGUC | 1462 | asuscuacAfaGfGfAfccgagaagucL96 | 2558 | sense | 21 |
| GACUUCUCGGUCCUUGUAGAUAU | 1463 | gsAfscuuCfuCfGfguccUfuGfuagausasu | 2559 | antisense | 23 |
| UAUCUACAAGGACCGAGAAGU | 1464 | usasucuaCfaAfGfGfaccgagaaguL96 | 2560 | sense | 21 |
| ACUUCUCGGUCCUUGUAGAUAUA | 1465 | asCfsuucUfcGfGfuccuUfgUfagauasusa | 2561 | antisense | 23 |
| CAGAAUGUGAAAGUCAUCGAC | 1466 | csasgaauGfuGfAfAfagucaucgacL96 | 2562 | sense | 21 |
| GUCGAUGACUUUCACAUUCUGGC | 1467 | gsUfscgaUfgAfCfuuucAfcAfuucugsgsc | 2563 | antisense | 23 |
| AGAAUGUGAAAGUCAUCGACA | 1468 | asgsaaugUfgAfAfAfgucaucgacaL96 | 2564 | sense | 21 |
| UGUCGAUGACUUUCACAUUCUGG | 1469 | usGfsucgAfuGfAfcuuuCfaCfauucusgsg | 2565 | antisense | 23 |
| GUGCCAGAAUGUGAAAGUCAU | 1470 | gsusgccaGfaAfUfGfugaaagucauL96 | 2566 | sense | 21 |
| AUGACUUUCACAUUCUGGCACCC | 1471 | asUfsgacUfuUfCfacauUfcUfggcacscsc | 2567 | antisense | 23 |
| GGUGCCAGAAUGUGAAAGUCA | 1472 | gsgsugccAfgAfAfUfgugaaagucaL96 | 2568 | sense | 21 |
| UGACUUUCACAUUCUGGCACCCA | 1473 | usGfsacuUfuCfAfcauuCfuGfgcaccscsa | 2569 | antisense | 23 |
| AGAUGUCCUCGAGAUACUAAA | 1474 | asgsauguCfcUfCfGfagauacuaaaL96 | 2570 | sense | 21 |
| UUUAGUAUCUCGAGGACAUCUUG | 1475 | usUfsuagUfaUfCfucgaGfgAfcaucususg | 2571 | antisense | 23 |
| GAUGUCCUCGAGAUACUAAAG | 1476 | gsasugucCfuCfGfAfgauacuaaagL96 | 2572 | sense | 21 |
| CUUUAGUAUCUCGAGGACAUCUU | 1477 | csUfsuuaGfuAfUfcucgAfgGfacaucsusu | 2573 | antisense | 23 |
| UUCAAGAUGUCCUCGAGAUAC | 1478 | ususcaagAfuGfUfCfcucgagauacL96 | 2574 | sense | 21 |
| GUAUCUCGAGGACAUCUUGAACA | 1479 | gsUfsaucUfcGfAfggacAfuCfuugaascsa | 2575 | antisense | 23 |
| GUUCAAGAUGUCCUCGAGAUA | 1480 | gsusucaaGfaUfGfUfccucgagauaL96 | 2576 | sense | 21 |
| UAUCUCGAGGACAUCUUGAACAC | 1481 | usAfsucuCfgAfGfgacaUfcUfugaacsasc | 2577 | antisense | 23 |
| GUGGACUUGCUGCAUAUGUGG | 1482 | gsusggacUfuGfCfUfgcauauguggL96 | 2578 | sense | 21 |
| CCACAUAUGCAGCAAGUCCACUG | 1483 | csCfsacaUfaUfGfcagcAfaGfuccacsusg | 2579 | antisense | 23 |
| UGGACUUGCUGCAUAUGUGGC | 1484 | usgsgacuUfgCfUfGfcauauguggcL96 | 2580 | sense | 21 |
| GCCACAUAUGCAGCAAGUCCACU | 1485 | gsCfscacAfuAfUfgcagCfaAfguccascsu | 2581 | antisense | 23 |
| GACAGUGGACUUGCUGCAUAU | 1486 | gsascaguGfgAfCfUfugcugcauauL96 | 2582 | sense | 21 |
| AUAUGCAGCAAGUCCACUGUCGU | 1487 | asUfsaugCfaGfCfaaguCfcAfcugucsgsu | 2583 | antisense | 23 |
| CGACAGUGGACUUGCUGCAUA | 1488 | csgsacagUfgGfAfCfuugcugcauaL96 | 2584 | sense | 21 |
| UAUGCAGCAAGUCCACUGUCGUC | 1489 | usAfsugcAfgCfAfagucCfaCfugucgsusc | 2585 | antisense | 23 |
| AACCAGUACUUUAUCAUUUUC | 1490 | asasccagUfaCfUfUfuaucauuuucL96 | 2586 | sense | 21 |
| GAAAAUGAUAAAGUACUGGUUUC | 1491 | gsAfsaaaUfgAfUfaaagUfaCfugguususc | 2587 | antisense | 23 |
| ACCAGUACUUUAUCAUUUUCU | 1492 | ascscaguAfcUfUfUfaucauuuucuL96 | 2588 | sense | 21 |
| AGAAAAUGAUAAAGUACUGGUUU | 1493 | asGfsaaaAfuGfAfuaaaGfuAfcuggususu | 2589 | antisense | 23 |
| UUGAAACCAGUACUUUAUCAU | 1494 | ususgaaaCfcAfGfUfacuuuaucauL96 | 2590 | sense | 21 |
| AUGAUAAAGUACUGGUUUCAAAA | 1495 | asUfsgauAfaAfGfuacuGfgUfuucaasasa | 2591 | antisense | 23 |
| UUUGAAACCAGUACUUUAUCA | 1496 | ususugaaAfcCfAfGfuacuuuaucaL96 | 2592 | sense | 21 |
| UGAUAAAGUACUGGUUUCAAAAU | 1497 | usGfsauaAfaGfUfacugGfuUfucaaasasu | 2593 | antisense | 23 |
| CGAGAAGUCACCAAGAAGCUA | 1498 | csgsagaaGfuCfAfCfcaagaagcuaL96 | 2594 | sense | 21 |
| UAGCUUCUUGGUGACUUCUCGGU | 1499 | usAfsgcuUfcUfUfggugAfcUfucucgsgsu | 2595 | antisense | 23 |
| GAGAAGUCACCAAGAAGCUAG | 1500 | gsasgaagUfcAfCfCfaagaagcuagL96 | 2596 | sense | 21 |
| CUAGCUUCUUGGUGACUUCUCGG | 1501 | csUfsagcUfuCfUfugguGfaCfuucucsgsg | 2597 | antisense | 23 |
| GGACCGAGAAGUCACCAAGAA | 1502 | gsgsaccgAfgAfAfGfucaccaagaaL96 | 2598 | sense | 21 |
| UUCUUGGUGACUUCUCGGUCCUU | 1503 | usUfscuuGfgUfGfacuuCfuCfgguccsusu | 2599 | antisense | 23 |
| AGGACCGAGAAGUCACCAAGA | 1504 | asgsgaccGfaGfAfAfgucaccaagaL96 | 2600 | sense | 21 |
| UCUUGGUGACUUCUCGGUCCUUG | 1505 | usCfsuugGfuGfAfcuucUfcGfguccususg | 2601 | antisense | 23 |
| UCAAAGUGUUGGUAAUGCCUG | 1506 | uscsaaagUfgUfUfGfguaaugccugL96 | 2602 | sense | 21 |
| CAGGCAUUACCAACACUUUGAAC | 1507 | csAfsggcAfuUfAfccaaCfaCfuuugasasc | 2603 | antisense | 23 |
| CAAAGUGUUGGUAAUGCCUGA | 1508 | csasaaguGfuUfGfGfuaaugccugaL96 | 2604 | sense | 21 |
| UCAGGCAUUACCAACACUUUGAA | 1509 | usCfsaggCfaUfUfaccaAfcAfcuuugsasa | 2605 | antisense | 23 |
| AGGUUCAAAGUGUUGGUAAUG | 1510 | asgsguucAfaAfGfUfguugguaaugL96 | 2606 | sense | 21 |
| CAUUACCAACACUUUGAACCUGA | 1511 | csAfsuuaCfcAfAfcacuUfuGfaaccusgsa | 2607 | antisense | 23 |
| CAGGUUCAAAGUGUUGGUAAU | 1512 | csasgguuCfaAfAfGfuguugguaauL96 | 2608 | sense | 21 |
| AUUACCAACACUUUGAACCUGAG | 1513 | asUfsuacCfaAfCfacuuUfgAfaccugsasg | 2609 | antisense | 23 |
| UAUUACUUGACAAAGAGACAC | 1514 | usasuuacUfuGfAfCfaaagagacacL96 | 2610 | sense | 21 |
| GUGUCUCUUUGUCAAGUAAUACA | 1515 | gsUfsgucUfcUfUfugucAfaGfuaauascsa | 2611 | antisense | 23 |
| AUUACUUGACAAAGAGACACU | 1516 | asusuacuUfgAfCfAfaagagacacuL96 | 2612 | sense | 21 |
| AGUGUCUCUUUGUCAAGUAAUAC | 1517 | asGfsuguCfuCfUfuuguCfaAfguaausasc | 2613 | antisense | 23 |
| CAUGUAUUACUUGACAAAGAG | 1518 | csasuguaUfuAfCfUfugacaaagagL96 | 2614 | sense | 21 |
| CUCUUUGUCAAGUAAUACAUGCU | 1519 | csUfscuuUfgUfCfaaguAfaUfacaugscsu | 2615 | antisense | 23 |
| GCAUGUAUUACUUGACAAAGA | 1520 | gscsauguAfuUfAfCfuugacaaagaL96 | 2616 | sense | 21 |
| UCUUUGUCAAGUAAUACAUGCUG | 1521 | usCfsuuuGfuCfAfaguaAfuAfcaugcsusg | 2617 | antisense | 23 |
| AAAGUCAUCGACAAGACAUUG | 1522 | asasagucAfuCfGfAfcaagacauugL96 | 2618 | sense | 21 |
| CAAUGUCUUGUCGAUGACUUUCA | 1523 | csAfsaugUfcUfUfgucgAfuGfacuuuscsa | 2619 | antisense | 23 |
| AAGUCAUCGACAAGACAUUGG | 1524 | asasgucaUfcGfAfCfaagacauuggL96 | 2620 | sense | 21 |
| CCAAUGUCUUGUCGAUGACUUUC | 1525 | csCfsaauGfuCfUfugucGfaUfgacuususc | 2621 | antisense | 23 |
| UGUGAAAGUCAUCGACAAGAC | 1526 | usgsugaaAfgUfCfAfucgacaagacL96 | 2622 | sense | 21 |
| GUCUUGUCGAUGACUUUCACAUU | 1527 | gsUfscuuGfuCfGfaugaCfuUfucacasusu | 2623 | antisense | 23 |
| AUGUGAAAGUCAUCGACAAGA | 1528 | asusgugaAfaGfUfCfaucgacaagaL96 | 2624 | sense | 21 |
| UCUUGUCGAUGACUUUCACAUUC | 1529 | usCfsuugUfcGfAfugacUfuUfcacaususc | 2625 | antisense | 23 |
| AUAUGUGGCUAAAGCAAUAGA | 1530 | asusauguGfgCfUfAfaagcaauagaL96 | 2626 | sense | 21 |
| UCUAUUGCUUUAGCCACAUAUGC | 1531 | usCfsuauUfgCfUfuuagCfcAfcauausgsc | 2627 | antisense | 23 |
| UAUGUGGCUAAAGCAAUAGAC | 1532 | usasugugGfcUfAfAfagcaauagacL96 | 2628 | sense | 21 |
| GUCUAUUGCUUUAGCCACAUAUG | 1533 | gsUfscuaUfuGfCfuuuaGfcCfacauasusg | 2629 | antisense | 23 |
| CUGCAUAUGUGGCUAAAGCAA | 1534 | csusgcauAfuGfUfGfgcuaaagcaaL96 | 2630 | sense | 21 |
| UUGCUUUAGCCACAUAUGCAGCA | 1535 | usUfsgcuUfuAfGfccacAfuAfugcagscsa | 2631 | antisense | 23 |
| GCUGCAUAUGUGGCUAAAGCA | 1536 | gscsugcaUfaUfGfUfggcuaaagcaL96 | 2632 | sense | 21 |
| UGCUUUAGCCACAUAUGCAGCAA | 1537 | usGfscuuUfaGfCfcacaUfaUfgcagcsasa | 2633 | antisense | 23 |
| AGACGACAGUGGACUUGCUGC | 1538 | asgsacgaCfaGfUfGfgacuugcugcL96 | 2634 | sense | 21 |
| GCAGCAAGUCCACUGUCGUCUCC | 1539 | gsCfsagcAfaGfUfccacUfgUfcgucuscsc | 2635 | antisense | 23 |
| GACGACAGUGGACUUGCUGCA | 1540 | gsascgacAfgUfGfGfacuugcugcaL96 | 2636 | sense | 21 |
| UGCAGCAAGUCCACUGUCGUCUC | 1541 | usGfscagCfaAfGfuccaCfuGfucgucsusc | 2637 | antisense | 23 |
| UUGGAGACGACAGUGGACUUG | 1542 | ususggagAfcGfAfCfaguggacuugL96 | 2638 | sense | 21 |
| CAAGUCCACUGUCGUCUCCAAAA | 1543 | csAfsaguCfcAfCfugucGfuCfuccaasasa | 2639 | antisense | 23 |
| UUUGGAGACGACAGUGGACUU | 1544 | ususuggaGfaCfGfAfcaguggacuuL96 | 2640 | sense | 21 |
| AAGUCCACUGUCGUCUCCAAAAU | 1545 | asAfsgucCfaCfUfgucgUfcUfccaaasasu | 2641 | antisense | 23 |
| GGCCACCUCCUCAAUUGAAGA | 1546 | gsgsccacCfuCfCfUfcaauugaagaL96 | 2642 | sense | 21 |
| UCUUCAAUUGAGGAGGUGGCCCA | 1547 | usCfsuucAfaUfUfgaggAfgGfuggccscsa | 2643 | antisense | 23 |
| GCCACCUCCUCAAUUGAAGAA | 1548 | gscscaccUfcCfUfCfaauugaagaaL96 | 2644 | sense | 21 |
| UUCUUCAAUUGAGGAGGUGGCCC | 1549 | usUfscuuCfaAfUfugagGfaGfguggcscsc | 2645 | antisense | 23 |
| CCUGGGCCACCUCCUCAAUUG | 1550 | cscsugggCfcAfCfCfuccucaauugL96 | 2646 | sense | 21 |
| CAAUUGAGGAGGUGGCCCAGGAA | 1551 | csAfsauuGfaGfGfagguGfgCfccaggsasa | 2647 | antisense | 23 |
| UCCUGGGCCACCUCCUCAAUU | 1552 | uscscuggGfcCfAfCfcuccucaauuL96 | 2648 | sense | 21 |
| AAUUGAGGAGGUGGCCCAGGAAC | 1553 | asAfsuugAfgGfAfggugGfcCfcaggasasc | 2649 | antisense | 23 |
| UGUAUGUUACUUCUUAGAGAG | 1554 | usgsuaugUfuAfCfUfucuuagagagL96 | 2650 | sense | 21 |
| CUCUCUAAGAAGUAACAUACAUC | 1555 | csUfscucUfaAfGfaaguAfaCfauacasusc | 2651 | antisense | 23 |
| GUAUGUUACUUCUUAGAGAGA | 1556 | gsusauguUfaCfUfUfcuuagagagaL96 | 2652 | sense | 21 |
| UCUCUCUAAGAAGUAACAUACAU | 1557 | usCfsucuCfuAfAfgaagUfaAfcauacsasu | 2653 | antisense | 23 |
| AGGAUGUAUGUUACUUCUUAG | 1558 | asgsgaugUfaUfGfUfuacuucuuagL96 | 2654 | sense | 21 |
| CUAAGAAGUAACAUACAUCCUAA | 1559 | csUfsaagAfaGfUfaacaUfaCfauccusasa | 2655 | antisense | 23 |
| UAGGAUGUAUGUUACUUCUUA | 1560 | usasggauGfuAfUfGfuuacuucuuaL96 | 2656 | sense | 21 |
| UAAGAAGUAACAUACAUCCUAAA | 1561 | usAfsagaAfgUfAfacauAfcAfuccuasasa | 2657 | antisense | 23 |
| AAAUGUUUUAGGAUGUAUGUU | 1562 | asasauguUfuUfAfGfgauguauguuL96 | 2658 | sense | 21 |
| AACAUACAUCCUAAAACAUUUGG | 1563 | asAfscauAfcAfUfccuaAfaAfcauuusgsg | 2659 | antisense | 23 |
| AAUGUUUUAGGAUGUAUGUUA | 1564 | asasuguuUfuAfGfGfauguauguuaL96 | 2660 | sense | 21 |
| UAACAUACAUCCUAAAACAUUUG | 1565 | usAfsacaUfaCfAfuccuAfaAfacauususg | 2661 | antisense | 23 |
| AUCCAAAUGUUUUAGGAUGUA | 1566 | asusccaaAfuGfUfUfuuaggauguaL96 | 2662 | sense | 21 |
| UACAUCCUAAAACAUUUGGAUAU | 1567 | usAfscauCfcUfAfaaacAfuUfuggausasu | 2663 | antisense | 23 |
| UAUCCAAAUGUUUUAGGAUGU | 1568 | usasuccaAfaUfGfUfuuuaggauguL96 | 2664 | sense | 21 |
| ACAUCCUAAAACAUUUGGAUAUA | 1569 | asCfsaucCfuAfAfaacaUfuUfggauasusa | 2665 | antisense | 23 |
| AUGGGUGGCGGUAAUUGGUGA | 1570 | asusggguGfgCfGfGfuaauuggugaL96 | 2666 | sense | 21 |
| UCACCAAUUACCGCCACCCAUUC | 1571 | usCfsaccAfaUfUfaccgCfcAfcccaususc | 2667 | antisense | 23 |
| UGGGUGGCGGUAAUUGGUGAU | 1572 | usgsggugGfcGfGfUfaauuggugauL96 | 2668 | sense | 21 |
| AUCACCAAUUACCGCCACCCAUU | 1573 | asUfscacCfaAfUfuaccGfcCfacccasusu | 2669 | antisense | 23 |
| UGGAAUGGGUGGCGGUAAUUG | 1574 | usgsgaauGfgGfUfGfgcgguaauugL96 | 2670 | sense | 21 |
| CAAUUACCGCCACCCAUUCCAAU | 1575 | csAfsauuAfcCfGfccacCfcAfuuccasasu | 2671 | antisense | 23 |
| UUGGAAUGGGUGGCGGUAAUU | 1576 | ususggaaUfgGfGfUfggcgguaauuL96 | 2672 | sense | 21 |
| AAUUACCGCCACCCAUUCCAAUU | 1577 | asAfsuuaCfcGfCfcaccCfaUfuccaasusu | 2673 | antisense | 23 |
| UUCAAAGUGUUGGUAAUGCCU | 1578 | ususcaaaGfuGfUfUfgguaaugccuL96 | 2674 | sense | 21 |
| AGGCAUUACCAACACUUUGAACC | 1579 | asGfsgcaUfuAfCfcaacAfcUfuugaascsc | 2675 | antisense | 23 |
| UCAAAGUGUUGGUAAUGCCUG | 1580 | uscsaaagUfgUfUfGfguaaugccugL96 | 2676 | sense | 21 |
| CAGGCAUUACCAACACUUUGAAC | 1581 | csAfsggcAfuUfAfccaaCfaCfuuugasasc | 2677 | antisense | 23 |
| CAGGUUCAAAGUGUUGGUAAU | 1582 | csasgguuCfaAfAfGfuguugguaauL96 | 2678 | sense | 21 |
| AUUACCAACACUUUGAACCUGAG | 1583 | asUfsuacCfaAfCfacuuUfgAfaccugsasg | 2679 | antisense | 23 |
| UCAGGUUCAAAGUGUUGGUAA | 1584 | uscsagguUfcAfAfAfguguugguaaL96 | 2680 | sense | 21 |
| UUACCAACACUUUGAACCUGAGC | 1585 | usUfsaccAfaCfAfcuuuGfaAfccugasgsc | 2681 | antisense | 23 |
| CCACCUCCUCAAUUGAAGAAG | 1586 | cscsaccuCfcUfCfAfauugaagaagL96 | 2682 | sense | 21 |
| CUUCUUCAAUUGAGGAGGUGGCC | 1587 | csUfsucuUfcAfAfuugaGfgAfgguggscsc | 2683 | antisense | 23 |
| CACCUCCUCAAUUGAAGAAGU | 1588 | csasccucCfuCfAfAfuugaagaaguL96 | 2684 | sense | 21 |
| ACUUCUUCAAUUGAGGAGGUGGC | 1589 | asCfsuucUfuCfAfauugAfgGfaggugsgsc | 2685 | antisense | 23 |
| UGGGCCACCUCCUCAAUUGAA | 1590 | usgsggccAfcCfUfCfcucaauugaaL96 | 2686 | sense | 21 |
| UUCAAUUGAGGAGGUGGCCCAGG | 1591 | usUfscaaUfuGfAfggagGfuGfgcccasgsg | 2687 | antisense | 23 |
| CUGGGCCACCUCCUCAAUUGA | 1592 | csusgggcCfaCfCfUfccucaauugaL96 | 2688 | sense | 21 |
| UCAAUUGAGGAGGUGGCCCAGGA | 1593 | usCfsaauUfgAfGfgaggUfgGfcccagsgsa | 2689 | antisense | 23 |
| GAGUGGGUGCCAGAAUGUGAA | 1594 | gsasguggGfuGfCfCfagaaugugaaL96 | 2690 | sense | 21 |
| UUCACAUUCUGGCACCCACUCAG | 1595 | usUfscacAfuUfCfuggcAfcCfcacucsasg | 2691 | antisense | 23 |
| AGUGGGUGCCAGAAUGUGAAA | 1596 | asgsugggUfgCfCfAfgaaugugaaaL96 | 2692 | sense | 21 |
| UUUCACAUUCUGGCACCCACUCA | 1597 | usUfsucaCfaUfUfcuggCfaCfccacuscsa | 2693 | antisense | 23 |
| CUCUGAGUGGGUGCCAGAAUG | 1598 | csuscugaGfuGfGfGfugccagaaugL96 | 2694 | sense | 21 |
| CAUUCUGGCACCCACUCAGAGCC | 1599 | csAfsuucUfgGfCfacccAfcUfcagagscsc | 2695 | antisense | 23 |
| GCUCUGAGUGGGUGCCAGAAU | 1600 | gscsucugAfgUfGfGfgugccagaauL96 | 2696 | sense | 21 |
| AUUCUGGCACCCACUCAGAGCCA | 1601 | asUfsucuGfgCfAfcccaCfuCfagagescsa | 2697 | antisense | 23 |
| GCACUGAUGUUCUGAAAGCUC | 1602 | gscsacugAfuGfUfUfcugaaagcucL96 | 2698 | sense | 21 |
| GAGCUUUCAGAACAUCAGUGCCU | 1603 | gsAfsgcuUfuCfAfgaacAfuCfagugcscsu | 2699 | antisense | 23 |
| CACUGAUGUUCUGAAAGCUCU | 1604 | csascugaUfgUfUfCfugaaagcucuL96 | 2700 | sense | 21 |
| AGAGCUUUCAGAACAUCAGUGCC | 1605 | asGfsagcUfuUfCfagaaCfaUfcagugscsc | 2701 | antisense | 23 |
| AAAGGCACUGAUGUUCUGAAA | 1606 | asasaggcAfcUfGfAfuguucugaaaL96 | 2702 | sense | 21 |
| UUUCAGAACAUCAGUGCCUUUCC | 1607 | usUfsucaGfaAfCfaucaGfuGfccuuuscsc | 2703 | antisense | 23 |
| GAAAGGCACUGAUGUUCUGAA | 1608 | gsasaaggCfaCfUfGfauguucugaaL96 | 2704 | sense | 21 |
| UUCAGAACAUCAGUGCCUUUCCG | 1609 | usUfscagAfaCfAfucagUfgCfcuuucscsg | 2705 | antisense | 23 |
| GGGAAGGUGGAAGUCUUCCUG | 1610 | gsgsgaagGfuGfGfAfagucuuccugL96 | 2706 | sense | 21 |
| CAGGAAGACUUCCACCUUCCCUU | 1611 | csAfsggaAfgAfCfuuccAfcCfuucccsusu | 2707 | antisense | 23 |
| GGAAGGUGGAAGUCUUCCUGG | 1612 | gsgsaaggUfgGfAfAfgucuuccuggL96 | 2708 | sense | 21 |
| CCAGGAAGACUUCCACCUUCCCU | 1613 | csCfsaggAfaGfAfcuucCfaCfcuuccscsu | 2709 | antisense | 23 |
| GGAAGGGAAGGUGGAAGUCUU | 1614 | gsgsaaggGfaAfGfGfuggaagucuuL96 | 2710 | sense | 21 |
| AAGACUUCCACCUUCCCUUCCAC | 1615 | asAfsgacUfuCfCfaccuUfcCfcuuccsasc | 2711 | antisense | 23 |
| UGGAAGGGAAGGUGGAAGUCU | 1616 | usgsgaagGfgAfAfGfguggaagucuL96 | 2712 | sense | 21 |
| AGACUUCCACCUUCCCUUCCACA | 1617 | asGfsacuUfcCfAfccuuCfcCfuuccascsa | 2713 | antisense | 23 |
| UGCUAAAUCAGUACUUCCAAA | 1618 | usgscuaaAfuCfAfGfuacuuccaaaL96 | 2714 | sense | 21 |
| UUUGGAAGUACUGAUUUAGCAUG | 1619 | usUfsuggAfaGfUfacugAfuUfuagcasusg | 2715 | antisense | 23 |
| GCUAAAUCAGUACUUCCAAAG | 1620 | gscsuaaaUfcAfGfUfacuuccaaagL96 | 2716 | sense | 21 |
| CUUUGGAAGUACUGAUUUAGCAU | 1621 | csUfsuugGfaAfGfuacuGfaUfuuagcsasu | 2717 | antisense | 23 |
| AACAUGCUAAAUCAGUACUUC | 1622 | asascaugCfuAfAfAfucaguacuucL96 | 2718 | sense | 21 |
| GAAGUACUGAUUUAGCAUGUUGU | 1623 | gsAfsaguAfcUfGfauuuAfgCfauguusgsu | 2719 | antisense | 23 |
| CAACAUGCUAAAUCAGUACUU | 1624 | csasacauGfcUfAfAfaucaguacuuL96 | 2720 | sense | 21 |
| AAGUACUGAUUUAGCAUGUUGUU | 1625 | asAfsguaCfuGfAfuuuaGfcAfuguugsusu | 2721 | antisense | 23 |
| CCACAACUCAGGAUGAAAAAU | 1626 | cscsacaaCfuCfAfGfgaugaaaaauL96 | 2722 | sense | 21 |
| AUUUUUCAUCCUGAGUUGUGGCG | 1627 | asUfsuuuUfcAfUfccugAfgUfuguggscsg | 2723 | antisense | 23 |
| CACAACUCAGGAUGAAAAAUU | 1628 | csascaacUfcAfGfGfaugaaaaauuL96 | 2724 | sense | 21 |
| AAUUUUUCAUCCUGAGUUGUGGC | 1629 | asAfsuuuUfuCfAfuccuGfaGfuugugsgsc | 2725 | antisense | 23 |
| GCCGCCACAACUCAGGAUGAA | 1630 | gscscgccAfcAfAfCfucaggaugaaL96 | 2726 | sense | 21 |
| UUCAUCCUGAGUUGUGGCGGCAG | 1631 | usUfscauCfcUfGfaguuGfuGfgcggcsasg | 2727 | antisense | 23 |
| UGCCGCCACAACUCAGGAUGA | 1632 | usgsccgcCfaCfAfAfcucaggaugaL96 | 2728 | sense | 21 |
| UCAUCCUGAGUUGUGGCGGCAGU | 1633 | usCfsaucCfuGfAfguugUfgGfcggcasgsu | 2729 | antisense | 23 |
| GCAACCGUCUGGAUGAUGUGC | 1634 | gscsaaccGfuCfUfGfgaugaugugcL96 | 2730 | sense | 21 |
| GCACAUCAUCCAGACGGUUGCCC | 1635 | gsCfsacaUfcAfUfccagAfcGfguugcscsc | 2731 | antisense | 23 |
| CAACCGUCUGGAUGAUGUGCG | 1636 | csasaccgUfcUfGfGfaugaugugcgL96 | 2732 | sense | 21 |
| CGCACAUCAUCCAGACGGUUGCC | 1637 | csGfscacAfuCfAfuccaGfaCfgguugscsc | 2733 | antisense | 23 |
| CUGGGCAACCGUCUGGAUGAU | 1638 | csusgggcAfaCfCfGfucuggaugauL96 | 2734 | sense | 21 |
| AUCAUCCAGACGGUUGCCCAGGU | 1639 | asUfscauCfcAfGfacggUfuGfcccagsgsu | 2735 | antisense | 23 |
| CCUGGGCAACCGUCUGGAUGA | 1640 | cscsugggCfaAfCfCfgucuggaugaL96 | 2736 | sense | 21 |
| UCAUCCAGACGGUUGCCCAGGUA | 1641 | usCfsaucCfaGfAfcgguUfgCfccaggsusa | 2737 | antisense | 23 |
| GCAAAUGAUGAAGAAACUUUG | 1642 | gscsaaauGfaUfGfAfagaaacuuugL96 | 2738 | sense | 21 |
| CAAAGUUUCUUCAUCAUUUGCCC | 1643 | csAfsaagUfuUfCfuucaUfcAfuuugcscsc | 2739 | antisense | 23 |
| CAAAUGAUGAAGAAACUUUGG | 1644 | csasaaugAfuGfAfAfgaaacuuuggL96 | 2740 | sense | 21 |
| CCAAAGUUUCUUCAUCAUUUGCC | 1645 | csCfsaaaGfuUfUfcuucAfuCfauuugscsc | 2741 | antisense | 23 |
| UGGGGCAAAUGAUGAAGAAAC | 1646 | usgsgggcAfaAfUfGfaugaagaaacL96 | 2742 | sense | 21 |
| GUUUCUUCAUCAUUUGCCCCAGA | 1647 | gsUfsuucUfuCfAfucauUfuGfccccasgsa | 2743 | antisense | 23 |
| CUGGGGCAAAUGAUGAAGAAA | 1648 | csusggggCfaAfAfUfgaugaagaaaL96 | 2744 | sense | 21 |
| UUUCUUCAUCAUUUGCCCCAGAC | 1649 | usUfsucuUfcAfUfcauuUfgCfcccagsasc | 2745 | antisense | 23 |
| CCAAGGCUGUGUUUGUGGGGA | 1650 | cscsaaggCfuGfUfGfuuuguggggaL96 | 2746 | sense | 21 |
| UCCCCACAAACACAGCCUUGGCG | 1651 | usCfscccAfcAfAfacacAfgCfcuuggscsg | 2747 | antisense | 23 |
| CAAGGCUGUGUUUGUGGGGAG | 1652 | csasaggcUfgUfGfUfuuguggggagL96 | 2748 | sense | 21 |
| CUCCCCACAAACACAGCCUUGGC | 1653 | csUfscccCfaCfAfaacaCfaGfccuugsgsc | 2749 | antisense | 23 |
| GGCGCCAAGGCUGUGUUUGUG | 1654 | gsgscgccAfaGfGfCfuguguuugugL96 | 2750 | sense | 21 |
| CACAAACACAGCCUUGGCGCCAA | 1655 | csAfscaaAfcAfCfagccUfuGfgcgccsasa | 2751 | antisense | 23 |
| UGGCGCCAAGGCUGUGUUUGU | 1656 | usgsgcgcCfaAfGfGfcuguguuuguL96 | 2752 | sense | 21 |
| ACAAACACAGCCUUGGCGCCAAG | 1657 | asCfsaaaCfaCfAfgccuUfgGfcgccasasg | 2753 | antisense | 23 |
| ACUGCCGCCACAACUCAGGAU | 1658 | ascsugccGfcCfAfCfaacucaggauL96 | 2754 | sense | 21 |
| AUCCUGAGUUGUGGCGGCAGUUU | 1659 | asUfsccuGfaGfUfugugGfcGfgcagususu | 2755 | antisense | 23 |
| CUGCCGCCACAACUCAGGAUG | 1660 | csusgccgCfcAfCfAfacucaggaugL96 | 2756 | sense | 21 |
| CAUCCUGAGUUGUGGCGGCAGUU | 1661 | csAfsuccUfgAfGfuuguGfgCfggcagsusu | 2757 | antisense | 23 |
| UCAAACUGCCGCCACAACUCA | 1662 | uscsaaacUfgCfCfGfccacaacucaL96 | 2758 | sense | 21 |
| UGAGUUGUGGCGGCAGUUUGAAU | 1663 | usGfsaguUfgUfGfgcggCfaGfuuugasasu | 2759 | antisense | 23 |
| UUCAAACUGCCGCCACAACUC | 1664 | ususcaaaCfuGfCfCfgccacaacucL96 | 2760 | sense | 21 |
| GAGUUGUGGCGGCAGUUUGAAUC | 1665 | gsAfsguuGfuGfGfcggcAfgUfuugaasusc | 2761 | antisense | 23 |
| GGGAAGAUAUCAAAUGGCUGA | 1666 | gsgsgaagAfuAfUfCfaaauggcugaL96 | 2762 | sense | 21 |
| UCAGCCAUUUGAUAUCUUCCCAG | 1667 | usCfsagcCfaUfUfugauAfuCfuucccsasg | 2763 | antisense | 23 |
| GGAAGAUAUCAAAUGGCUGAG | 1668 | gsgsaagaUfaUfCfAfaauggcugagL96 | 2764 | sense | 21 |
| CUCAGCCAUUUGAUAUCUUCCCA | 1669 | csUfscagCfcAfUfuugaUfaUfcuuccscsa | 2765 | antisense | 23 |
| AGCUGGGAAGAUAUCAAAUGG | 1670 | asgscuggGfaAfGfAfuaucaaauggL96 | 2766 | sense | 21 |
| CCAUUUGAUAUCUUCCCAGCUGA | 1671 | csCfsauuUfgAfUfaucuUfcCfcagcusgsa | 2767 | antisense | 23 |
| CAGCUGGGAAGAUAUCAAAUG | 1672 | csasgcugGfgAfAfGfauaucaaaugL96 | 2768 | sense | 21 |
| CAUUUGAUAUCUUCCCAGCUGAU | 1673 | csAfsuuuGfaUfAfucuuCfcCfagcugsasu | 2769 | antisense | 23 |
| AAUCAGUACUUCCAAAGUCUA | 1674 | asasucagUfaCfUfUfccaaagucuaL96 | 2770 | sense | 21 |
| UAGACUUUGGAAGUACUGAUUUA | 1675 | usAfsgacUfuUfGfgaagUfaCfugauususa | 2771 | antisense | 23 |
| AUCAGUACUUCCAAAGUCUAU | 1676 | asuscaguAfcUfUfCfcaaagucuauL96 | 2772 | sense | 21 |
| AUAGACUUUGGAAGUACUGAUUU | 1677 | asUfsagaCfuUfUfggaaGfuAfcugaususu | 2773 | antisense | 23 |
| GCUAAAUCAGUACUUCCAAAG | 1678 | gscsuaaaUfcAfGfUfacuuccaaagL96 | 2774 | sense | 21 |
| CUUUGGAAGUACUGAUUUAGCAU | 1679 | csUfsuugGfaAfGfuacuGfaUfuuagcsasu | 2775 | antisense | 23 |
| UGCUAAAUCAGUACUUCCAAA | 1680 | usgscuaaAfuCfAfGfuacuuccaaaL96 | 2776 | sense | 21 |
| UUUGGAAGUACUGAUUUAGCAUG | 1681 | usUfsuggAfaGfUfacugAfuUfuagcasusg | 2777 | antisense | 23 |
| UCAGCAUGCCAAUAUGUGUGG | 1682 | uscsagcaUfgCfCfAfauauguguggL96 | 2778 | sense | 21 |
| CCACACAUAUUGGCAUGCUGACC | 1683 | csCfsacaCfaUfAfuuggCfaUfgcugascsc | 2779 | antisense | 23 |
| CAGCAUGCCAAUAUGUGUGGG | 1684 | csasgcauGfcCfAfAfuaugugugggL96 | 2780 | sense | 21 |
| CCCACACAUAUUGGCAUGCUGAC | 1685 | csCfscacAfcAfUfauugGfcAfugcugsasc | 2781 | antisense | 23 |
| AGGGUCAGCAUGCCAAUAUGU | 1686 | asgsggucAfgCfAfUfgccaauauguL96 | 2782 | sense | 21 |
| ACAUAUUGGCAUGCUGACCCUCU | 1687 | asCfsauaUfuGfGfcaugCfuGfacccuscsu | 2783 | antisense | 23 |
| GAGGGUCAGCAUGCCAAUAUG | 1688 | gsasggguCfaGfCfAfugccaauaugL96 | 2784 | sense | 21 |
| CAUAUUGGCAUGCUGACCCUCUG | 1689 | csAfsuauUfgGfCfaugcUfgAfcccucsusg | 2785 | antisense | 23 |
| GCAUAUGUGGCUAAAGCAAUA | 1690 | gscsauauGfuGfGfCfuaaagcaauaL96 | 2786 | sense | 21 |
| UAUUGCUUUAGCCACAUAUGCAG | 1691 | usAfsuugCfuUfUfagccAfcAfuaugcsasg | 2787 | antisense | 23 |
| CAUAUGUGGCUAAAGCAAUAG | 1692 | csasuaugUfgGfCfUfaaagcaauagL96 | 2788 | sense | 21 |
| CUAUUGCUUUAGCCACAUAUGCA | 1693 | csUfsauuGfcUfUfuagcCfaCfauaugscsa | 2789 | antisense | 23 |
| UGCUGCAUAUGUGGCUAAAGC | 1694 | usgscugcAfuAfUfGfuggcuaaagcL96 | 2790 | sense | 21 |
| GCUUUAGCCACAUAUGCAGCAAG | 1695 | gsCfsuuuAfgCfCfacauAfuGfcagcasasg | 2791 | antisense | 23 |
| UUGCUGCAUAUGUGGCUAAAG | 1696 | ususgcugCfaUfAfUfguggcuaaagL96 | 2792 | sense | 21 |
| CUUUAGCCACAUAUGCAGCAAGU | 1697 | csUfsuuaGfcCfAfcauaUfgCfagcaasgsu | 2793 | antisense | 23 |
| AAAUGAUGAAGAAACUUUGGC | 1698 | asasaugaUfgAfAfGfaaacuuuggcL96 | 2794 | sense | 21 |
| GCCAAAGUUUCUUCAUCAUUUGC | 1699 | gsCfscaaAfgUfUfucuuCfaUfcauuusgsc | 2795 | antisense | 23 |
| AAUGAUGAAGAAACUUUGGCU | 1700 | asasugauGfaAfGfAfaacuuuggcuL96 | 2796 | sense | 21 |
| AGCCAAAGUUUCUUCAUCAUUUG | 1701 | asGfsccaAfaGfUfuucuUfcAfucauususg | 2797 | antisense | 23 |
| GGGCAAAUGAUGAAGAAACUU | 1702 | gsgsgcaaAfuGfAfUfgaagaaacuuL96 | 2798 | sense | 21 |
| AAGUUUCUUCAUCAUUUGCCCCA | 1703 | asAfsguuUfcUfUfcaucAfuUfugcccscsa | 2799 | antisense | 23 |
| GGGGCAAAUGAUGAAGAAACU | 1704 | gsgsggcaAfaUfGfAfugaagaaacuL96 | 2800 | sense | 21 |
| AGUUUCUUCAUCAUUUGCCCCAG | 1705 | asGfsuuuCfuUfCfaucaUfuUfgccccsasg | 2801 | antisense | 23 |
| GAGAUACUAAAGGAAGAAUUC | 1706 | gsasgauaCfuAfAfAfggaagaauucL96 | 2802 | sense | 21 |
| GAAUUCUUCCUUUAGUAUCUCGA | 1707 | gsAfsauuCfuUfCfcuuuAfgUfaucucsgsa | 2803 | antisense | 23 |
| AGAUACUAAAGGAAGAAUUCC | 1708 | asgsauacUfaAfAfGfgaagaauuccL96 | 2804 | sense | 21 |
| GGAAUUCUUCCUUUAGUAUCUCG | 1709 | gsGfsaauUfcUfUfccuuUfaGfuaucuscsg | 2805 | antisense | 23 |
| CCUCGAGAUACUAAAGGAAGA | 1710 | cscsucgaGfaUfAfCfuaaaggaagaL96 | 2806 | sense | 21 |
| UCUUCCUUUAGUAUCUCGAGGAC | 1711 | usCfsuucCfuUfUfaguaUfcUfcgaggsasc | 2807 | antisense | 23 |
| UCCUCGAGAUACUAAAGGAAG | 1712 | uscscucgAfgAfUfAfcuaaaggaagL96 | 2808 | sense | 21 |
| CUUCCUUUAGUAUCUCGAGGACA | 1713 | csUfsuccUfuUfAfguauCfuCfgaggascsa | 2809 | antisense | 23 |
| ACAACUCAGGAUGAAAAAUUU | 1714 | ascsaacuCfaGfGfAfugaaaaauuuL96 | 2810 | sense | 21 |
| AAAUUUUUCAUCCUGAGUUGUGG | 1715 | asAfsauuUfuUfCfauccUfgAfguugusgsg | 2811 | antisense | 23 |
| CAACUCAGGAUGAAAAAUUUU | 1716 | csasacucAfgGfAfUfgaaaaauuuuL96 | 2812 | sense | 21 |
| AAAAUUUUUCAUCCUGAGUUGUG | 1717 | asAfsaauUfuUfUfcaucCfuGfaguugsusg | 2813 | antisense | 23 |
| CGCCACAACUCAGGAUGAAAA | 1718 | csgsccacAfaCfUfCfaggaugaaaaL96 | 2814 | sense | 21 |
| UUUUCAUCCUGAGUUGUGGCGGC | 1719 | usUfsuucAfuCfCfugagUfuGfuggcgsgsc | 2815 | antisense | 23 |
| CCGCCACAACUCAGGAUGAAA | 1720 | cscsgccaCfaAfCfUfcaggaugaaaL96 | 2816 | sense | 21 |
| UUUCAUCCUGAGUUGUGGCGGCA | 1721 | usUfsucaUfcCfUfgaguUfgUfggcggscsa | 2817 | antisense | 23 |
| AGGGAAGGUGGAAGUCUUCCU | 1722 | asgsggaaGfgUfGfGfaagucuuccuL96 | 2818 | sense | 21 |
| AGGAAGACUUCCACCUUCCCUUC | 1723 | asGfsgaaGfaCfUfuccaCfcUfucccususc | 2819 | antisense | 23 |
| GGGAAGGUGGAAGUCUUCCUG | 1724 | gsgsgaagGfuGfGfAfagucuuccugL96 | 2820 | sense | 21 |
| CAGGAAGACUUCCACCUUCCCUU | 1725 | csAfsggaAfgAfCfuuccAfcCfuucccsusu | 2821 | antisense | 23 |
| UGGAAGGGAAGGUGGAAGUCU | 1726 | usgsgaagGfgAfAfGfguggaagucuL96 | 2822 | sense | 21 |
| AGACUUCCACCUUCCCUUCCACA | 1727 | asGfsacuUfcCfAfccuuCfcCfuuccascsa | 2823 | antisense | 23 |
| GUGGAAGGGAAGGUGGAAGUC | 1728 | gsusggaaGfgGfAfAfgguggaagucL96 | 2824 | sense | 21 |
| GACUUCCACCUUCCCUUCCACAG | 1729 | gsAfscuuCfcAfCfcuucCfcUfuccacsasg | 2825 | antisense | 23 |
| GGCGAGCUUGCCACUGUGAGA | 1730 | gsgscgagCfuUfGfCfcacugugagaL96 | 2826 | sense | 21 |
| UCUCACAGUGGCAAGCUCGCCGU | 1731 | usCfsucaCfaGfUfggcaAfgCfucgccsgsu | 2827 | antisense | 23 |
| GCGAGCUUGCCACUGUGAGAG | 1732 | gscsgagcUfuGfCfCfacugugagagL96 | 2828 | sense | 21 |
| CUCUCACAGUGGCAAGCUCGCCG | 1733 | csUfscucAfcAfGfuggcAfaGfcucgcscsg | 2829 | antisense | 23 |
| GGACGGCGAGCUUGCCACUGU | 1734 | gsgsacggCfgAfGfCfuugccacuguL96 | 2830 | sense | 21 |
| ACAGUGGCAAGCUCGCCGUCCAC | 1735 | asCfsaguGfgCfAfagcuCfgCfcguccsasc | 2831 | antisense | 23 |
| UGGACGGCGAGCUUGCCACUG | 1736 | usgsgacgGfcGfAfGfcuugccacugL96 | 2832 | sense | 21 |
| CAGUGGCAAGCUCGCCGUCCACA | 1737 | csAfsgugGfcAfAfgcucGfcCfguccascsa | 2833 | antisense | 23 |
| AUGUGCGUAACAGAUUCAAAC | 1738 | asusgugcGfuAfAfCfagauucaaacL96 | 2834 | sense | 21 |
| GUUUGAAUCUGUUACGCACAUCA | 1739 | gsUfsuugAfaUfCfuguuAfcGfcacauscsa | 2835 | antisense | 23 |
| UGUGCGUAACAGAUUCAAACU | 1740 | usgsugcgUfaAfCfAfgauucaaacuL96 | 2836 | sense | 21 |
| AGUUUGAAUCUGUUACGCACAUC | 1741 | asGfsuuuGfaAfUfcuguUfaCfgcacasusc | 2837 | antisense | 23 |
| GAUGAUGUGCGUAACAGAUUC | 1742 | gsasugauGfuGfCfGfuaacagauucL96 | 2838 | sense | 21 |
| GAAUCUGUUACGCACAUCAUCCA | 1743 | gsAfsaucUfgUfUfacgcAfcAfucaucscsa | 2839 | antisense | 23 |
| GGAUGAUGUGCGUAACAGAUU | 1744 | gsgsaugaUfgUfGfCfguaacagauuL96 | 2840 | sense | 21 |
| AAUCUGUUACGCACAUCAUCCAG | 1745 | asAfsucuGfuUfAfcgcaCfaUfcauccsasg | 2841 | antisense | 23 |
| GGGUCAGCAUGCCAAUAUGUG | 1746 | gsgsgucaGfcAfUfGfccaauaugugL96 | 2842 | sense | 21 |
| CACAUAUUGGCAUGCUGACCCUC | 1747 | csAfscauAfuUfGfgcauGfcUfgacccsusc | 2843 | antisense | 23 |
| GGUCAGCAUGCCAAUAUGUGU | 1748 | gsgsucagCfaUfGfCfcaauauguguL96 | 2844 | sense | 21 |
| ACACAUAUUGGCAUGCUGACCCU | 1749 | asCfsacaUfaUfUfggcaUfgCfugaccscsu | 2845 | antisense | 23 |
| CAGAGGGUCAGCAUGCCAAUA | 1750 | csasgaggGfuCfAfGfcaugccaauaL96 | 2846 | sense | 21 |
| UAUUGGCAUGCUGACCCUCUGUC | 1751 | usAfsuugGfcAfUfgcugAfcCfcucugsusc | 2847 | antisense | 23 |
| ACAGAGGGUCAGCAUGCCAAU | 1752 | ascsagagGfgUfCfAfgcaugccaauL96 | 2848 | sense | 21 |
| AUUGGCAUGCUGACCCUCUGUCC | 1753 | asUfsuggCfaUfGfcugaCfcCfucuguscsc | 2849 | antisense | 23 |
| GCUUGAAUGGGAUCUUGGUGU | 1754 | gscsuugaAfuGfGfGfaucuugguguL96 | 2850 | sense | 21 |
| ACACCAAGAUCCCAUUCAAGCCA | 1755 | asCfsaccAfaGfAfucccAfuUfcaagcscsa | 2851 | antisense | 23 |
| CUUGAAUGGGAUCUUGGUGUC | 1756 | csusugaaUfgGfGfAfucuuggugucL96 | 2852 | sense | 21 |
| GACACCAAGAUCCCAUUCAAGCC | 1757 | gsAfscacCfaAfGfauccCfaUfucaagscsc | 2853 | antisense | 23 |
| CAUGGCUUGAAUGGGAUCUUG | 1758 | csasuggcUfuGfAfAfugggaucuugL96 | 2854 | sense | 21 |
| CAAGAUCCCAUUCAAGCCAUGUU | 1759 | csAfsagaUfcCfCfauucAfaGfccaugsusu | 2855 | antisense | 23 |
| ACAUGGCUUGAAUGGGAUCUU | 1760 | ascsauggCfuUfGfAfaugggaucuuL96 | 2856 | sense | 21 |
| AAGAUCCCAUUCAAGCCAUGUUU | 1761 | asAfsgauCfcCfAfuucaAfgCfcaugususu | 2857 | antisense | 23 |
| UCAAAUGGCUGAGAAGACUGA | 1762 | uscsaaauGfgCfUfGfagaagacugaL96 | 2858 | sense | 21 |
| UCAGUCUUCUCAGCCAUUUGAUA | 1763 | usCfsaguCfuUfCfucagCfcAfuuugasusa | 2859 | antisense | 23 |
| CAAAUGGCUGAGAAGACUGAC | 1764 | csasaaugGfcUfGfAfgaagacugacL96 | 2860 | sense | 21 |
| GUCAGUCUUCUCAGCCAUUUGAU | 1765 | gsUfscagUfcUfUfcucaGfcCfauuugsasu | 2861 | antisense | 23 |
| GAUAUCAAAUGGCUGAGAAGA | 1766 | gsasuaucAfaAfUfGfgcugagaagaL96 | 2862 | sense | 21 |
| UCUUCUCAGCCAUUUGAUAUCUU | 1767 | usCfsuucUfcAfGfccauUfuGfauaucsusu | 2863 | antisense | 23 |
| AGAUAUCAAAUGGCUGAGAAG | 1768 | asgsauauCfaAfAfUfggcugagaagL96 | 2864 | sense | 21 |
| CUUCUCAGCCAUUUGAUAUCUUC | 1769 | csUfsucuCfaGfCfcauuUfgAfuaucususc | 2865 | antisense | 23 |
| GAAAGUCAUCGACAAGACAUU | 1770 | gsasaaguCfaUfCfGfacaagacauuL96 | 2866 | sense | 21 |
| AAUGUCUUGUCGAUGACUUUCAC | 1771 | asAfsuguCfuUfGfucgaUfgAfcuuucsasc | 2867 | antisense | 23 |
| AAAGUCAUCGACAAGACAUUG | 1772 | asasagucAfuCfGfAfcaagacauugL96 | 2868 | sense | 21 |
| CAAUGUCUUGUCGAUGACUUUCA | 1773 | csAfsaugUfcUfUfgucgAfuGfacuuuscsa | 2869 | antisense | 23 |
| AUGUGAAAGUCAUCGACAAGA | 1774 | asusgugaAfaGfUfCfaucgacaagaL96 | 2870 | sense | 21 |
| UCUUGUCGAUGACUUUCACAUUC | 1775 | usCfsuugUfcGfAfugacUfuUfcacaususc | 2871 | antisense | 23 |
| AAUGUGAAAGUCAUCGACAAG | 1776 | asasugugAfaAfGfUfcaucgacaagL96 | 2872 | sense | 21 |
| CUUGUCGAUGACUUUCACAUUCU | 1777 | csUfsuguCfgAfUfgacuUfuCfacauuscsu | 2873 | antisense | 23 |
| GGCUAAUUUGUAUCAAUGAUU | 1778 | gsgscuaaUfuUfGfUfaucaaugauuL96 | 2874 | sense | 21 |
| AAUCAUUGAUACAAAUUAGCCGG | 1779 | asAfsucaUfuGfAfuacaAfaUfuagccsgsg | 2875 | antisense | 23 |
| GCUAAUUUGUAUCAAUGAUUA | 1780 | gscsuaauUfuGfUfAfucaaugauuaL96 | 2876 | sense | 21 |
| UAAUCAUUGAUACAAAUUAGCCG | 1781 | usAfsaucAfuUfGfauacAfaAfuuagcscsg | 2877 | antisense | 23 |
| CCCCGGCUAAUUUGUAUCAAU | 1782 | cscsccggCfuAfAfUfuuguaucaauL96 | 2878 | sense | 21 |
| AUUGAUACAAAUUAGCCGGGGGA | 1783 | asUfsugaUfaCfAfaauuAfgCfcggggsgsa | 2879 | antisense | 23 |
| CCCCCGGCUAAUUUGUAUCAA | 1784 | cscscccgGfcUfAfAfuuuguaucaaL96 | 2880 | sense | 21 |
| UUGAUACAAAUUAGCCGGGGGAG | 1785 | usUfsgauAfcAfAfauuaGfcCfgggggsasg | 2881 | antisense | 23 |
| UGUCGACUUCUGUUUUAGGAC | 1786 | usgsucgaCfuUfCfUfguuuuaggacL96 | 2882 | sense | 21 |
| GUCCUAAAACAGAAGUCGACAGA | 1787 | gsUfsccuAfaAfAfcagaAfgUfcgacasgsa | 2883 | antisense | 23 |
| GUCGACUUCUGUUUUAGGACA | 1788 | gsuscgacUfuCfUfGfuuuuaggacaL96 | 2884 | sense | 21 |
| UGUCCUAAAACAGAAGUCGACAG | 1789 | usGfsuccUfaAfAfacagAfaGfucgacsasg | 2885 | antisense | 23 |
| GAUCUGUCGACUUCUGUUUUA | 1790 | gsasucugUfcGfAfCfuucuguuuuaL96 | 2886 | sense | 21 |
| UAAAACAGAAGUCGACAGAUCUG | 1791 | usAfsaaaCfaGfAfagucGfaCfagaucsusg | 2887 | antisense | 23 |
| AGAUCUGUCGACUUCUGUUUU | 1792 | asgsaucuGfuCfGfAfcuucuguuuuL96 | 2888 | sense | 21 |
| AAAACAGAAGUCGACAGAUCUGU | 1793 | asAfsaacAfgAfAfgucgAfcAfgaucusgsu | 2889 | antisense | 23 |
| CCGAGAAGUCACCAAGAAGCU | 1794 | cscsgagaAfgUfCfAfccaagaagcuL96 | 2890 | sense | 21 |
| AGCUUCUUGGUGACUUCUCGGUC | 1795 | asGfscuuCfuUfGfgugaCfuUfcucggsusc | 2891 | antisense | 23 |
| CGAGAAGUCACCAAGAAGCUA | 1796 | csgsagaaGfuCfAfCfcaagaagcuaL96 | 2892 | sense | 21 |
| UAGCUUCUUGGUGACUUCUCGGU | 1797 | usAfsgcuUfcUfUfggugAfcUfucucgsgsu | 2893 | antisense | 23 |
| AGGACCGAGAAGUCACCAAGA | 1798 | asgsgaccGfaGfAfAfgucaccaagaL96 | 2894 | sense | 21 |
| UCUUGGUGACUUCUCGGUCCUUG | 1799 | usCfsuugGfuGfAfcuucUfcGfguccususg | 2895 | antisense | 23 |
| AAGGACCGAGAAGUCACCAAG | 1800 | asasggacCfgAfGfAfagucaccaagL96 | 2896 | sense | 21 |
| CUUGGUGACUUCUCGGUCCUUGU | 1801 | csUfsuggUfgAfCfuucuCfgGfuccuusgsu | 2897 | antisense | 23 |
| AAACAUGGCUUGAAUGGGAUC | 1802 | asasacauGfgCfUfUfgaaugggaucL96 | 2898 | sense | 21 |
| GAUCCCAUUCAAGCCAUGUUUAA | 1803 | gsAfsuccCfaUfUfcaagCfcAfuguuusasa | 2899 | antisense | 23 |
| AACAUGGCUUGAAUGGGAUCU | 1804 | asascaugGfcUfUfGfaaugggaucuL96 | 2900 | sense | 21 |
| AGAUCCCAUUCAAGCCAUGUUUA | 1805 | asGfsaucCfcAfUfucaaGfcCfauguususa | 2901 | antisense | 23 |
| UGUUAAACAUGGCUUGAAUGG | 1806 | usgsuuaaAfcAfUfGfgcuugaauggL96 | 2902 | sense | 21 |
| CCAUUCAAGCCAUGUUUAACAGC | 1807 | csCfsauuCfaAfGfccauGfuUfuaacasgsc | 2903 | antisense | 23 |
| CUGUUAAACAUGGCUUGAAUG | 1808 | csusguuaAfaCfAfUfggcuugaaugL96 | 2904 | sense | 21 |
| CAUUCAAGCCAUGUUUAACAGCC | 1809 | csAfsuucAfaGfCfcaugUfuUfaacagscsc | 2905 | antisense | 23 |
| GACUUGCUGCAUAUGUGGCUA | 1810 | gsascuugCfuGfCfAfuauguggcuaL96 | 2906 | sense | 21 |
| UAGCCACAUAUGCAGCAAGUCCA | 1811 | usAfsgccAfcAfUfaugcAfgCfaagucscsa | 2907 | antisense | 23 |
| ACUUGCUGCAUAUGUGGCUAA | 1812 | ascsuugcUfgCfAfUfauguggcuaaL96 | 2908 | sense | 21 |
| UUAGCCACAUAUGCAGCAAGUCC | 1813 | usUfsagcCfaCfAfuaugCfaGfcaaguscsc | 2909 | antisense | 23 |
| AGUGGACUUGCUGCAUAUGUG | 1814 | asgsuggaCfuUfGfCfugcauaugugL96 | 2910 | sense | 21 |
| CACAUAUGCAGCAAGUCCACUGU | 1815 | csAfscauAfuGfCfagcaAfgUfccacusgsu | 2911 | antisense | 23 |
| CAGUGGACUUGCUGCAUAUGU | 1816 | csasguggAfcUfUfGfcugcauauguL96 | 2912 | sense | 21 |
| ACAUAUGCAGCAAGUCCACUGUC | 1817 | asCfsauaUfgCfAfgcaaGfuCfcacugsusc | 2913 | antisense | 23 |
| UAAAUCAGUACUUCCAAAGUC | 1818 | usasaaucAfgUfAfCfuuccaaagucL96 | 2914 | sense | 21 |
| GACUUUGGAAGUACUGAUUUAGC | 1819 | gsAfscuuUfgGfAfaguaCfuGfauuuasgsc | 2915 | antisense | 23 |
| AAAUCAGUACUUCCAAAGUCU | 1820 | asasaucaGfuAfCfUfuccaaagucuL96 | 2916 | sense | 21 |
| AGACUUUGGAAGUACUGAUUUAG | 1821 | asGfsacuUfuGfGfaaguAfcUfgauuusasg | 2917 | antisense | 23 |
| AUGCUAAAUCAGUACUUCCAA | 1822 | asusgcuaAfaUfCfAfguacuuccaaL96 | 2918 | sense | 21 |
| UUGGAAGUACUGAUUUAGCAUGU | 1823 | usUfsggaAfgUfAfcugaUfuUfagcausgsu | 2919 | antisense | 23 |
| CAUGCUAAAUCAGUACUUCCA | 1824 | csasugcuAfaAfUfCfaguacuuccaL96 | 2920 | sense | 21 |
| UGGAAGUACUGAUUUAGCAUGUU | 1825 | usGfsgaaGfuAfCfugauUfuAfgcaugsusu | 2921 | antisense | 23 |
| UCCUCAAUUGAAGAAGUGGCG | 1826 | uscscucaAfuUfGfAfagaaguggcgL96 | 2922 | sense | 21 |
| CGCCACUUCUUCAAUUGAGGAGG | 1827 | csGfsccaCfuUfCfuucaAfuUfgaggasgsg | 2923 | antisense | 23 |
| CCUCAAUUGAAGAAGUGGCGG | 1828 | cscsucaaUfuGfAfAfgaaguggcggL96 | 2924 | sense | 21 |
| CCGCCACUUCUUCAAUUGAGGAG | 1829 | csCfsgccAfcUfUfcuucAfaUfugaggsasg | 2925 | antisense | 23 |
| CACCUCCUCAAUUGAAGAAGU | 1830 | csasccucCfuCfAfAfuugaagaaguL96 | 2926 | sense | 21 |
| ACUUCUUCAAUUGAGGAGGUGGC | 1831 | asCfsuucUfuCfAfauugAfgGfaggugsgsc | 2927 | antisense | 23 |
| CCACCUCCUCAAUUGAAGAAG | 1832 | cscsaccuCfcUfCfAfauugaagaagL96 | 2928 | sense | 21 |
| CUUCUUCAAUUGAGGAGGUGGCC | 1833 | csUfsucuUfcAfAfuugaGfgAfgguggscsc | 2929 | antisense | 23 |
| CAAGAUGUCCUCGAGAUACUA | 1834 | csasagauGfuCfCfUfcgagauacuaL96 | 2930 | sense | 21 |
| UAGUAUCUCGAGGACAUCUUGAA | 1835 | usAfsguaUfcUfCfgaggAfcAfucuugsasa | 2931 | antisense | 23 |
| AAGAUGUCCUCGAGAUACUAA | 1836 | asasgaugUfcCfUfCfgagauacuaaL96 | 2932 | sense | 21 |
| UUAGUAUCUCGAGGACAUCUUGA | 1837 | usUfsaguAfuCfUfcgagGfaCfaucuusgsa | 2933 | antisense | 23 |
| UGUUCAAGAUGUCCUCGAGAU | 1838 | usgsuucaAfgAfUfGfuccucgagauL96 | 2934 | sense | 21 |
| AUCUCGAGGACAUCUUGAACACC | 1839 | asUfscucGfaGfGfacauCfuUfgaacascsc | 2935 | antisense | 23 |
| GUGUUCAAGAUGUCCUCGAGA | 1840 | gsusguucAfaGfAfUfguccucgagaL96 | 2936 | sense | 21 |
| UCUCGAGGACAUCUUGAACACCU | 1841 | usCfsucgAfgGfAfcaucUfuGfaacacscsu | 2937 | antisense | 23 |
| ACAUGCUAAAUCAGUACUUCC | 1842 | ascsaugcUfaAfAfUfcaguacuuccL96 | 2938 | sense | 21 |
| GGAAGUACUGAUUUAGCAUGUUG | 1843 | gsGfsaagUfaCfUfgauuUfaGfcaugususg | 2939 | antisense | 23 |
| CAUGCUAAAUCAGUACUUCCA | 1844 | csasugcuAfaAfUfCfaguacuuccaL96 | 2940 | sense | 21 |
| UGGAAGUACUGAUUUAGCAUGUU | 1845 | usGfsgaaGfuAfCfugauUfuAfgcaugsusu | 2941 | antisense | 23 |
| AACAACAUGCUAAAUCAGUAC | 1846 | asascaacAfuGfCfUfaaaucaguacL96 | 2942 | sense | 21 |
| GUACUGAUUUAGCAUGUUGUUCA | 1847 | gsUfsacuGfaUfUfuagcAfuGfuuguuscsa | 2943 | antisense | 23 |
| GAACAACAUGCUAAAUCAGUA | 1848 | gsasacaaCfaUfGfCfuaaaucaguaL96 | 2944 | sense | 21 |
| UACUGAUUUAGCAUGUUGUUCAU | 1849 | usAfscugAfuUfUfagcaUfgUfuguucsasu | 2945 | antisense | 23 |
| GAAAGGCACUGAUGUUCUGAA | 1850 | gsasaaggCfaCfUfGfauguucugaaL96 | 2946 | sense | 21 |
| UUCAGAACAUCAGUGCCUUUCCG | 1851 | usUfscagAfaCfAfucagUfgCfcuuucscsg | 2947 | antisense | 23 |
| AAAGGCACUGAUGUUCUGAAA | 1852 | asasaggcAfcUfGfAfuguucugaaaL96 | 2948 | sense | 21 |
| UUUCAGAACAUCAGUGCCUUUCC | 1853 | usUfsucaGfaAfCfaucaGfuGfccuuuscsc | 2949 | antisense | 23 |
| UGCGGAAAGGCACUGAUGUUC | 1854 | usgscggaAfaGfGfCfacugauguucL96 | 2950 | sense | 21 |
| GAACAUCAGUGCCUUUCCGCACA | 1855 | gsAfsacaUfcAfGfugccUfuUfccgcascsa | 2951 | antisense | 23 |
| GUGCGGAAAGGCACUGAUGUU | 1856 | gsusgcggAfaAfGfGfcacugauguuL96 | 2952 | sense | 21 |
| AACAUCAGUGCCUUUCCGCACAC | 1857 | asAfscauCfaGfUfgccuUfuCfcgcacsasc | 2953 | antisense | 23 |
| GUCAGCAUGCCAAUAUGUGUG | 1858 | gsuscagcAfuGfCfCfaauaugugugL96 | 2954 | sense | 21 |
| CACACAUAUUGGCAUGCUGACCC | 1859 | csAfscacAfuAfUfuggcAfuGfcugacscsc | 2955 | antisense | 23 |
| UCAGCAUGCCAAUAUGUGUGG | 1860 | uscsagcaUfgCfCfAfauauguguggL96 | 2956 | sense | 21 |
| CCACACAUAUUGGCAUGCUGACC | 1861 | csCfsacaCfaUfAfuuggCfaUfgcugascsc | 2957 | antisense | 23 |
| GAGGGUCAGCAUGCCAAUAUG | 1862 | gsasggguCfaGfCfAfugccaauaugL96 | 2958 | sense | 21 |
| CAUAUUGGCAUGCUGACCCUCUG | 1863 | csAfsuauUfgGfCfaugcUfgAfcccucsusg | 2959 | antisense | 23 |
| AGAGGGUCAGCAUGCCAAUAU | 1864 | asgsagggUfcAfGfCfaugccaauauL96 | 2960 | sense | 21 |
| AUAUUGGCAUGCUGACCCUCUGU | 1865 | asUfsauuGfgCfAfugcuGfaCfccucusgsu | 2961 | antisense | 23 |
| GAUGCUCCGGAAUGUUGCUGA | 1866 | gsasugcuCfcGfGfAfauguugcugaL96 | 2962 | sense | 21 |
| UCAGCAACAUUCCGGAGCAUCCU | 1867 | usCfsagcAfaCfAfuuccGfgAfgcaucscsu | 2963 | antisense | 23 |
| AUGCUCCGGAAUGUUGCUGAA | 1868 | asusgcucCfgGfAfAfuguugcugaaL96 | 2964 | sense | 21 |
| UUCAGCAACAUUCCGGAGCAUCC | 1869 | usUfscagCfaAfCfauucCfgGfagcauscsc | 2965 | antisense | 23 |
| CAAGGAUGCUCCGGAAUGUUG | 1870 | csasaggaUfgCfUfCfcggaauguugL96 | 2966 | sense | 21 |
| CAACAUUCCGGAGCAUCCUUGGA | 1871 | csAfsacaUfuCfCfggagCfaUfccuugsgsa | 2967 | antisense | 23 |
| CCAAGGAUGCUCCGGAAUGUU | 1872 | cscsaaggAfuGfCfUfccggaauguuL96 | 2968 | sense | 21 |
| AACAUUCCGGAGCAUCCUUGGAU | 1873 | asAfscauUfcCfGfgagcAfuCfcuuggsasu | 2969 | antisense | 23 |
| GCGUAACAGAUUCAAACUGCC | 1874 | gscsguaaCfaGfAfUfucaaacugccL96 | 2970 | sense | 21 |
| GGCAGUUUGAAUCUGUUACGCAC | 1875 | gsGfscagUfuUfGfaaucUfgUfuacgcsasc | 2971 | antisense | 23 |
| CGUAACAGAUUCAAACUGCCG | 1876 | csgsuaacAfgAfUfUfcaaacugccgL96 | 2972 | sense | 21 |
| CGGCAGUUUGAAUCUGUUACGCA | 1877 | csGfsgcaGfuUfUfgaauCfuGfuuacgscsa | 2973 | antisense | 23 |
| AUGUGCGUAACAGAUUCAAAC | 1878 | asusgugcGfuAfAfCfagauucaaacL96 | 2974 | sense | 21 |
| GUUUGAAUCUGUUACGCACAUCA | 1879 | gsUfsuugAfaUfCfuguuAfcGfcacauscsa | 2975 | antisense | 23 |
| GAUGUGCGUAACAGAUUCAAA | 1880 | gsasugugCfgUfAfAfcagauucaaaL96 | 2976 | sense | 21 |
| UUUGAAUCUGUUACGCACAUCAU | 1881 | usUfsugaAfuCfUfguuaCfgCfacaucsasu | 2977 | antisense | 23 |
| AGAGAAGAUGGGCUACAAGGC | 1882 | asgsagaaGfaUfGfGfgcuacaaggcL96 | 2978 | sense | 21 |
| GCCUUGUAGCCCAUCUUCUCUGC | 1883 | gsCfscuuGfuAfGfcccaUfcUfucucusgsc | 2979 | antisense | 23 |
| GAGAAGAUGGGCUACAAGGCC | 1884 | gsasgaagAfuGfGfGfcuacaaggccL96 | 2980 | sense | 21 |
| GGCCUUGUAGCCCAUCUUCUCUG | 1885 | gsGfsccuUfgUfAfgcccAfuCfuucucsusg | 2981 | antisense | 23 |
| AGGCAGAGAAGAUGGGCUACA | 1886 | asgsgcagAfgAfAfGfaugggcuacaL96 | 2982 | sense | 21 |
| UGUAGCCCAUCUUCUCUGCCUGC | 1887 | usGfsuagCfcCfAfucuuCfuCfugccusgsc | 2983 | antisense | 23 |
| CAGGCAGAGAAGAUGGGCUAC | 1888 | csasggcaGfaGfAfAfgaugggcuacL96 | 2984 | sense | 21 |
| GUAGCCCAUCUUCUCUGCCUGCC | 1889 | gsUfsagcCfcAfUfcuucUfcUfgccugscsc | 2985 | antisense | 23 |

[chemical structure]

### Example 2. A Single Dose of AD-84788 Potently Inhibits Ldha Expression and Activity In Vivo

[0871] The effect of AD-84788 on the level of expression of Ldha in vivo was evaluated in C57BL/6J wild-type mice by subcutaneous administration of a single 0.1 mg/kg, 0.3 mg/kg, 1.0 mg/kg, 3.0 mg/kg, or 10 mg/kg dose of AD-84788. Forty-eight hours after administration, mice were euthanized and the livers were dissected and flash frozen in liquid nitrogen. Livers were ground and approximately 10 mg of liver powder per sample was used for RNA isolation. RNA concentration was measured, adjusted to 100 ng/μl, cDNA was prepared, and RT-PCR analysis was performed as described above.

[0872] The results of these assays are depicted in FIG. 2 which demonstrates that a single 1 mg/kg, 3 mg/kg or 10 mg/kg dose of AD-84788 potently inhibits Ldha expression.

[0873] The effects of a single 0.1 mg/kg, 0.3 mg/kg, 1.0 mg/kg, 3.0 mg/kg, or 10 mg/kg subcutaneous dose of AD-84788 on hepatic Ldha enzyme activity was evaluated in Agxt deficient mice.

[0874] Agxt deficient mice have a targeted disruption of the alanine-glyoxylate amino transferase gene (Agxt) (Salido, et al. (2006) Proc. Natl. Acad. Sci. U.S.A. 103:18249). Mutant mice develop normally, but exhibit hyperoxaluria and calcium oxalate crystal formation. These Agxt knock-out mice are a recognized animal model of primary hyperoxaluria type I, a rare disease characterized by excessive hepatic oxalate production that leads to renal failure and which is caused by mutations in the AGXT gene.

[0875] Liver LDH enzyme activity was measured by the reduction of NAD to NADH in liver tissue lysates. Four weeks after administration, mice were euthanized and liver samples were collected and processed. Briefly, liver samples were weighed, homogenized in lysis buffer (25 mM HEPES, 1% Triton, 1% protease inhibitor) and homogenates were centrifuged to pellet cell debris. The supernatants were recovered, and solutions of NAD and either lactic acid or glyoxylate were added. The samples were placed into a multi-well plate and placed into a plate reader. Absorbance readings at 340 nm were collected for 20 minutes at 1 minute intervals. The data was used to calculate LDHA specific activity (nmoles of LDHA activity/min/mg protein).

[0876] The results of these assays are depicted in FIG. 3 which demonstrates that a single 0.3 mg/kg, 1 mg/kg, 3 mg/kg or 10 mg/kg dose of AD-84788 potently inhibits Ldha enzyme activity.

### Example 3. AD-84788 Potently Reduces Endogenous LDHA Expression, LDHA Activity, and Oxalate Levels In Vivo

[0877] The effect of AD-84788 on endogenous oxalate production in vivo was evaluated in wild-type mice, Agxt deficient mice, and Grhpr knockout mice

[0878] Grhpr deficient mice have a targeted disruption of the glyoxylate reductase/hydroxypyruvate reductase (Grhpr) gene (see, e.g., Knight et al., (2011) Am J Physiol Renal Physiol 302 (6): F688-F693). Mutant mice exhibit no difference in growth and development, but exhibit nephrocalcinosis including deposits of calcium oxalate in cortical and medullary tubules. Grhpr knock-out mice are an art recognized animal model of primary hyperoxaluria type II, an inherited disease characterized by excessive production of oxalate caused by mutations in the Grhpr gene.

### Methods and Materials

### Animals

[0879] Adult (12-14 weeks of age) male Agt deficient (Agxt Ko) mice on a C57BL/6J background, Grhpr deficient (Grhpr Ko) mice, and wild type litter mates were used for these studies. Mice were maintained in a barrier facility with a 12:12-hour light-dark cycle and an ambient temperature of 23±1° C. and had free access to food and water. All mice were placed on an ultra low oxalate diet to eliminate dietary oxalate contributions, e.g., so that urinary oxalate excretion levels represent substantially only endogenous oxalate production. All animal studies were approved by the Institutional Animal Use and Care Committee.

### Metabolic Cage Urine Collections

[0880] For metabolic cage urine collections, animals were singly housed in Nalgene metabolic cages for collection of 24-hour urines, as previously described (Li, et. al. (2016) Biochimica et Biophysica Acta 1862:233). Three to four 24-hour urines were performed for each mouse before and after administration of an iRNA agent. The mean of these collections was used to characterize the urinary oxalate excretion of each animal.

LDHA iRNA Administration

[0881] The effect and durability of AD-84788 on urinary oxalate excretion excretion was determined by administering Agxt deficient mice (n=6) a single 0.3 mg/kg, 1 mg/kg, 3 mg/kg, or 10 mg/kg dose of AD-84788 diluted in sterile 0.9% sodium chloride on Day 0. Twenty-four-hour urines were collected on weeks 1, 2, 3, 4, 6, 8, 9, and 10 post-dose. Baseline twenty-four-hour urine collections were also performed prior to the administration of AD-84788.

[0882] The effect of AD-84788 on urinary oxalate excretion was further determined by administering wild-type mice (n=6), Agxt mice (n=6) or Grhpr mice (n=6) a single 10 mg/kg dose of AD-84788 diluted in sterile 0.9% sodium chloride on Day 0. Twenty-four-hour urine samples were collected on days 7-10 post-dose. Baseline twenty-four-hour urine collections were also performed prior to the administration of AD-84788

[0883] The effect of multi-dose administration of AD-84788 on urinary oxalate excretion and was also determined Agxt mice (n=6). Agxt deficient mice were administered a 10 mg/kg dose of AD-84788 on Days 0, 11, 18, and 25. Twenty-four-hour urines were collected on Days −6, −5, −4, and −3 pre-dose. Twenty-four-hour urines were also collected on Days 7, 8, 9, and 10 post-dose; and on Days 28, 29, 30, and 31 post-dose.

[0884] Following completion of 24-hour urine collections (Day 32 post-dose), tissue was collected to determine inhibition of LDHA protein and activity by enzymatic assays. Animals were fasted for 6 hours and anesthetized with vaporized isoflurane (Fluriso, MWI, Boise ID) prior to tissue procurement. A schematic of this multi-dose study protocol is provided in FIG. 4.

### Analytical Methods

[0885] Urinary oxalate levels were determined by ion chromatography coupled with mass spectroscopy (ICMS), as previously described (Li, et. al. (2016) Biochimica et Biophysica Acta 1862:233). Liver lactate was determined by ICMS (Knight, et. al. (2012). Anal Biochem. 421:121-124), and pyruvate and glyoxylate levels by HPLC (Knight and Holme s (2005) Am J Nephrol 25:171). Prior to lactate, pyruvate and glyoxylate measurements, tissue was extracted in trichloroacetic acid (final 10% v/v).

### Liver LDH Enzyme Assay-Lactic Acid or Glyoxylate Substrates

[0886] Liver LDH enzyme activity was measured by the reduction of NAD to NADH in liver tissue lysates. Briefly, liver samples were weighed, homogenized in lysis buffer (25 mM HEPES, 1% Triton, 1% protease inhibitor) and homogenates were centrifuged to pellet cell debris. The supernantants were recovered, and solutions of NAD and either lactic acid or glyoxylate were added. The samples were placed into a multi-well plate and placed into a plate reader. Absornace readings at 340 nm were collected for 20 minutes at 1 minute intervals. The data was used to calculate LDHA specific activity (nmoles of LDHA activity/min/mg protein).

### Heart and Thigh Skeletal Muscle LDH Enzyme Assay

[0887] Heart and thigh skeletal muscle LDH enzyme activity was also measured using lactic acid as a substrate. Briefly, liver samples were weighed, homogenized in lysis buffer (25 mM HEPES, 1% Triton, 1% protease inhibitor) and homogenates were centrifuged to pellet cell debris. The supernantants were recovered, and solutions of NAD and lactic acid were added. The samples were placed into a multi-well plate and placed into a plate reader. Absornace readings at 340 nm were collected for 20 minutes at 1 minute intervals. The data was used to calculate LDHA specific activity (nmoles of LDHA activity/min/mg protein).

### Results

[0888] The effect and durability of LDHA inhibition on endogenous oxalate excretion was also assessed and, as depicted in FIG. 5, compared to untreated control animals, administration of a single 0.3 mg/kg 1 mg/kg, 3 mg/kg or 10 mg/kg dose of AD-84788 decreased urinary oxalate excretion for at least 4 weeks post-dose of AD-84788.

[0889] Furthermore, as depicted in FIG. 6, four weeks after the administration of a single 10 mg/kg dose of siRNA, the level of endogenous oxalate excreted in the urine of Agxt deficient mice was significantly reduced by about 75%+3% compared to baseline, and the level of endogenous oxalate excretion in the urine of Grhpr deficient mice was reduced by about 32%=5%

[0890] As depicted in FIG. 7, at one week following a single 10 mg/kg dose of AD-84788, the level of endogenous oxalate excreted in the urine of Agxt deficient mice was decreased. After the administration of four 10 mg/kg doses of AD-84788, endogenous oxalate levels excreted in the urine of Agxt deficient mice were unexpectedly reduced by about 75+3% from baseline levels of 120 mg/dl, demonstrating that decreasing the level of Ldha decreases the level of excreted oxalate and, thus, is useful for treating subjects having a kidney stone formation disease, disorder, or condition (e.g., a subject having a non-hyperoxaluria kidney stone formation disease, disorder, or condition).

[0891] The effect of administration of four 10 mg/kg doses of AD-84788 on the levels of Ldha protein was also assessed by measuring the enzymic activity of Ldha present in liver samples from both wild-type and Agxt mice using either lactic acid or glyoxylate as a substrate. FIGS. 8A, 8B, 9A, and 9B demonstrate that, compared to untreated control animals, after the administration of four 10 mg/kg doses of AD-84788 to wild-type mice, significantly decreased liver LDH enzymatic activity as measured by the reduction of NAD to NADH using either lactic acid (FIGS. 8A and 8B) or glyoxylate (FIGS. 9A and 9B).

[0892] Similarly, in Agxt mice, compared to untreated control animals, after the administration of four 10 mg/kg doses of AD-84788 significantly decreased liver LDH enzymatic activity as measured by the reduction of NAD to NADH using either lactic acid (FIGS. 10A and 10B) or glyoxylate (FIGS. 11A and 11B).

[0893] Lactate dehydrogenase is present throughout the body and the use of iRNA agents targeting LDHA may have systemic effects. However, as depicted in FIGS. 12A-12D, the reduction in LDH enzymatic activity by administration of AD-84788 (i.e., an iRNA agent conjugated to a GalNAc ligand which targets hepatocytes) is specific to the LDH present in the liver. In particular, compared to untreated control animals, administration of four 10 mg/kg doses of AD-84788 to wild-type mice does not significantly reduce either heart (FIGS. 12A and 12B) or skeletal muscle (FIGS. 12C and 12D) LDH enzymatic activity using lactic acid (FIGS. 8A and 8B) as a substrate.

[0894] Furthermore, the reduction of Ldha levels by administration of four 10 mg/kg doses of AD-84788 to either wild-type of Agxt deficient mice did not increase liver or muscle lactate levels. In fact, in both wild-type (FIG. 13A) and Agxt deficient mice (FIG. 14A), lactate levels were significantly decreased in animals administered multiple doses of AD-84788. In addition, as depicted in FIGS. 13B and 14B, liver pyruvate levels were higher and, as depicted in FIGS. 15A and 15B, liver glyoxylate levels were unchanged in wild-type mice and Agxt deficient mice administered multiple doses of AD-84788. Further despite reduction of liver lactate levels in both the wild-type and Agxt deficient mice after the administration of four 10 mg/kg doses of AD-84788, plasma levels of lactate in both the wild-type and Agxt deficient mice were unaffected (FIGS. 17A and 17B). Notably, during the entirety of the study, the behavior and weights (see FIGS. 16A and 16B) of the treated and untreated control mice remained constant indicating that there were no significant metabolic changes in the animals, thus, demonstrating the safety of specific inhibition of liver Ldha using an iRNA agent such as AD-84788.

[0895] In summary, liver-specific knockdown of LDHA using the dsRNA agents of the invention resulted in profound oxalate lowering in both healthy and diseased animals. Additionally, substantial changes were seen in the levels of lactate, pyruvate and TCA Cycle organic acids in the livers of treated animals, consistent with the role of LDH in carbohydrate metabolism (see, e.g., FIG. 1B). However, none of the treated mice showed signs of behavioral and/or weight changes indicating that there were no significant metabolic changes in the animals. Accordingly, the data presented herein demonstrates the utility of the compositions and methods provided herein to decrease oxalate synthesis in subjects, such as subjects having a kidney stone formation disease, disorder, or condition (e.g., a subject having a non-hyperoxaluria kidney stone formation disease, disorder, or condition) and permit the determination of a suitable decrease in the level of oxalate that is beneficial to such subjects without resulting in adverse effects or safety concerns.

1. A double stranded ribonucleic acid (dsRNA) agent for inhibiting expression of lactic acid dehydrogenase A (LDHA) in a cell, wherein the dsRNA agent comprises a sense strand and an antisense strand forming a double stranded region,
wherein the antisense strand comprises at least 15 contiguous nucleotides differing by no more than 3 nucleotides from any one of the antisense sequences listed in any one of Tables 2-5,
wherein all of the nucleotides of the sense strand and all of the nucleotides of the antisense comprise a nucleotide modification, and
wherein a ligand comprising one or more N-acetylgalactosamine (GalNAc) derivatives attached through a monovalent, bivalent, or trivalent branched linker is conjugated to at least one strand of the agent.

2. (canceled)

3. (canceled)

4. The dsRNA agent of claim 1, wherein at least one of the nucleotide modifications is selected from the group consisting of a deoxy-nucleotide modification, a 3′-terminal deoxy-thymine (dT) nucleotide modification, a 2′-O-methyl nucleotide modification, a 2′-fluoro nucleotide modification, a 2′-deoxy nucleotide modification, a locked nucleotide modification, an unlocked nucleotide modification, a conformationally restricted nucleotide modification, a constrained ethyl nucleotide modification, an abasic nucleotide modification, a 2′-amino nucleotide modification, a 2′-O-allyl nucleotide modification, 2′-C-alkyl nucleotide modification, 2′-hydroxly nucleotide modification, a 2′-methoxyethyl nucleotide modification, a 2′-O-alkyl nucleotide modification, a morpholino nucleotide modification, a phosphoramidate modification, a non-natural base comprising nucleotide modification, a tetrahydropyran nucleotide modification, a 1,5-anhydrohexitol nucleotide modification, a cyclohexenyl nucleotide modification, a nucleotide comprising a phosphorothioate group modification, a nucleotide comprising a methylphosphonate group modification, a nucleotide comprising a 5′-phosphate modification, a nucleotide comprising a 5′-phosphate mimic modification, a glycol nucleotide modification, and a 2-O—(N-methylacetamide) nucleotide modification, and combinations thereof.

5. The dsRNA agent of claim 1, wherein the nucleotide modifications are selected from the group consisting of a 2′-O-methyl nucleotide modification and a 2′-fluoro nucleotide modification.

6. The dsRNA agent of claim 1, wherein at least one strand comprises a 3′ overhang of at least 1 nucleotide.

7. The dsRNA agent of claim 1, wherein the agent further comprises at least one phosphorothioate or methylphosphonate internucleotide linkage.

8. The dsRNA agent of claim 7, wherein the sense strand comprises at least one phosphorothioate internucleotide linkage at the 3′terminus.

9. The dsRNA agent of claim 7, wherein the antisense strand comprises at least one phosphorothioate internucleotide linkage at the 3′terminus

10. The dsRNA agent of claim 1, wherein the ligand is conjugated to the 3′ end of the sense strand of the dsRNA agent.

11. (canceled)

12. The dsRNA agent of claim 1, wherein said double stranded region comprises 20 nucleotides.

13.-16. (canceled)

17. A cell containing the dsRNA agent of claim 1.

18. A pharmaceutical composition for inhibiting expression of a lactic acid dehydrogenase A (LDHA) gene comprising the dsRNA agent of claim 1.

19. (canceled)

20. (canceled)

21. A method of inhibiting lactic acid dehydrogenase A (LDHA) expression in a cell, the method comprising contacting the cell with the dsRNA agent of claim 1, thereby inhibiting expression of LDHA in the cell.

22. The method of claim 21, wherein the cell is within a subject.

23. The method of claim 22, wherein the subject is a human.

24. (canceled)

25. The method of claim 23, wherein the human subject suffers from an oxalate pathway-associated disease, disorder, or condition.

26. The method of claim 25, wherein the oxalate pathway-associated disease, disorder, or condition is an oxalate-associated disease, disorder, or condition, or a lactate dehydrogenase-associated disease, disorder, or condition.

27. The method of claim 26, wherein the oxalate-associated disease, disorder, or condition is a kidney stone formation disease, disorder, or condition, or a calcium oxalate tissue deposition disease, disorder, or condition.

28. The method of claim 26, wherein the lactate dehydrogenase-associated disease, disorder, or condition is selected from the group consisting of cancer, fatty liver (steatosis), nonalcoholic steatohepatitis (NASH), cirrhosis of the liver, accumulation of fat in the liver, inflammation of the liver, hepatocellular necrosis, liver fibrosis, and nonalcoholic fatty liver disease (NAFLD).

29. The method of claim 21, wherein the cell is a liver cell.

30. A method of treating a subject having a disorder that would benefit from a reduction in LDHA expression, the method comprising
administering to the subject a therapeutically effective amount of the dsRNA agent of claim 1, thereby treating the subject.

The application's sequence listing, which the Patent Office published only in electronic form, follows.

SEQUENCE LISTING (4150 sequences)

SEQ ID NO: 1 - DNA, 2052 bp, Homo sapiens
  source 1..2052: mol_type = unassigned DNA
gtctgccggtcggttgtctggctgcgcgcgccacccgggcctctccagtgccccgcctggctcggcatccacccccagcccgactcacacgtgggttcccgcacgtccgccggccccccccgctgacgtcagcatagctgttccacttaaggcccctcccgcgcccagctcagagtgctgcagccgctgccgccgattccggatctcattgccacgcgcccccgacgaccgcccgacgtgcattcccgattccttttggttccaagtccaatatggcaactctaaaggatcagctgatttataatcttctaaaggaagaacagaccccccagaataagattacagttgttggggttggtgctgttggcatggcctgtgccatcagtatcttaatgaaggacttggcagatgaacttgctcttgttgatgtcatcgaagacaaattgaagggagagatgatggatctccaacatggcagccttttccttagaacaccaaagattgtctctggcaaagtggatatcttgacctacgtggcttggaagataagtggttttcccaaaaaccgtgttattggaagcggttgcaatctggattcagcccgattccgttacctaatgggggaaaggctgggagttcacccattaagctgtcatgggtgggtccttggggaacatggagattccagtgtgcctgtatggagtggaatgaatgttgctggtgtctctctgaagactctgcacccagatttagggactgataaagataaggaacagtggaaagaggttcacaagcaggtggttgagagtgcttatgaggtgatcaaactcaaaggctacacatcctgggctattggactctctgtagcagatttggcagagagtataatgaagaatcttaggcgggtgcacccagtttccaccatgattaagggtctttacggaataaaggatgatgtcttccttagtgttccttgcattttgggacagaatggaatctcagaccttgtgaaggtgactctgacttctgaggaagaggcccgtttgaagaagagtgcagatacactttgggggatccaaaaggagctgcaattttaaagtcttctgatgtcatatcatttcactgtctaggctacaacaggattctaggtggaggttgtgcatgttgtcctttttatctgatctgtgattaaagcagtaatattttaagatggactgggaaaaacatcaactcctgaagttagaaataagaatggtttgtaaaatccacagctatatcctgatgctggatggtattaatcttgtgtagtcttcaactggttagtgtgaaatagttctgccacctctgacgcaccactgccaatgctgtacgtactgcatttgccccttgagccaggtggatgtttaccgtgtgttatataacttcctggctccttcactgaacatgcctagtccaacattttttcccagtgagtcacatcctgggatccagtgtataaatccaatatcatgtcttgtgcataattcttccaaaggatcttattttgtgaactatatcagtagtgtacattaccatataatgtaaaaagatctacatacaaacaatgcaaccaactatccaagtgttataccaactaaaacccccaataaaccttgaacagtgactactttggttaattcattatattaagatataaagtcataaagctgctagttattatattaatttggaaatattaggctattcttgggcaaccctgcaacgattttttctaacagggatattattgactaatagcagaggatgtaatagtcaactgagttgtattggtaccacttccattgtaagtcccaaagtattatatatttgataataatgctaatcataattggaaagtaacattctatatgtaaatgtaaaatttatttgccaactgaatataggcaatgatagtgtgtcactatagggaacacagatttttgagatcttgtcctctggaagctggtaacaattaaaaacaatcttaaggcagggaaaaaaaaaaaaaaaaaa

SEQ ID NO: 2 - DNA, 2052 bp, Homo sapiens
  source 1..2052: mol_type = unassigned DNA
ttttttttttttttttttccctgccttaagattgtttttaattgttaccagcttccagaggacaagatctcaaaaatctgtgttccctatagtgacacactatcattgcctatattcagttggcaaataaattttacatttacatatagaatgttactttccaattatgattagcattattatcaaatatataatactttgggacttacaatggaagtggtaccaatacaactcagttgactattacatcctctgctattagtcaataatatccctgttagaaaaaatcgttgcagggttgcccaagaatagcctaatatttccaaattaatataataactagcagctttatgactttatatcttaatataatgaattaaccaaagtagtcactgttcaaggtttattgggggttttagttggtataacacttggatagttggttgcattgtttgtatgtagatctttttacattatatggtaatgtacactactgatatagttcacaaaataagatcctttggaagaattatgcacaagacatgatattggatttatacactggatcccaggatgtgactcactgggaaaaaatgttggactaggcatgttcagtgaaggagccaggaagttatataacacacggtaaacatccacctggctcaaggggcaaatgcagtacgtacagcattggcagtggtgcgtcagaggtggcagaactatttcacactaaccagttgaagactacacaagattaataccatccagcatcaggatatagctgtggattttacaaaccattcttatttctaacttcaggagttgatgtttttcccagtccatcttaaaatattactgctttaatcacagatcagataaaaaggacaacatgcacaacctccacctagaatcctgttgtagcctagacagtgaaatgatatgacatcagaagactttaaaattgcagctccttttggatcccccaaagtgtatctgcactcttcttcaaacgggcctcttcctcagaagtcagagtcaccttcacaaggtctgagattccattctgtcccaaaatgcaaggaacactaaggaagacatcatcctttattccgtaaagacccttaatcatggtggaaactgggtgcacccgcctaagattcttcattatactctctgccaaatctgctacagagagtccaatagcccaggatgtgtagcctttgagtttgatcacctcataagcactctcaaccacctgcttgtgaacctctttccactgttccttatctttatcagtccctaaatctgggtgcagagtcttcagagagacaccagcaacattcattccactccatacaggcacactggaatctccatgttccccaaggacccacccatgacagcttaatgggtgaactcccagcctttcccccattaggtaacggaatcgggctgaatccagattgcaaccgcttccaataacacggtttttgggaaaaccacttatcttccaagccacgtaggtcaagatatccactttgccagagacaatctttggtgttctaaggaaaaggctgccatgttggagatccatcatctctcccttcaatttgtcttcgatgacatcaacaagagcaagttcatctgccaagtccttcattaagatactgatggcacaggccatgccaacagcaccaaccccaacaactgtaatcttattctggggggtctgttcttcctttagaagattataaatcagctgatcctttagagttgccatattggacttggaaccaaaaggaatcgggaatgcacgtcgggcggtcgtcgggggcgcgtggcaatgagatccggaatcggcggcagcggctgcagcactctgagctgggcgcgggaggggccttaagtggaacagctatgctgacgtcagcggggggggccggcggacgtgcgggaacccacgtgtgagtcgggctgggggtggatgccgagccaggcggggcactggagaggcccgggtggcgcgcgcagccagacaaccgaccggcagac

SEQ ID NO: 3 - DNA, 2323 bp, Homo sapiens
  source 1..2323: mol_type = unassigned DNA
ttgggcggggcgtaaaagccgggcgttcggaggacccagcaattagtctgatttccgcccacctttccgagcgggaaggagagccacaaagcgcgcatgcgcgcggatcaccgcaggctcctgtgccttgggcttgagctttgtggcagttaatggcttttctgcacgtatctctggtgtttacttgagaagcctggctgtgtccttgctgtaggagccggagtagctcagagtgatcttgtctgaggaaaggccagccccacttggggttaataaaccgcgatgggtgaaccctcaggaggctatacttacacccaaacgtcgatattccttttccacgctaagattccttttggttccaagtccaatatggcaactctaaaggatcagctgatttataatcttctaaaggaagaacagaccccccagaataagattacagttgttggggttggtgctgttggcatggcctgtgccatcagtatcttaatgaaggacttggcagatgaacttgctcttgttgatgtcatcgaagacaaattgaagggagagatgatggatctccaacatggcagccttttccttagaacaccaaagattgtctctggcaaagactataatgtaactgcaaactccaagctggtcattatcacggctggggcacgtcagcaagagggagaaagccgtcttaatttggtccagcgtaacgtgaacatctttaaattcatcattcctaatgttgtaaaatacagcccgaactgcaagttgcttattgtttcaaatccagtggatatcttgacctacgtggcttggaagataagtggttttcccaaaaaccgtgttattggaagcggttgcaatctggattcagcccgattccgttacctaatgggggaaaggctgggagttcacccattaagctgtcatgggtgggtccttggggaacatggagattccagtgtgcctgtatggagtggaatgaatgttgctggtgtctctctgaagactctgcacccagatttagggactgataaagataaggaacagtggaaagaggttcacaagcaggtggttgagagtgcttatgaggtgatcaaactcaaaggctacacatcctgggctattggactctctgtagcagatttggcagagagtataatgaagaatcttaggcgggtgcacccagtttccaccatgattaagggtctttacggaataaaggatgatgtcttccttagtgttccttgcattttgggacagaatggaatctcagaccttgtgaaggtgactctgacttctgaggaagaggcccgtttgaagaagagtgcagatacactttgggggatccaaaaggagctgcaattttaaagtcttctgatgtcatatcatttcactgtctaggctacaacaggattctaggtggaggttgtgcatgttgtcctttttatctgatctgtgattaaagcagtaatattttaagatggactgggaaaaacatcaactcctgaagttagaaataagaatggtttgtaaaatccacagctatatcctgatgctggatggtattaatcttgtgtagtcttcaactggttagtgtgaaatagttctgccacctctgacgcaccactgccaatgctgtacgtactgcatttgccccttgagccaggtggatgtttaccgtgtgttatataacttcctggctccttcactgaacatgcctagtccaacattttttcccagtgagtcacatcctgggatccagtgtataaatccaatatcatgtcttgtgcataattcttccaaaggatcttattttgtgaactatatcagtagtgtacattaccatataatgtaaaaagatctacatacaaacaatgcaaccaactatccaagtgttataccaactaaaacccccaataaaccttgaacagtgactactttggttaattcattatattaagatataaagtcataaagctgctagttattatattaatttggaaatattaggctattcttgggcaaccctgcaacgattttttctaacagggatattattgactaatagcagaggatgtaatagtcaactgagttgtattggtaccacttccattgtaagtcccaaagtattatatatttgataataatgctaatcataattggaaagtaacattctatatgtaaatgtaaaatttatttgccaactgaatataggcaatgatagtgtgtcactatagggaacacagatttttgagatcttgtcctctggaagctggtaacaattaaaaacaatcttaaggcagggaaaaaaaaaaaaaaaaaa

SEQ ID NO: 4 - DNA, 2323 bp, Homo sapiens
  source 1..2323: mol_type = unassigned DNA
ttttttttttttttttttccctgccttaagattgtttttaattgttaccagcttccagaggacaagatctcaaaaatctgtgttccctatagtgacacactatcattgcctatattcagttggcaaataaattttacatttacatatagaatgttactttccaattatgattagcattattatcaaatatataatactttgggacttacaatggaagtggtaccaatacaactcagttgactattacatcctctgctattagtcaataatatccctgttagaaaaaatcgttgcagggttgcccaagaatagcctaatatttccaaattaatataataactagcagctttatgactttatatcttaatataatgaattaaccaaagtagtcactgttcaaggtttattgggggttttagttggtataacacttggatagttggttgcattgtttgtatgtagatctttttacattatatggtaatgtacactactgatatagttcacaaaataagatcctttggaagaattatgcacaagacatgatattggatttatacactggatcccaggatgtgactcactgggaaaaaatgttggactaggcatgttcagtgaaggagccaggaagttatataacacacggtaaacatccacctggctcaaggggcaaatgcagtacgtacagcattggcagtggtgcgtcagaggtggcagaactatttcacactaaccagttgaagactacacaagattaataccatccagcatcaggatatagctgtggattttacaaaccattcttatttctaacttcaggagttgatgtttttcccagtccatcttaaaatattactgctttaatcacagatcagataaaaaggacaacatgcacaacctccacctagaatcctgttgtagcctagacagtgaaatgatatgacatcagaagactttaaaattgcagctccttttggatcccccaaagtgtatctgcactcttcttcaaacgggcctcttcctcagaagtcagagtcaccttcacaaggtctgagattccattctgtcccaaaatgcaaggaacactaaggaagacatcatcctttattccgtaaagacccttaatcatggtggaaactgggtgcacccgcctaagattcttcattatactctctgccaaatctgctacagagagtccaatagcccaggatgtgtagcctttgagtttgatcacctcataagcactctcaaccacctgcttgtgaacctctttccactgttccttatctttatcagtccctaaatctgggtgcagagtcttcagagagacaccagcaacattcattccactccatacaggcacactggaatctccatgttccccaaggacccacccatgacagcttaatgggtgaactcccagcctttcccccattaggtaacggaatcgggctgaatccagattgcaaccgcttccaataacacggtttttgggaaaaccacttatcttccaagccacgtaggtcaagatatccactggatttgaaacaataagcaacttgcagttcgggctgtattttacaacattaggaatgatgaatttaaagatgttcacgttacgctggaccaaattaagacggctttctccctcttgctgacgtgccccagccgtgataatgaccagcttggagtttgcagttacattatagtctttgccagagacaatctttggtgttctaaggaaaaggctgccatgttggagatccatcatctctcccttcaatttgtcttcgatgacatcaacaagagcaagttcatctgccaagtccttcattaagatactgatggcacaggccatgccaacagcaccaaccccaacaactgtaatcttattctggggggtctgttcttcctttagaagattataaatcagctgatcctttagagttgccatattggacttggaaccaaaaggaatcttagcgtggaaaaggaatatcgacgtttgggtgtaagtatagcctcctgagggttcacccatcgcggtttattaaccccaagtggggctggcctttcctcagacaagatcactctgagctactccggctcctacagcaaggacacagccaggcttctcaagtaaacaccagagatacgtgcagaaaagccattaactgccacaaagctcaagcccaaggcacaggagcctgcggtgatccgcgcgcatgcgcgctttgtggctctccttcccgctcggaaaggtgggcggaaatcagactaattgctgggtcctccgaacgcccggcttttacgccccgcccaa

SEQ ID NO: 5 - DNA, 1957 bp, Homo sapiens
  source 1..1957: mol_type = unassigned DNA
gtctgccggtcggttgtctggctgcgcgcgccacccgggcctctccagtgccccgcctggctcggcatccacccccagcccgactcacacgtgggttcccgcacgtccgccggccccccccgctgacgtcagcatagctgttccacttaaggcccctcccgcgcccagctcagagtgctgcagccgctgccgccgattccggatctcattgccacgcgcccccgacgaccgcccgacgtgcattcccgattccttttggttccaagtccaatatggcaactctaaaggatcagctgatttataatcttctaaaggaagaacagaccccccagaataagattacagttgttggggttggtgctgttggcatggcctgtgccatcagtatcttaatgaaggacttggcagatgaacttgctcttgttgatgtcatcgaagacaaattgaagggagagatgatggatctccaacatggcagccttttccttagaacaccaaagattgtctctggcaaagactataatgtaactgcaaactccaagctggtcattatcacggctggggcacgtcagcaagagggagaaagccgtcttaatttggtccagcgtaacgtgaacatctttaaattcatcattcctaatgttgtaaaatacagcccgaactgcaagttgcttattgtttcaaatccagtggatatcttgacctacgtggcttggaagataagtggttttcccaaaaaccgtgttattggaagcggttgcaatctggattcagcccgattccgttacctaatgggggaaaggctgggagttcacccattaagctgtcatgggtgggtccttggggaacatggagattccagtgtgcctgtatggagtggaatgaatgttgctggtgtctctctgaagactctgcacccagatttagggactgataaagataaggaacagtggaaagagtgcagatacactttgggggatccaaaaggagctgcaattttaaagtcttctgatgtcatatcatttcactgtctaggctacaacaggattctaggtggaggttgtgcatgttgtcctttttatctgatctgtgattaaagcagtaatattttaagatggactgggaaaaacatcaactcctgaagttagaaataagaatggtttgtaaaatccacagctatatcctgatgctggatggtattaatcttgtgtagtcttcaactggttagtgtgaaatagttctgccacctctgacgcaccactgccaatgctgtacgtactgcatttgccccttgagccaggtggatgtttaccgtgtgttatataacttcctggctccttcactgaacatgcctagtccaacattttttcccagtgagtcacatcctgggatccagtgtataaatccaatatcatgtcttgtgcataattcttccaaaggatcttattttgtgaactatatcagtagtgtacattaccatataatgtaaaaagatctacatacaaacaatgcaaccaactatccaagtgttataccaactaaaacccccaataaaccttgaacagtgactactttggttaattcattatattaagatataaagtcataaagctgctagttattatattaatttggaaatattaggctattcttgggcaaccctgcaacgattttttctaacagggatattattgactaatagcagaggatgtaatagtcaactgagttgtattggtaccacttccattgtaagtcccaaagtattatatatttgataataatgctaatcataattggaaagtaacattctatatgtaaatgtaaaatttatttgccaactgaatataggcaatgatagtgtgtcactatagggaacacagatttttgagatcttgtcctctggaagctggtaacaattaaaaacaatcttaaggcagggaaaaaaaaaaaaaaaaaa

SEQ ID NO: 6 - DNA, 1957 bp, Homo sapiens
  source 1..1957: mol_type = unassigned DNA
ttttttttttttttttttccctgccttaagattgtttttaattgttaccagcttccagaggacaagatctcaaaaatctgtgttccctatagtgacacactatcattgcctatattcagttggcaaataaattttacatttacatatagaatgttactttccaattatgattagcattattatcaaatatataatactttgggacttacaatggaagtggtaccaatacaactcagttgactattacatcctctgctattagtcaataatatccctgttagaaaaaatcgttgcagggttgcccaagaatagcctaatatttccaaattaatataataactagcagctttatgactttatatcttaatataatgaattaaccaaagtagtcactgttcaaggtttattgggggttttagttggtataacacttggatagttggttgcattgtttgtatgtagatctttttacattatatggtaatgtacactactgatatagttcacaaaataagatcctttggaagaattatgcacaagacatgatattggatttatacactggatcccaggatgtgactcactgggaaaaaatgttggactaggcatgttcagtgaaggagccaggaagttatataacacacggtaaacatccacctggctcaaggggcaaatgcagtacgtacagcattggcagtggtgcgtcagaggtggcagaactatttcacactaaccagttgaagactacacaagattaataccatccagcatcaggatatagctgtggattttacaaaccattcttatttctaacttcaggagttgatgtttttcccagtccatcttaaaatattactgctttaatcacagatcagataaaaaggacaacatgcacaacctccacctagaatcctgttgtagcctagacagtgaaatgatatgacatcagaagactttaaaattgcagctccttttggatcccccaaagtgtatctgcactctttccactgttccttatctttatcagtccctaaatctgggtgcagagtcttcagagagacaccagcaacattcattccactccatacaggcacactggaatctccatgttccccaaggacccacccatgacagcttaatgggtgaactcccagcctttcccccattaggtaacggaatcgggctgaatccagattgcaaccgcttccaataacacggtttttgggaaaaccacttatcttccaagccacgtaggtcaagatatccactggatttgaaacaataagcaacttgcagttcgggctgtattttacaacattaggaatgatgaatttaaagatgttcacgttacgctggaccaaattaagacggctttctccctcttgctgacgtgccccagccgtgataatgaccagcttggagtttgcagttacattatagtctttgccagagacaatctttggtgttctaaggaaaaggctgccatgttggagatccatcatctctcccttcaatttgtcttcgatgacatcaacaagagcaagttcatctgccaagtccttcattaagatactgatggcacaggccatgccaacagcaccaaccccaacaactgtaatcttattctggggggtctgttcttcctttagaagattataaatcagctgatcctttagagttgccatattggacttggaaccaaaaggaatcgggaatgcacgtcgggcggtcgtcgggggcgcgtggcaatgagatccggaatcggcggcagcggctgcagcactctgagctgggcgcgggaggggccttaagtggaacagctatgctgacgtcagcggggggggccggcggacgtgcgggaacccacgtgtgagtcgggctgggggtggatgccgagccaggcggggcactggagaggcccgggtggcgcgcgcagccagacaaccgaccggcagac

SEQ ID NO: 7 - DNA, 2102 bp, Homo sapiens
  source 1..2102: mol_type = unassigned DNA
gtctgccggtcggttgtctggctgcgcgcgccacccgggcctctccagtgccccgcctggctcggcatccacccccagcccgactcacacgtgggttcccgcacgtccgccggccccccccgctgacgtcagcatagctgttccacttaaggcccctcccgcgcccagctcagagtgctgcagccgctgccgccgattccggatctcattgccacgcgcccccgacgaccgcccgacgtgcattcccgattccttttggttccaagtccaatatggcaactctaaaggatcagctgatttataatcttctaaaggaagaacagaccccccagaataagattacagttgttggggttggtgctgttggcatggcctgtgccatcagtatcttaatgaaggacttggcagatgaacttgctcttgttgatgtcatcgaagacaaattgaagggagagatgatggatctccaacatggcagccttttccttagaacaccaaagattgtctctggcaaagactataatgtaactgcaaactccaagctggtcattatcacggctggggcacgtcagcaagagggagaaagccgtcttaatttggtccagcgtaacgtgaacatctttaaattcatcattcctaatgttgtaaaatacagcccgaactgcaagttgcttattgtttcaaatccagtggatatcttgacctacgtggcttggaagataagtggttttcccaaaaaccgtgttattggaagcggttgcaatctggattcagcccgattccgttacctaatgggggaaaggctgggagttcacccattaagctgtcatgggtgggtccttggggaacatggagattccagtgtgcctgtatggagtggaatgaatgttgctggtgtctctctgaagactctgcacccagatttagggactgataaagataaggaacagtggaaagaggttcacaagcaggtggttgagagggtctttacggaataaaggatgatgtcttccttagtgttccttgcattttgggacagaatggaatctcagaccttgtgaaggtgactctgacttctgaggaagaggcccgtttgaagaagagtgcagatacactttgggggatccaaaaggagctgcaattttaaagtcttctgatgtcatatcatttcactgtctaggctacaacaggattctaggtggaggttgtgcatgttgtcctttttatctgatctgtgattaaagcagtaatattttaagatggactgggaaaaacatcaactcctgaagttagaaataagaatggtttgtaaaatccacagctatatcctgatgctggatggtattaatcttgtgtagtcttcaactggttagtgtgaaatagttctgccacctctgacgcaccactgccaatgctgtacgtactgcatttgccccttgagccaggtggatgtttaccgtgtgttatataacttcctggctccttcactgaacatgcctagtccaacattttttcccagtgagtcacatcctgggatccagtgtataaatccaatatcatgtcttgtgcataattcttccaaaggatcttattttgtgaactatatcagtagtgtacattaccatataatgtaaaaagatctacatacaaacaatgcaaccaactatccaagtgttataccaactaaaacccccaataaaccttgaacagtgactactttggttaattcattatattaagatataaagtcataaagctgctagttattatattaatttggaaatattaggctattcttgggcaaccctgcaacgattttttctaacagggatattattgactaatagcagaggatgtaatagtcaactgagttgtattggtaccacttccattgtaagtcccaaagtattatatatttgataataatgctaatcataattggaaagtaacattctatatgtaaatgtaaaatttatttgccaactgaatataggcaatgatagtgtgtcactatagggaacacagatttttgagatcttgtcctctggaagctggtaacaattaaaaacaatcttaaggcagggaaaaaaaaaaaaaaaaaa

SEQ ID NO: 8 - DNA, 2102 bp, Homo sapiens
  source 1..2102: mol_type = unassigned DNA
ttttttttttttttttttccctgccttaagattgtttttaattgttaccagcttccagaggacaagatctcaaaaatctgtgttccctatagtgacacactatcattgcctatattcagttggcaaataaattttacatttacatatagaatgttactttccaattatgattagcattattatcaaatatataatactttgggacttacaatggaagtggtaccaatacaactcagttgactattacatcctctgctattagtcaataatatccctgttagaaaaaatcgttgcagggttgcccaagaatagcctaatatttccaaattaatataataactagcagctttatgactttatatcttaatataatgaattaaccaaagtagtcactgttcaaggtttattgggggttttagttggtataacacttggatagttggttgcattgtttgtatgtagatctttttacattatatggtaatgtacactactgatatagttcacaaaataagatcctttggaagaattatgcacaagacatgatattggatttatacactggatcccaggatgtgactcactgggaaaaaatgttggactaggcatgttcagtgaaggagccaggaagttatataacacacggtaaacatccacctggctcaaggggcaaatgcagtacgtacagcattggcagtggtgcgtcagaggtggcagaactatttcacactaaccagttgaagactacacaagattaataccatccagcatcaggatatagctgtggattttacaaaccattcttatttctaacttcaggagttgatgtttttcccagtccatcttaaaatattactgctttaatcacagatcagataaaaaggacaacatgcacaacctccacctagaatcctgttgtagcctagacagtgaaatgatatgacatcagaagactttaaaattgcagctccttttggatcccccaaagtgtatctgcactcttcttcaaacgggcctcttcctcagaagtcagagtcaccttcacaaggtctgagattccattctgtcccaaaatgcaaggaacactaaggaagacatcatcctttattccgtaaagaccctctcaaccacctgcttgtgaacctctttccactgttccttatctttatcagtccctaaatctgggtgcagagtcttcagagagacaccagcaacattcattccactccatacaggcacactggaatctccatgttccccaaggacccacccatgacagcttaatgggtgaactcccagcctttcccccattaggtaacggaatcgggctgaatccagattgcaaccgcttccaataacacggtttttgggaaaaccacttatcttccaagccacgtaggtcaagatatccactggatttgaaacaataagcaacttgcagttcgggctgtattttacaacattaggaatgatgaatttaaagatgttcacgttacgctggaccaaattaagacggctttctccctcttgctgacgtgccccagccgtgataatgaccagcttggagtttgcagttacattatagtctttgccagagacaatctttggtgttctaaggaaaaggctgccatgttggagatccatcatctctcccttcaatttgtcttcgatgacatcaacaagagcaagttcatctgccaagtccttcattaagatactgatggcacaggccatgccaacagcaccaaccccaacaactgtaatcttattctggggggtctgttcttcctttagaagattataaatcagctgatcctttagagttgccatattggacttggaaccaaaaggaatcgggaatgcacgtcgggcggtcgtcgggggcgcgtggcaatgagatccggaatcggcggcagcggctgcagcactctgagctgggcgcgggaggggccttaagtggaacagctatgctgacgtcagcggggggggccggcggacgtgcgggaacccacgtgtgagtcgggctgggggtggatgccgagccaggcggggcactggagaggcccgggtggcgcgcgcagccagacaaccgaccggcagac

SEQ ID NO: 9 - DNA, 2226 bp, Homo sapiens
  source 1..2226: mol_type = unassigned DNA
gtctgccggtcggttgtctggctgcgcgcgccacccgggcctctccagtgccccgcctggctcggcatccacccccagcccgactcacacgtgggttcccgcacgtccgccggccccccccgctgacgtcagcatagctgttccacttaaggcccctcccgcgcccagctcagagtgctgcagccgctgccgccgattccggatctcattgccacgcgcccccgacgaccgcccgacgtgcattcccgattccttttggttccaagtccaatatggcaactctaaaggatcagctgatttataatcttctaaaggaagaacagaccccccagaataagattacagttgttggggttggtgctgttggcatggcctgtgccatcagtatcttaatgaaggacttggcagatgaacttgctcttgttgatgtcatcgaagacaaattgaagggagagatgatggatctccaacatggcagccttttccttagaacaccaaagattgtctctggcaaagactataatgtaactgcaaactccaagctggtcattatcacggctggggcacgtcagcaagagggagaaagccgtcttaatttggtccagcgtaacgtgaacatctttaaattcatcattcctaatgttgtaaaatacagcccgaactgcaagttgcttattgtttcaaatccagtggatatcttgacctacgtggcttggaagataagtggttttcccaaaaaccgtgttattggaagcggttgcaatctggattcagcccgattccgttacctaatgggggaaaggctgggagttcacccattaagctgtcatgggtgggtccttggggaacatggagattccagtgtgcctgtatggagtggaatgaatgttgctggtgtctctctgaagactctgcacccagatttagggactgataaagataaggaacagtggaaagaggttcacaagcaggtggttgagagtgcttatgaggtgatcaaactcaaaggctacacatcctgggctattggactctctgtagcagatttggcagagagtataatgaagaatcttaggcgggtgcacccagtttccaccatgattaagggtctttacggaataaaggatgatgtcttccttagtgttccttgcattttgggacagaatggaatctcagaccttgtgaaggtgactctgacttctgaggaagaggcccgtttgaagaagagtgcagatacactttgggggatccaaaaggagctgcaattttaaagtcttctgatgtcatatcatttcactgtctaggctacaacaggattctaggtggaggttgtgcatgttgtcctttttatctgatctgtgattaaagcagtaatattttaagatggactgggaaaaacatcaactcctgaagttagaaataagaatggtttgtaaaatccacagctatatcctgatgctggatggtattaatcttgtgtagtcttcaactggttagtgtgaaatagttctgccacctctgacgcaccactgccaatgctgtacgtactgcatttgccccttgagccaggtggatgtttaccgtgtgttatataacttcctggctccttcactgaacatgcctagtccaacattttttcccagtgagtcacatcctgggatccagtgtataaatccaatatcatgtcttgtgcataattcttccaaaggatcttattttgtgaactatatcagtagtgtacattaccatataatgtaaaaagatctacatacaaacaatgcaaccaactatccaagtgttataccaactaaaacccccaataaaccttgaacagtgactactttggttaattcattatattaagatataaagtcataaagctgctagttattatattaatttggaaatattaggctattcttgggcaaccctgcaacgattttttctaacagggatattattgactaatagcagaggatgtaatagtcaactgagttgtattggtaccacttccattgtaagtcccaaagtattatatatttgataataatgctaatcataattggaaagtaacattctatatgtaaatgtaaaatttatttgccaactgaatataggcaatgatagtgtgtcactatagggaacacagatttttgagatcttgtcctctggaagctggtaacaattaaaaacaatcttaaggcagggaaaaaaaaaaaaaaaaaa

SEQ ID NO: 10 - DNA, 2226 bp, Homo sapiens
  source 1..2226: mol_type = unassigned DNA
ttttttttttttttttttccctgccttaagattgtttttaattgttaccagcttccagaggacaagatctcaaaaatctgtgttccctatagtgacacactatcattgcctatattcagttggcaaataaattttacatttacatatagaatgttactttccaattatgattagcattattatcaaatatataatactttgggacttacaatggaagtggtaccaatacaactcagttgactattacatcctctgctattagtcaataatatccctgttagaaaaaatcgttgcagggttgcccaagaatagcctaatatttccaaattaatataataactagcagctttatgactttatatcttaatataatgaattaaccaaagtagtcactgttcaaggtttattgggggttttagttggtataacacttggatagttggttgcattgtttgtatgtagatctttttacattatatggtaatgtacactactgatatagttcacaaaataagatcctttggaagaattatgcacaagacatgatattggatttatacactggatcccaggatgtgactcactgggaaaaaatgttggactaggcatgttcagtgaaggagccaggaagttatataacacacggtaaacatccacctggctcaaggggcaaatgcagtacgtacagcattggcagtggtgcgtcagaggtggcagaactatttcacactaaccagttgaagactacacaagattaataccatccagcatcaggatatagctgtggattttacaaaccattcttatttctaacttcaggagttgatgtttttcccagtccatcttaaaatattactgctttaatcacagatcagataaaaaggacaacatgcacaacctccacctagaatcctgttgtagcctagacagtgaaatgatatgacatcagaagactttaaaattgcagctccttttggatcccccaaagtgtatctgcactcttcttcaaacgggcctcttcctcagaagtcagagtcaccttcacaaggtctgagattccattctgtcccaaaatgcaaggaacactaaggaagacatcatcctttattccgtaaagacccttaatcatggtggaaactgggtgcacccgcctaagattcttcattatactctctgccaaatctgctacagagagtccaatagcccaggatgtgtagcctttgagtttgatcacctcataagcactctcaaccacctgcttgtgaacctctttccactgttccttatctttatcagtccctaaatctgggtgcagagtcttcagagagacaccagcaacattcattccactccatacaggcacactggaatctccatgttccccaaggacccacccatgacagcttaatgggtgaactcccagcctttcccccattaggtaacggaatcgggctgaatccagattgcaaccgcttccaataacacggtttttgggaaaaccacttatcttccaagccacgtaggtcaagatatccactggatttgaaacaataagcaacttgcagttcgggctgtattttacaacattaggaatgatgaatttaaagatgttcacgttacgctggaccaaattaagacggctttctccctcttgctgacgtgccccagccgtgataatgaccagcttggagtttgcagttacattatagtctttgccagagacaatctttggtgttctaaggaaaaggctgccatgttggagatccatcatctctcccttcaatttgtcttcgatgacatcaacaagagcaagttcatctgccaagtccttcattaagatactgatggcacaggccatgccaacagcaccaaccccaacaactgtaatcttattctggggggtctgttcttcctttagaagattataaatcagctgatcctttagagttgccatattggacttggaaccaaaaggaatcgggaatgcacgtcgggcggtcgtcgggggcgcgtggcaatgagatccggaatcggcggcagcggctgcagcactctgagctgggcgcgggaggggccttaagtggaacagctatgctgacgtcagcggggggggccggcggacgtgcgggaacccacgtgtgagtcgggctgggggtggatgccgagccaggcggggcactggagaggcccgggtggcgcgcgcagccagacaaccgaccggcagac

SEQ ID NO: 11 - DNA, 1854 bp, Mus musculus
  source 1..1854: mol_type = unassigned DNA
gggttcttgcgggggtgggggggttaggaaggaagcttgcgcgtgcgcaggcttaagcacgttgctatgccttggggtcgcaccttgtggccgttattggcgccctctgctcttgatttttggtacttcctggagcaacttggcgctctacttgctgtagggctctgggtgatgggagaagagcgggagggcagctttctaaccatataagaggagataccatccccttttggggttcatcaagatgagtaagtcctcaggcggctacacgtacacggagacctcggtattatttttccatttcaaggtctcaaaagattcaaagtccaagatggcaaccctcaaggaccagctgattgtgaatcttcttaaggaagagcaggctccccagaacaagattacagttgttggggttggtgctgttggcatggcttgtgccatcagtatcttaatgaaggacttggcggatgagcttgcccttgttgacgtcatggaagacaaactcaagggcgagatgatggatctccagcatggcagcctcttccttaaaacaccaaaaattgtctccagcaaagactactgtgtaactgcgaactccaagctggtcattatcaccgcgggggcccgtcagcaagagggggagagccggctcaacctggtccagcgaaacgtgaacatcttcaagttcatcattcccaacattgtcaagtacagtccacactgcaagctgctgatcgtctccaatccagtggatatcttgacctacgtggcttggaaaatcagtggctttcccaaaaaccgagtaattggaagtggttgcaatctggattcagcgcggttccgttacctgatgggagagaggctgggggttcacgcgctgagctgtcacggctgggtcctgggagaacatggcgactccagtgtgcctgtgtggagtggtgtgaatgttgccggcgtctccctgaagtctcttaacccagaactgggcactgacgcagacaaggagcagtggaaggaggttcacaagcaggtggtggacagtgcctacgaggtgatcaagctgaaaggttacacatcctgggccattggcctctctgtggcagacttggctgagagcataatgaagaaccttaggcgggtgcatcccatttccaccatgattaagggtctctatggaatcaatgaggatgtcttcctcagtgtcccatgtatcctgggacaaaatggaatctcggatgttgtgaaggtgacactgactcctgaggaagaggcccgcctgaagaagagcgcagacaccctctggggaatccagaaggagctgcagttctaaagtcttccccgtgtcctagcacttcactgtccaggctgcagcagggcttctaggcagaccacacccttctcgtctgagctgtggttagtacagtggtgttgagatggtgtggggaaacatctcactccccacagctctgccctgctgccaagtggtacttgtgtagtggtgacctggttagtgtgacagtcccactgtctctgagacacactgccaactgcaggcttcgattacccctgtgagcctgctgcattgctgccctgcaccaaacatgcctaggccgacgagttcccagttaagtcgtataacctggctccagtgtgtacgtccatgatgcatatcttgtgcataaatgttgtacaggatattttatatattatatgtgtctgtagtgtgcattgcaatattatgtgagatgtaagatctgcatatggatgatggaaccaaccacccaagtgtcatgccaaataaaaccttgaacagtgaaaaaaaaaaaaaaaaaaaaaaaaaaaaaaaaaaaaaaa

SEQ ID NO: 12 - DNA, 1854 bp, Mus musculus
  source 1..1854: mol_type = unassigned DNA
tttttttttttttttttttttttttttttttttttttttcactgttcaaggttttatttggcatgacacttgggtggttggttccatcatccatatgcagatcttacatctcacataatattgcaatgcacactacagacacatataatatataaaatatcctgtacaacatttatgcacaagatatgcatcatggacgtacacactggagccaggttatacgacttaactgggaactcgtcggcctaggcatgtttggtgcagggcagcaatgcagcaggctcacaggggtaatcgaagcctgcagttggcagtgtgtctcagagacagtgggactgtcacactaaccaggtcaccactacacaagtaccacttggcagcagggcagagctgtggggagtgagatgtttccccacaccatctcaacaccactgtactaaccacagctcagacgagaagggtgtggtctgcctagaagccctgctgcagcctggacagtgaagtgctaggacacggggaagactttagaactgcagctccttctggattccccagagggtgtctgcgctcttcttcaggcgggcctcttcctcaggagtcagtgtcaccttcacaacatccgagattccattttgtcccaggatacatgggacactgaggaagacatcctcattgattccatagagacccttaatcatggtggaaatgggatgcacccgcctaaggttcttcattatgctctcagccaagtctgccacagagaggccaatggcccaggatgtgtaacctttcagcttgatcacctcgtaggcactgtccaccacctgcttgtgaacctccttccactgctccttgtctgcgtcagtgcccagttctgggttaagagacttcagggagacgccggcaacattcacaccactccacacaggcacactggagtcgccatgttctcccaggacccagccgtgacagctcagcgcgtgaacccccagcctctctcccatcaggtaacggaaccgcgctgaatccagattgcaaccacttccaattactcggtttttgggaaagccactgattttccaagccacgtaggtcaagatatccactggattggagacgatcagcagcttgcagtgtggactgtacttgacaatgttgggaatgatgaacttgaagatgttcacgtttcgctggaccaggttgagccggctctccccctcttgctgacgggcccccgcggtgataatgaccagcttggagttcgcagttacacagtagtctttgctggagacaatttttggtgttttaaggaagaggctgccatgctggagatccatcatctcgcccttgagtttgtcttccatgacgtcaacaagggcaagctcatccgccaagtccttcattaagatactgatggcacaagccatgccaacagcaccaaccccaacaactgtaatcttgttctggggagcctgctcttccttaagaagattcacaatcagctggtccttgagggttgccatcttggactttgaatcttttgagaccttgaaatggaaaaataataccgaggtctccgtgtacgtgtagccgcctgaggacttactcatcttgatgaaccccaaaaggggatggtatctcctcttatatggttagaaagctgccctcccgctcttctcccatcacccagagccctacagcaagtagagcgccaagttgctccaggaagtaccaaaaatcaagagcagagggcgccaataacggccacaaggtgcgaccccaaggcatagcaacgtgcttaagcctgcgcacgcgcaagcttccttcctaacccccccacccccgcaagaaccc

SEQ ID NO: 13 - DNA, 1661 bp, Mus musculus
  source 1..1661: mol_type = unassigned DNA
ggagcttccatttaaggccccgcccgcgtgctgctctgcgtgctggagccactgtcgccgagctcgggccacgctgcttctcctcgccagtcgcccccccatcgtgcactagcggtctcaaaagattcaaagtccaagatggcaaccctcaaggaccagctgattgtgaatcttcttaaggaagagcaggctccccagaacaagattacagttgttggggttggtgctgttggcatggcttgtgccatcagtatcttaatgaaggacttggcggatgagcttgcccttgttgacgtcatggaagacaaactcaagggcgagatgatggatctccagcatggcagcctcttccttaaaacaccaaaaattgtctccagcaaagactactgtgtaactgcgaactccaagctggtcattatcaccgcgggggcccgtcagcaagagggggagagccggctcaacctggtccagcgaaacgtgaacatcttcaagttcatcattcccaacattgtcaagtacagtccacactgcaagctgctgatcgtctccaatccagtggatatcttgacctacgtggcttggaaaatcagtggctttcccaaaaaccgagtaattggaagtggttgcaatctggattcagcgcggttccgttacctgatgggagagaggctgggggttcacgcgctgagctgtcacggctgggtcctgggagaacatggcgactccagtgtgcctgtgtggagtggtgtgaatgttgccggcgtctccctgaagtctcttaacccagaactgggcactgacgcagacaaggagcagtggaaggaggttcacaagcaggtggtggacagtgcctacgaggtgatcaagctgaaaggttacacatcctgggccattggcctctctgtggcagacttggctgagagcataatgaagaaccttaggcgggtgcatcccatttccaccatgattaagggtctctatggaatcaatgaggatgtcttcctcagtgtcccatgtatcctgggacaaaatggaatctcggatgttgtgaaggtgacactgactcctgaggaagaggcccgcctgaagaagagcgcagacaccctctggggaatccagaaggagctgcagttctaaagtcttccccgtgtcctagcacttcactgtccaggctgcagcagggcttctaggcagaccacacccttctcgtctgagctgtggttagtacagtggtgttgagatggtgtggggaaacatctcactccccacagctctgccctgctgccaagtggtacttgtgtagtggtgacctggttagtgtgacagtcccactgtctctgagacacactgccaactgcaggcttcgattacccctgtgagcctgctgcattgctgccctgcaccaaacatgcctaggccgacgagttcccagttaagtcgtataacctggctccagtgtgtacgtccatgatgcatatcttgtgcataaatgttgtacaggatattttatatattatatgtgtctgtagtgtgcattgcaatattatgtgagatgtaagatctgcatatggatgatggaaccaaccacccaagtgtcatgccaaataaaaccttgaacagtgaaaaaaaaaaaaaaaaaaaaaaaaaaaaaaaaaaaaaaa

SEQ ID NO: 14 - DNA, 1661 bp, Mus musculus
  source 1..1661: mol_type = unassigned DNA
tttttttttttttttttttttttttttttttttttttttcactgttcaaggttttatttggcatgacacttgggtggttggttccatcatccatatgcagatcttacatctcacataatattgcaatgcacactacagacacatataatatataaaatatcctgtacaacatttatgcacaagatatgcatcatggacgtacacactggagccaggttatacgacttaactgggaactcgtcggcctaggcatgtttggtgcagggcagcaatgcagcaggctcacaggggtaatcgaagcctgcagttggcagtgtgtctcagagacagtgggactgtcacactaaccaggtcaccactacacaagtaccacttggcagcagggcagagctgtggggagtgagatgtttccccacaccatctcaacaccactgtactaaccacagctcagacgagaagggtgtggtctgcctagaagccctgctgcagcctggacagtgaagtgctaggacacggggaagactttagaactgcagctccttctggattccccagagggtgtctgcgctcttcttcaggcgggcctcttcctcaggagtcagtgtcaccttcacaacatccgagattccattttgtcccaggatacatgggacactgaggaagacatcctcattgattccatagagacccttaatcatggtggaaatgggatgcacccgcctaaggttcttcattatgctctcagccaagtctgccacagagaggccaatggcccaggatgtgtaacctttcagcttgatcacctcgtaggcactgtccaccacctgcttgtgaacctccttccactgctccttgtctgcgtcagtgcccagttctgggttaagagacttcagggagacgccggcaacattcacaccactccacacaggcacactggagtcgccatgttctcccaggacccagccgtgacagctcagcgcgtgaacccccagcctctctcccatcaggtaacggaaccgcgctgaatccagattgcaaccacttccaattactcggtttttgggaaagccactgattttccaagccacgtaggtcaagatatccactggattggagacgatcagcagcttgcagtgtggactgtacttgacaatgttgggaatgatgaacttgaagatgttcacgtttcgctggaccaggttgagccggctctccccctcttgctgacgggcccccgcggtgataatgaccagcttggagttcgcagttacacagtagtctttgctggagacaatttttggtgttttaaggaagaggctgccatgctggagatccatcatctcgcccttgagtttgtcttccatgacgtcaacaagggcaagctcatccgccaagtccttcattaagatactgatggcacaagccatgccaacagcaccaaccccaacaactgtaatcttgttctggggagcctgctcttccttaagaagattcacaatcagctggtccttgagggttgccatcttggactttgaatcttttgagaccgctagtgcacgatgggggggcgactggcgaggagaagcagcgtggcccgagctcggcgacagtggctccagcacgcagagcagcacgcgggcggggccttaaatggaagctcc

SEQ ID NO: 15 - DNA, 1609 bp, Rattus norvegicus
  source 1..1609: mol_type = unassigned DNA
gtgtgctggagccactgtcgccgatctcgcgcacgctactgctgctgctcgcccgtcgtcccccatcgtgcactaagcggtcccaaaagattcaaagtccaagatggcagccctcaaggaccagctgattgtgaatcttcttaaggaagaacaggtcccccagaacaagattacagttgttggggttggtgctgttggcatggcttgtgccatcagtatcttaatgaaggacttggctgatgagcttgcccttgttgatgtcatagaagataagctaaagggagagatgatggatcttcagcatggcagccttttccttaagacaccaaaaattgtctccagcaaagattatagtgtgactgcaaactccaagctggtcattatcaccgcgggggcccgtcagcaagagggagagagccggctcaatttggtccagcgaaacgtgaacatcttcaagttcatcattccaaatgttgtgaaatacagtccacagtgcaaactgctcatcgtctcaaacccagtggatatcttgacctacgtggcttggaagatcagcggcttccccaaaaacagagttattggaagtggttgcaatctggattcggctcggttccgttacctgatgggagaaaggctgggagttcatccactgagctgtcacgggtgggtcctgggagagcatggcgactccagtgtgcctgtgtggagtggtgtgaacgtcgccggcgtctccctgaagtctctgaacccgcagctgggcacggatgcagacaaggagcagtggaaggatgtgcacaagcaggtggttgacagtgcatacgaagtgatcaagctgaaaggttacacatcctgggccattggcctctccgtggcagacttggccgagagcataatgaagaaccttaggcgggtgcatcccatttccaccatgattaagggtctctatggaatcaaggaggatgtcttcctcagcgtcccatgtatcctgggacaaaatggaatctcagatgttgtgaaggtgacactgactcctgacgaggaggcccgcctgaagaagagtgcagataccctctggggaatccagaaggagctgcagttctaaagtcttcccagtgtcctagcacttcactgtccaggctgcagcagggtttctatggagaccacgcacttctcatctgagctgtggttagtccagttggtccagttgtgttgaggtggtctgggggaaatctcagttccacagctctaccctgctaagtggtacttgtgtagtggtaacctggttagtgtgacaatcccactgtctccaagacacactgccaactgcatgcaggctttgattaccctgtgagcctgctgcattgctgtgctacgcaccctcaccaaacatgcctaggccatgagttcccagttagttataagctggctccagtgtgtaagtccatcgtgtatatcttgtgcataaatgttctacaggatattttctgtattatatgtgtctgtagtgtacattgcaatattacgtgaaatgtaagatctgcatatggatgatggaaccaaccactcaagtgtcatgccaaggaaaacaccaaataaaccttgaacagtg

SEQ ID NO: 16 - DNA, 1609 bp, Rattus norvegicus
  source 1..1609: mol_type = unassigned DNA
cactgttcaaggtttatttggtgttttccttggcatgacacttgagtggttggttccatcatccatatgcagatcttacatttcacgtaatattgcaatgtacactacagacacatataatacagaaaatatcctgtagaacatttatgcacaagatatacacgatggacttacacactggagccagcttataactaactgggaactcatggcctaggcatgtttggtgagggtgcgtagcacagcaatgcagcaggctcacagggtaatcaaagcctgcatgcagttggcagtgtgtcttggagacagtgggattgtcacactaaccaggttaccactacacaagtaccacttagcagggtagagctgtggaactgagatttcccccagaccacctcaacacaactggaccaactggactaaccacagctcagatgagaagtgcgtggtctccatagaaaccctgctgcagcctggacagtgaagtgctaggacactgggaagactttagaactgcagctccttctggattccccagagggtatctgcactcttcttcaggcgggcctcctcgtcaggagtcagtgtcaccttcacaacatctgagattccattttgtcccaggatacatgggacgctgaggaagacatcctccttgattccatagagacccttaatcatggtggaaatgggatgcacccgcctaaggttcttcattatgctctcggccaagtctgccacggagaggccaatggcccaggatgtgtaacctttcagcttgatcacttcgtatgcactgtcaaccacctgcttgtgcacatccttccactgctccttgtctgcatccgtgcccagctgcgggttcagagacttcagggagacgccggcgacgttcacaccactccacacaggcacactggagtcgccatgctctcccaggacccacccgtgacagctcagtggatgaactcccagcctttctcccatcaggtaacggaaccgagccgaatccagattgcaaccacttccaataactctgtttttggggaagccgctgatcttccaagccacgtaggtcaagatatccactgggtttgagacgatgagcagtttgcactgtggactgtatttcacaacatttggaatgatgaacttgaagatgttcacgtttcgctggaccaaattgagccggctctctccctcttgctgacgggcccccgcggtgataatgaccagcttggagtttgcagtcacactataatctttgctggagacaatttttggtgtcttaaggaaaaggctgccatgctgaagatccatcatctctccctttagcttatcttctatgacatcaacaagggcaagctcatcagccaagtccttcattaagatactgatggcacaagccatgccaacagcaccaaccccaacaactgtaatcttgttctgggggacctgttcttccttaagaagattcacaatcagctggtccttgagggctgccatcttggactttgaatcttttgggaccgcttagtgcacgatgggggacgacgggcgagcagcagcagtagcgtgcgcgagatcggcgacagtggctccagcacac

SEQ ID NO: 17 - DNA, 1919 bp, Macaca mulatta
  source 1..1919: mol_type = unassigned DNA
gggcgtaaaagcagggcggtctgaagccgcagctattagtctgatttccgcccacctttccgagcgaggagaaccacaaagcgcgcatgcgcgcggatcaccgcccgcttcagtgccttgggctcgagctttgtggcagttagtggcttttctgcacatacctctggtttttacttgaagcctggctgtgtccttgctgtaggagcaggagtggctcaaagtgatcttgtctgaggaaaggccagccccacttggggttaataaaccgcgatgggtgagccctcaggaggctatacttacacccaaacgtcgatattccttttccacgctaagattccttttggttccaagtccaatatggcaactctcaaggatcagctgattcataatcttctaaaggaagaacagactccccagaataagattacagttgttggggttggtgctgttggcatggcctgtgccatcagtatcttaatgaaggacttggcagatgaacttgctcttgttgatgtcatcgaagacaaattgaagggagagatgatggatctccaacatggcagccttttccttagaacaccaaagattgtctctgggaaagactatagtgtaactgcaaactccaagctggtcattatcacggctggggcacgtcaacaagagggagaaagccgtcttaatttggtccagcgtaacgtgaacatctttaaattcatcgttcctaatgttgtaaaatacagcccgaactgcaagttgcttattgtttcaaatccagtggatatcttgacctacgtggcttggaagataagtggttttcccaaaaaccgtgttattggaagtggttgcaatctggattcagccagattccgttacctgatgggggaaagactgggagttcacccattaagctgtcatgggtgggtccttggggaacatggagattccagtgtgcctgtatggagtggaatgaatgttgctggtgtctccctgaagactctgcacccagatttagggactgataaagataaggaacagtggaaagaggttcacaagcaggtggttgagagtgcttatgaggtgatcaaactcaaaggctacacatcctgggccattggactctctgtagcagatttggcagagagtataatgaagaatcttaggcgagtgcacccagtttccaccatgattaagggtctctatggaataaaggatgatgtcttcctcagtgttccttgcattttgggacagaatggaatctcagaccttgtgaaggtgactctgactcctgaggaagaggcccgtttgaagaagagtgcagatacactttgggggatccaaaaagagctgcaattttaaagtcttctgatgtcatagcatttcactgtctaggctacaacaggattctagttggaggttgtacatgttgtcctttttatctgatctgtgattaaaacagtaatattttaagatggactgggaaaagcattaactcctgaagttagaaataggaatggtttgtgaaatccacagctatatcctgatgctagatggtattaatcttgtgtagtcctaaactggttagtgtgaaatagttctgacgcaccactgccaattctgtacatgctgcatttgccccttgagccaggtggatgtttactgtgtgttttataatttcctggctccttcactgaacatgcctagtccaacattttttcccagtcagtcacatcctgggatccagtgtataaatccaatatcgtatgtcttgtgcataattgttccaaaggagcttattttgtgaactatatatatcagtagtgtacattaccacataacataaaaagatctacatataaacaatacaaccaactatccaagtgttataccaactaaaaaccccaataaaccttgaacagtga

SEQ ID NO: 18 - DNA, 1919 bp, Macaca mulatta
  source 1..1919: mol_type = unassigned DNA
tcactgttcaaggtttattggggtttttagttggtataacacttggatagttggttgtattgtttatatgtagatctttttatgttatgtggtaatgtacactactgatatatatagttcacaaaataagctcctttggaacaattatgcacaagacatacgatattggatttatacactggatcccaggatgtgactgactgggaaaaaatgttggactaggcatgttcagtgaaggagccaggaaattataaaacacacagtaaacatccacctggctcaaggggcaaatgcagcatgtacagaattggcagtggtgcgtcagaactatttcacactaaccagtttaggactacacaagattaataccatctagcatcaggatatagctgtggatttcacaaaccattcctatttctaacttcaggagttaatgcttttcccagtccatcttaaaatattactgttttaatcacagatcagataaaaaggacaacatgtacaacctccaactagaatcctgttgtagcctagacagtgaaatgctatgacatcagaagactttaaaattgcagctctttttggatcccccaaagtgtatctgcactcttcttcaaacgggcctcttcctcaggagtcagagtcaccttcacaaggtctgagattccattctgtcccaaaatgcaaggaacactgaggaagacatcatcctttattccatagagacccttaatcatggtggaaactgggtgcactcgcctaagattcttcattatactctctgccaaatctgctacagagagtccaatggcccaggatgtgtagcctttgagtttgatcacctcataagcactctcaaccacctgcttgtgaacctctttccactgttccttatctttatcagtccctaaatctgggtgcagagtcttcagggagacaccagcaacattcattccactccatacaggcacactggaatctccatgttccccaaggacccacccatgacagcttaatgggtgaactcccagtctttcccccatcaggtaacggaatctggctgaatccagattgcaaccacttccaataacacggtttttgggaaaaccacttatcttccaagccacgtaggtcaagatatccactggatttgaaacaataagcaacttgcagttcgggctgtattttacaacattaggaacgatgaatttaaagatgttcacgttacgctggaccaaattaagacggctttctccctcttgttgacgtgccccagccgtgataatgaccagcttggagtttgcagttacactatagtctttcccagagacaatctttggtgttctaaggaaaaggctgccatgttggagatccatcatctctcccttcaatttgtcttcgatgacatcaacaagagcaagttcatctgccaagtccttcattaagatactgatggcacaggccatgccaacagcaccaaccccaacaactgtaatcttattctggggagtctgttcttcctttagaagattatgaatcagctgatccttgagagttgccatattggacttggaaccaaaaggaatcttagcgtggaaaaggaatatcgacgtttgggtgtaagtatagcctcctgagggctcacccatcgcggtttattaaccccaagtggggctggcctttcctcagacaagatcactttgagccactcctgctcctacagcaaggacacagccaggcttcaagtaaaaaccagaggtatgtgcagaaaagccactaactgccacaaagctcgagcccaaggcactgaagcgggcggtgatccgcgcgcatgcgcgctttgtggttctcctcgctcggaaaggtgggcggaaatcagactaatagctgcggcttcagaccgccctgcttttacgccc

SEQ ID NO: 19 - DNA, 1918 bp, Macaca fascicularis
  source 1..1918: mol_type = unassigned DNA
agtgccttgggctcgagctttgtggcagttagtggcttttctgcacatacctctggtttttacttgaagcctggctgtgtccttgctgtaggagcaggagtggctcaaagtgatcttgtctgaggaaaggccagccccacttggggttaataaaccgcgatgggtgagccctcaggaggctatacttacacccaaacgtcgatattccttttccacgctaagattccttttggttccaagtccaatatggcaactctcaaggatcagctgattcataatcttctaaaggaagaacagactccccagaataagattacagttgttggggttggtgctgttggcatggcctgtgccatcagtatcttaatgaaggacttggcagatgaacttgctcttgttgatgtcatcgaagacaaattgaagggagagatgatggatctccaacatggcagccttttccttagaacaccaaagattgtctctgggaaagactatagtgtaactgcaaactccaagctggtcattatcacggctggggcacgtcaacaagagggagaaagccgtcttaatttggtccagcgtaacgtgaacatctttaaattcatcgttcctaatgttgtaaaatacagcccgaactgcaagttgcttattgtttcaaatccagtggatatcttgacctacgtggcttggaagataagtggttttcccaaaaaccgtgttattggaagtggttgcaatctggattcagccagattccgttacctgatgggggaaagactgggagttcacccattaagctgtcatgggtgggtccttggggaacatggagattccagtgtgcctgtatggagtggaatgaatgttgctggtgtctccctgaagactctgcacccagatttagggactgataaagataaggaacagtggaaagaggttcacaagcaggtggttgagagtgcttatgaggtgatcaaactcaaaggctacacatcctgggccattggactctctgtagcagatttggcagagagtataatgaagaatcttaggcgagtgcacccagtttccaccatgattaagggtctctatggaataaaggatgatgtcttcctcagtgttccttgcattttgggacagaatggaatctcagaccttgtgaaggtgactctgactcctgaggaagaggcccgtttgaagaagagtgcagatacactttgggggatccaaaaagagctgcaattttaaagtcttctgatgtcatagcatttcactgtctaggctacaacaggattctagttggaggttgtgcatgttgtcctttttatctgatctgtgattaaaacagtaatattttaagatggactgggaaaagcattaactcctgaagttagaaataggaatggtttgtgaaatccacagctatatcctgatgctagatggtattaatcttgtgtagtcctaaactggttagtgtgaaatagttctgacgcaccactgccaattctgtacatgctgcatttgccccttgagccaggtggatgtttactgtgtgttttataatttcctggctccttcactgaacatgcctagtccaacattttttcccagtcagtcacatcctgggatccagtgtataaatccaatatcgtatgtcttgtgcataattgttccaaaggagcttattttgtgaactatatatatcagtagtgtacattaccacataacataaaaagatctacatataaacaatacaaccaactatccaagtgttataccaactaaaaaccccaataaaccttgaacagtgaaaaaaaaaaaaaaaaaaaaattaaaaaaaaataaaaaaaaaaaaaaaaaaaaaaaaaaaaaaaaaaaaaaaaaaaaaaaaaaaaaaaaaaaaaaaaaaaaaaaaaaaaaa

SEQ ID NO: 20 - DNA, 1918 bp, Macaca fascicularis
  source 1..1918: mol_type = unassigned DNA
ttttttttttttttttttttttttttttttttttttttttttttttttttttttttttttttttttttttttttttttatttttttttaatttttttttttttttttttttcactgttcaaggtttattggggtttttagttggtataacacttggatagttggttgtattgtttatatgtagatctttttatgttatgtggtaatgtacactactgatatatatagttcacaaaataagctcctttggaacaattatgcacaagacatacgatattggatttatacactggatcccaggatgtgactgactgggaaaaaatgttggactaggcatgttcagtgaaggagccaggaaattataaaacacacagtaaacatccacctggctcaaggggcaaatgcagcatgtacagaattggcagtggtgcgtcagaactatttcacactaaccagtttaggactacacaagattaataccatctagcatcaggatatagctgtggatttcacaaaccattcctatttctaacttcaggagttaatgcttttcccagtccatcttaaaatattactgttttaatcacagatcagataaaaaggacaacatgcacaacctccaactagaatcctgttgtagcctagacagtgaaatgctatgacatcagaagactttaaaattgcagctctttttggatcccccaaagtgtatctgcactcttcttcaaacgggcctcttcctcaggagtcagagtcaccttcacaaggtctgagattccattctgtcccaaaatgcaaggaacactgaggaagacatcatcctttattccatagagacccttaatcatggtggaaactgggtgcactcgcctaagattcttcattatactctctgccaaatctgctacagagagtccaatggcccaggatgtgtagcctttgagtttgatcacctcataagcactctcaaccacctgcttgtgaacctctttccactgttccttatctttatcagtccctaaatctgggtgcagagtcttcagggagacaccagcaacattcattccactccatacaggcacactggaatctccatgttccccaaggacccacccatgacagcttaatgggtgaactcccagtctttcccccatcaggtaacggaatctggctgaatccagattgcaaccacttccaataacacggtttttgggaaaaccacttatcttccaagccacgtaggtcaagatatccactggatttgaaacaataagcaacttgcagttcgggctgtattttacaacattaggaacgatgaatttaaagatgttcacgttacgctggaccaaattaagacggctttctccctcttgttgacgtgccccagccgtgataatgaccagcttggagtttgcagttacactatagtctttcccagagacaatctttggtgttctaaggaaaaggctgccatgttggagatccatcatctctcccttcaatttgtcttcgatgacatcaacaagagcaagttcatctgccaagtccttcattaagatactgatggcacaggccatgccaacagcaccaaccccaacaactgtaatcttattctggggagtctgttcttcctttagaagattatgaatcagctgatccttgagagttgccatattggacttggaaccaaaaggaatcttagcgtggaaaaggaatatcgacgtttgggtgtaagtatagcctcctgagggctcacccatcgcggtttattaaccccaagtggggctggcctttcctcagacaagatcactttgagccactcctgctcctacagcaaggacacagccaggcttcaagtaaaaaccagaggtatgtgcagaaaagccactaactgccacaaagctcgagcccaaggcact

SEQ ID NO: 21 - DNA, 1746 bp, Homo sapiens
  source 1..1746: mol_type = unassigned DNA
ctgggatagcaataacctgtgaaaatgctcccccggctaatttgtatcaatgattatgaacaacatgctaaatcagtacttccaaagtctatatatgactattacaggtctggggcaaatgatgaagaaactttggctgataatattgcagcattttccagatggaagctgtatccaaggatgctccggaatgttgctgaaacagatctgtcgacttctgttttaggacagagggtcagcatgccaatatgtgtgggggctacggccatgcagcgcatggctcatgtggacggcgagcttgccactgtgagagcctgtcagtccctgggaacgggcatgatgttgagttcctgggccacctcctcaattgaagaagtggcggaagctggtcctgaggcacttcgttggctgcaactgtatatctacaaggaccgagaagtcaccaagaagctagtgcggcaggcagagaagatgggctacaaggccatatttgtgacagtggacacaccttacctgggcaaccgtctggatgatgtgcgtaacagattcaaactgccgccacaactcaggatgaaaaattttgaaaccagtactttatcattttctcctgaggaaaattttggagacgacagtggacttgctgcatatgtggctaaagcaatagacccatctatcagctgggaagatatcaaatggctgagaagactgacatcattgccaattgttgcaaagggcattttgagaggtgatgatgccagggaggctgttaaacatggcttgaatgggatcttggtgtcgaatcatggggctcgacaactcgatggggtgccagccactattgatgttctgccagaaattgtggaggctgtggaagggaaggtggaagtcttcctggacgggggtgtgcggaaaggcactgatgttctgaaagctctggctcttggcgccaaggctgtgtttgtggggagaccaatcgtttggggcttagctttccagggggagaaaggtgttcaagatgtcctcgagatactaaaggaagaattccggttggccatggctctgagtgggtgccagaatgtgaaagtcatcgacaagacattggtgaggaaaaatcctttggccgtttccaagatctgacagtgcacaatattttcccatctgtattattttttttcagcatgtattacttgacaaagagacactgtgcagagggtgaccacagtctgtaattccccacttcaatacaaagggtgtcgttcttttccaacaaaatagcaatcccttttatttcattgcttttgacttttcaatgggtgtcctaggaaccttttagaaagaaatggactttcatcctggaaatatattaactgttaaaaagaaaacattgaaaatgtgtttagacaacgtcatcccctggcaggctaaagtgctgtatcctttagtaaaattggaggtagcaaacactaaggtgaaaagataatgatctcattgtttattaacctgtattctgtttacatgtctttaaaacagtggttcttaaattgtaagctcaggttcaaagtgttggtaatgcctgattcacaactttgagaaggtagcactggagagaattggaatgggtggcggtaattggtgatacttctttgaatgtagatttccaatcacatctttagtgtctgaatatatccaaatgttttaggatgtatgttacttcttagagagaaataaagcatttttgggaagaat

SEQ ID NO: 22 - DNA, 1746 bp, Homo sapiens
  source 1..1746: mol_type = unassigned DNA
attcttcccaaaaatgctttatttctctctaagaagtaacatacatcctaaaacatttggatatattcagacactaaagatgtgattggaaatctacattcaaagaagtatcaccaattaccgccacccattccaattctctccagtgctaccttctcaaagttgtgaatcaggcattaccaacactttgaacctgagcttacaatttaagaaccactgttttaaagacatgtaaacagaatacaggttaataaacaatgagatcattatcttttcaccttagtgtttgctacctccaattttactaaaggatacagcactttagcctgccaggggatgacgttgtctaaacacattttcaatgttttctttttaacagttaatatatttccaggatgaaagtccatttctttctaaaaggttcctaggacacccattgaaaagtcaaaagcaatgaaataaaagggattgctattttgttggaaaagaacgacaccctttgtattgaagtggggaattacagactgtggtcaccctctgcacagtgtctctttgtcaagtaatacatgctgaaaaaaaataatacagatgggaaaatattgtgcactgtcagatcttggaaacggccaaaggatttttcctcaccaatgtcttgtcgatgactttcacattctggcacccactcagagccatggccaaccggaattcttcctttagtatctcgaggacatcttgaacacctttctccccctggaaagctaagccccaaacgattggtctccccacaaacacagccttggcgccaagagccagagctttcagaacatcagtgcctttccgcacacccccgtccaggaagacttccaccttcccttccacagcctccacaatttctggcagaacatcaatagtggctggcaccccatcgagttgtcgagccccatgattcgacaccaagatcccattcaagccatgtttaacagcctccctggcatcatcacctctcaaaatgccctttgcaacaattggcaatgatgtcagtcttctcagccatttgatatcttcccagctgatagatgggtctattgctttagccacatatgcagcaagtccactgtcgtctccaaaattttcctcaggagaaaatgataaagtactggtttcaaaatttttcatcctgagttgtggcggcagtttgaatctgttacgcacatcatccagacggttgcccaggtaaggtgtgtccactgtcacaaatatggccttgtagcccatcttctctgcctgccgcactagcttcttggtgacttctcggtccttgtagatatacagttgcagccaacgaagtgcctcaggaccagcttccgccacttcttcaattgaggaggtggcccaggaactcaacatcatgcccgttcccagggactgacaggctctcacagtggcaagctcgccgtccacatgagccatgcgctgcatggccgtagcccccacacatattggcatgctgaccctctgtcctaaaacagaagtcgacagatctgtttcagcaacattccggagcatccttggatacagcttccatctggaaaatgctgcaatattatcagccaaagtttcttcatcatttgccccagacctgtaatagtcatatatagactttggaagtactgatttagcatgttgttcataatcattgatacaaattagccgggggagcattttcacaggttattgctatcccag

SEQ ID NO: 23 - DNA, 1801 bp, Macaca fascicularis
  source 1..1801: mol_type = unassigned DNA
gtgaggatgtagaaagcaatacattaaaaaaaacccaaaaaactccatctgggataacaataacctgtgaaaatgctcccccggctaatttgtatcaatgattatgaacaacatgctaaatcagtacttccaaagtctatatatgactattataggtctggagcaaatgatgaagaaactttggccgataatgttgcagcattttccagatggaagctgtatccaaggatgctccggaatgttgctgaaacagatctgtcgacttctgttttaggacagagggtcagcatgccaatatgcgtgggggccacggccatgcagcgcatggctcatgtggatggcgagcttgccactgtgcgagcctgtcagtccctgggaacgggcatgatgttgagttcctgggccacctcctcaattgaagaagtggcagaagctggtcctgaggcacttcgttggttgtaactgtatatctataaggaccgagaagtcaccaagaagctggtgcagcaggcagagaagacgggctacaaggccatatttgtgacagtggacacaccttacctgggcaaccgtcttgatgatgtacgtaacagattcaagctgccaccacaactcaggatgaaaaattttgaaaccagtactttatcattttctcctgaggaaaattttggagatgacagtggacttgctgcatatgtggctaaagcgatagacccatctatcagctgggaagatatcaaatggctgagaagactgacgtcattgccaattgttgcaaagggcattttgagaggtgatgatgccagggaggctgttaaacatggcttgaatgggatcttggtgtcgaatcatggggctcgacaactcgatggggtgccagccactattgatgttctgccagaaattgtggaggccgtggaagggaaggtggaagtcttcctggacgggggtgtgcggaaaggcactgatgttctgaaagctctggctcttggcgccaaggctgtgtttgtggggagaccaatcatttggggcttagctttccagggggagaaaggtgttcaagatgtccttgagatactaaaggaagaattccggttggccatggctttgagtgggtgccagaatgtgaaagtcatcgacaagacattggtgaggaaaaatcctttggccgtttccaagatctgacagtgcacaatattttcccatctgtattatttttttttcagcatgtattacttgacaaagagacactgtgcagagggtgaccacagtctgtaattccccacttcaatacaaaggatgtcgttcttttccaacaaaatagcaatcccttttagttcattgcttttgacttttcaatgggtgtcctaggaaccttttagaaagaaatggactttcatcctggaaatatattaactgttaaaaagaaaacattgaaaatgtgtttagacaacgtcatcctctggcaggctaaagtactgtatcctttagtaaaattggaggtagcaaacactaaggtgaaaagataatgatctcattgtttattaacctgtattctgtttagatgtctttaaaacagtggttcttaaattgtaagctcaggttcaaagcattggaaatgcctgattgacaacattgagaaggtagccctggatagaattggaatggatggcagtaactggtgatacttctttgaatgcagctttccaatcacatctttagtgtctgaatatatccaaatgttttaggatatatgttacttcttaatcagagagaaataaagcattttttgggaaggata

SEQ ID NO: 24 - DNA, 1801 bp, Macaca fascicularis
  source 1..1801: mol_type = unassigned DNA
tatccttcccaaaaaatgctttatttctctctgattaagaagtaacatatatcctaaaacatttggatatattcagacactaaagatgtgattggaaagctgcattcaaagaagtatcaccagttactgccatccattccaattctatccagggctaccttctcaatgttgtcaatcaggcatttccaatgctttgaacctgagcttacaatttaagaaccactgttttaaagacatctaaacagaatacaggttaataaacaatgagatcattatcttttcaccttagtgtttgctacctccaattttactaaaggatacagtactttagcctgccagaggatgacgttgtctaaacacattttcaatgttttctttttaacagttaatatatttccaggatgaaagtccatttctttctaaaaggttcctaggacacccattgaaaagtcaaaagcaatgaactaaaagggattgctattttgttggaaaagaacgacatcctttgtattgaagtggggaattacagactgtggtcaccctctgcacagtgtctctttgtcaagtaatacatgctgaaaaaaaaataatacagatgggaaaatattgtgcactgtcagatcttggaaacggccaaaggatttttcctcaccaatgtcttgtcgatgactttcacattctggcacccactcaaagccatggccaaccggaattcttcctttagtatctcaaggacatcttgaacacctttctccccctggaaagctaagccccaaatgattggtctccccacaaacacagccttggcgccaagagccagagctttcagaacatcagtgcctttccgcacacccccgtccaggaagacttccaccttcccttccacggcctccacaatttctggcagaacatcaatagtggctggcaccccatcgagttgtcgagccccatgattcgacaccaagatcccattcaagccatgtttaacagcctccctggcatcatcacctctcaaaatgccctttgcaacaattggcaatgacgtcagtcttctcagccatttgatatcttcccagctgatagatgggtctatcgctttagccacatatgcagcaagtccactgtcatctccaaaattttcctcaggagaaaatgataaagtactggtttcaaaatttttcatcctgagttgtggtggcagcttgaatctgttacgtacatcatcaagacggttgcccaggtaaggtgtgtccactgtcacaaatatggccttgtagcccgtcttctctgcctgctgcaccagcttcttggtgacttctcggtccttatagatatacagttacaaccaacgaagtgcctcaggaccagcttctgccacttcttcaattgaggaggtggcccaggaactcaacatcatgcccgttcccagggactgacaggctcgcacagtggcaagctcgccatccacatgagccatgcgctgcatggccgtggcccccacgcatattggcatgctgaccctctgtcctaaaacagaagtcgacagatctgtttcagcaacattccggagcatccttggatacagcttccatctggaaaatgctgcaacattatcggccaaagtttcttcatcatttgctccagacctataatagtcatatatagactttggaagtactgatttagcatgttgttcataatcattgatacaaattagccgggggagcattttcacaggttattgttatcccagatggagttttttgggttttttttaatgtattgctttctacatcctcac

SEQ ID NO: 25 - DNA, 2029 bp, Mus musculus
  source 1..2029: mol_type = unassigned DNA
ggttgccctaccctgccacaatgttgcctcgactggtctgcatcagtgattatgaacagcatgtccgatcagtgcttcagaagtcagtgtatgactattacaggtctggggcaaatgatcaggagacgttagctgataacatccaagcattttctagatggaagctctatccacggatgcttcgcaacgttgctgatatcgatctgtcaacttctgttttaggacagagagtcagcatgccaatatgtgttggggctactgccatgcagtgcatggctcacgtggacggggagctggccactgtgcgagcctgtcagaccatgggaactggcatgatgctgagttcttgggctacctcctcaatagaagaagtggcagaagctggcccagaggcacttcgctggatgcaactgtacatctacaaagaccgtgagatcagcagacagatagtgaagcgagctgagaagcagggttacaaggccatatttgtgactgtggacaccccttacctgggcaaccgcattgatgacgtgcggaacaggttcaagctgccaccacaactcaggatgaaaaactttgaaaccaatgatttggcattttctcctaagggaaattttggagacaacagtggacttgctgaatatgtggcacaagctatagacccatctctcagctgggatgatattacatggctcagacgattgacatcactgcctattgttgtaaagggcattttgagaggtgatgatgccaaggaagctgttaaacatggtgtggatgggatcttggtgtcgaatcatggggcgcgacaactggatggggtgccagctactattgatgtcctgccagagattgttgaggctgtggaagggaaggtagaagtcttcctggatgggggagtaaggaaaggtactgatgttctcaaagctctggccctaggagccaaggccgtttttgtgggaagacccatcatctggggcttggctttccagggggagaaaggtgttcaagatgtcctcgagatattgaaggaagaattccgactggccatggctctgagtgggtgccagaatgtgaaagtcatcgacaagacattggtgaggaaaaatcctttggctgtttccaagatctgacagtgcacaatattttcccatctgtattattttttttccagcgtggattacttgacaaagagacactgtgcagagggtgaccacagactgtaactccccacttctatacaaagggtgtcgttcttttccaacaaaatagccaccccttttccttcattgcttttgacttttcaatgggtgtcctaggaaccttctagaaagaaatggacttgcatcctggaaatatattaactgttaaaaagaaaacattgaaaatgtgtttgggcaacgtcatcccctggcaggctaaagtgctggggaacaaaagatatcctctggtgagattgcaggtagcatgctgaagtgaaagatactgacctcactgttcattaacctgtcttctgtttagatttccttaagacagtggctcttacagtttgcacttggctttgaaatgctggaaatgcccagagaaacatgaggtttggatttgccatgttgagaaaatagcaccaggtagaattgaaatggatggtggtaatttgtgattttttttctagaaacttttcattttttaacaccctatttttttgaaggtagatttttagctatatatcacacgtctgaatatgtctggatgttttgtggcactcattgcatttgaaagggatgtgtctagtccagttgggaccacatggagctatttttacttttgaactttgtctcctcattctcattttaaaataagtgttgacttcctaattcctcttgaatcttttttgattttctcacttttcctcatttatagtcacattcagtgtaaagtacatattttgtggggtccgtgatgaataaagatttgaaattcttgttcagaaggaaggcaaaaaaaaaaaaaagtctttccttttatcaca

SEQ ID NO: 26 - DNA, 2029 bp, Mus musculus
  source 1..2029: mol_type = unassigned DNA
tgtgataaaaggaaagacttttttttttttttgccttccttctgaacaagaatttcaaatctttattcatcacggaccccacaaaatatgtactttacactgaatgtgactataaatgaggaaaagtgagaaaatcaaaaaagattcaagaggaattaggaagtcaacacttattttaaaatgagaatgaggagacaaagttcaaaagtaaaaatagctccatgtggtcccaactggactagacacatccctttcaaatgcaatgagtgccacaaaacatccagacatattcagacgtgtgatatatagctaaaaatctaccttcaaaaaaatagggtgttaaaaaatgaaaagtttctagaaaaaaaatcacaaattaccaccatccatttcaattctacctggtgctattttctcaacatggcaaatccaaacctcatgtttctctgggcatttccagcatttcaaagccaagtgcaaactgtaagagccactgtcttaaggaaatctaaacagaagacaggttaatgaacagtgaggtcagtatctttcacttcagcatgctacctgcaatctcaccagaggatatcttttgttccccagcactttagcctgccaggggatgacgttgcccaaacacattttcaatgttttctttttaacagttaatatatttccaggatgcaagtccatttctttctagaaggttcctaggacacccattgaaaagtcaaaagcaatgaaggaaaaggggtggctattttgttggaaaagaacgacaccctttgtatagaagtggggagttacagtctgtggtcaccctctgcacagtgtctctttgtcaagtaatccacgctggaaaaaaaataatacagatgggaaaatattgtgcactgtcagatcttggaaacagccaaaggatttttcctcaccaatgtcttgtcgatgactttcacattctggcacccactcagagccatggccagtcggaattcttccttcaatatctcgaggacatcttgaacacctttctccccctggaaagccaagccccagatgatgggtcttcccacaaaaacggccttggctcctagggccagagctttgagaacatcagtacctttccttactcccccatccaggaagacttctaccttcccttccacagcctcaacaatctctggcaggacatcaatagtagctggcaccccatccagttgtcgcgccccatgattcgacaccaagatcccatccacaccatgtttaacagcttccttggcatcatcacctctcaaaatgccctttacaacaataggcagtgatgtcaatcgtctgagccatgtaatatcatcccagctgagagatgggtctatagcttgtgccacatattcagcaagtccactgttgtctccaaaatttcccttaggagaaaatgccaaatcattggtttcaaagtttttcatcctgagttgtggtggcagcttgaacctgttccgcacgtcatcaatgcggttgcccaggtaaggggtgtccacagtcacaaatatggccttgtaaccctgcttctcagctcgcttcactatctgtctgctgatctcacggtctttgtagatgtacagttgcatccagcgaagtgcctctgggccagcttctgccacttcttctattgaggaggtagcccaagaactcagcatcatgccagttcccatggtctgacaggctcgcacagtggccagctccccgtccacgtgagccatgcactgcatggcagtagccccaacacatattggcatgctgactctctgtcctaaaacagaagttgacagatcgatatcagcaacgttgcgaagcatccgtggatagagcttccatctagaaaatgcttggatgttatcagctaacgtctcctgatcatttgccccagacctgtaatagtcatacactgacttctgaagcactgatcggacatgctgttcataatcactgatgcagaccagtcgaggcaacattgtggcagggtagggcaacc

SEQ ID NO: 27 - DNA, 1527 bp, Rattus norvegicus
  source 1..1527: mol_type = unassigned DNA
catcccctgacacaatgttgcctcggctggtctgcatcagtgactatgaacagcatgcccggacagtgcttcagaagtcagtatatgattattacaagtctggggcaaatgaccaggagactttggctgataatatcagagcattttctaggtggaagctctatccacggatgctgcgcaacgttgctgatatcgacctgtcgacttctgttttaggacagagagtgagcatgccaatatgcgttggggctacggctatgcagtgcatggctcatgtggatggggagctggccactgttcgagcctgtcagaccatgggaactggcatgatgttgagttcctgggccacttcctcaatagaagaggtggcagaggctggcccggaggcacttcgctggatgcaactctacatctacaaagatcgtgaggtcagcagtcagctagtgaagagggctgagcagatgggttacaaggccatatttgtgactgtggacaccccttacctgggaaatcgcttcgatgatgtgcggaacaggttcaagctaccaccacagctcaggatgaaaaactttgaaaccaacgatttggcattttctcctaaggggaattttggagacaacagtggccttgctgaatatgtggcacaagccatagacccatctctcagctgggatgatattaaatggctcagacggttgacctcactgcccattgttgtaaagggaattttgagaggtgatgatgcccaggaagctgttaaacatggtgtggatgggatcttagtgtcgaatcatggggcacgacaactggatggggtgccagctactattgatgccctgccagagatcgttgaggctgtggaagggaaggtagaagtcttcctggatgggggagtcaggaaaggcaccgatgttctcaaagctctggccctgggagccagagctgtttttgtggggagacccatcatctggggcttggctttccagggggagaaaggtgttcaagatgtcctcgagatactgaaggaagagttccggctggccatggctctgagtgggtgccagaatgtgaaagtcatcgacaagacattggtgaggaaaaatcctttggctgtttccaagatctgacagtgcacaatattttcccatctgtattatttttttccagcatggattacttgacaaagagacactgtgcagagggtgaccacagactgtaactccccacttcaacacaaagggtgtcgttcttttccaacaaaatagccaccccttctccttcattgcttttgacttttcaatgggtgtcctaggaaccttctagaaagaaatggacttgcatcctggaaatatattaactgttaaaaagaaaacattgaaaatgtgtttgggcaacgtcatcccctggcaggctaaagtgagggggaacaaaagatatcctctggtgagattggaggtagcatgccgaagtaaaagacactgacctcactgtttattaaaaaaaaaaaaaaaaaaaaaaaaaaaaaaa

SEQ ID NO: 28 - DNA, 1527 bp, Rattus norvegicus
  source 1..1527: mol_type = unassigned DNA
tttttttttttttttttttttttttttttttaataaacagtgaggtcagtgtcttttacttcggcatgctacctccaatctcaccagaggatatcttttgttccccctcactttagcctgccaggggatgacgttgcccaaacacattttcaatgttttctttttaacagttaatatatttccaggatgcaagtccatttctttctagaaggttcctaggacacccattgaaaagtcaaaagcaatgaaggagaaggggtggctattttgttggaaaagaacgacaccctttgtgttgaagtggggagttacagtctgtggtcaccctctgcacagtgtctctttgtcaagtaatccatgctggaaaaaaataatacagatgggaaaatattgtgcactgtcagatcttggaaacagccaaaggatttttcctcaccaatgtcttgtcgatgactttcacattctggcacccactcagagccatggccagccggaactcttccttcagtatctcgaggacatcttgaacacctttctccccctggaaagccaagccccagatgatgggtctccccacaaaaacagctctggctcccagggccagagctttgagaacatcggtgcctttcctgactcccccatccaggaagacttctaccttcccttccacagcctcaacgatctctggcagggcatcaatagtagctggcaccccatccagttgtcgtgccccatgattcgacactaagatcccatccacaccatgtttaacagcttcctgggcatcatcacctctcaaaattccctttacaacaatgggcagtgaggtcaaccgtctgagccatttaatatcatcccagctgagagatgggtctatggcttgtgccacatattcagcaaggccactgttgtctccaaaattccccttaggagaaaatgccaaatcgttggtttcaaagtttttcatcctgagctgtggtggtagcttgaacctgttccgcacatcatcgaagcgatttcccaggtaaggggtgtccacagtcacaaatatggccttgtaacccatctgctcagccctcttcactagctgactgctgacctcacgatctttgtagatgtagagttgcatccagcgaagtgcctccgggccagcctctgccacctcttctattgaggaagtggcccaggaactcaacatcatgccagttcccatggtctgacaggctcgaacagtggccagctccccatccacatgagccatgcactgcatagccgtagccccaacgcatattggcatgctcactctctgtcctaaaacagaagtcgacaggtcgatatcagcaacgttgcgcagcatccgtggatagagcttccacctagaaaatgctctgatattatcagccaaagtctcctggtcatttgccccagacttgtaataatcatatactgacttctgaagcactgtccgggcatgctgttcatagtcactgatgcagaccagccgaggcaacattgtgtcaggggatg

SEQ ID NO: 29 - RNA, 21 nt, synthetic construct
  misc_feature 1..21: note = Description of Artificial Sequence: Synthetic oligonucleotide
  source 1..21: mol_type = other RNA
  modified_base 1: mod_base = OTHER; note = 2'-fluorocytidine-3'-phosphorothioate
  modified_base 2: mod_base = OTHER; note = 2'-O-methyluridine-3'-phosphorothioate
  modified_base 3: mod_base = OTHER; note = 2'-fluorouridine-3'-phosphate
  modified_base 4: mod_base = OTHER; note = 2'-O-methyluridine-3'-phosphate
  modified_base 5: mod_base = OTHER; note = 2'-fluorouridine-3'-phosphate
  modified_base 6: mod_base = OTHER; note = 2'-O-methylcytidine-3'-phosphate
  modified_base 7: mod_base = OTHER; note = 2'-fluoroadenosine-3'-phosphate
  modified_base 8: mod_base = OTHER; note = 2'-O-methyladenosine-3'-phosphate
  modified_base 9: mod_base = OTHER; note = 2'-fluorouridine-3'-phosphate
  modified_base 10: mod_base = OTHER; note = 2'-fluoroguanosine-3'-phosphate
  modified_base 11: mod_base = OTHER; note = 2'-fluoroguanosine-3'-phosphate
  modified_base 12: mod_base = OTHER; note = 2'-O-methylguanosine-3'-phosphate
  modified_base 13: mod_base = OTHER; note = 2'-fluorouridine-3'-phosphate
  modified_base 14: mod_base = OTHER; note = 2'-O-methylguanosine-3'-phosphate
  modified_base 15: mod_base = OTHER; note = 2'-fluorouridine-3'-phosphate
  modified_base 16: mod_base = OTHER; note = 2'-O-methylcytidine-3'-phosphate
  modified_base 17: mod_base = OTHER; note = 2'-fluorocytidine-3'-phosphate
  modified_base 18: mod_base = OTHER; note = 2'-O-methyluridine-3'-phosphate
  modified_base 19: mod_base = OTHER; note = 2'-fluoroadenosine-3'-phosphate
  modified_base 20: mod_base = OTHER; note = 2'-O-methylguanosine-3'-phosphate
  modified_base 21: mod_base = OTHER; note = 2'-fluoroadenosine-3'-phosphate attached to N-[tris(N-acetylgalactosamine-alkyl)-amidodecanoyl)]-4-hydr oxyprolinol Hyp-(N-acetylgalactosamine-alkyl)3
cttttcaatgggtgtcctaga

SEQ ID NO: 30 - RNA, 21 nt, synthetic construct
  misc_feature 1..21: note = Description of Artificial Sequence: Synthetic oligonucleotide
  source 1..21: mol_type = other RNA
  modified_base 1: mod_base = OTHER; note = 2'-fluorouridine -3'-phosphorothioate
  modified_base 2: mod_base = OTHER; note = 2'-O-methylcytidine-3'- phosphorothioate
  modified_base 3: mod_base = OTHER; note = 2'-fluoroadenosine-3'-phosphate
  modified_base 4: mod_base = OTHER; note = 2'-O-methyladenosine-3'-phosphate
  modified_base 5: mod_base = OTHER; note = 2'-fluorouridine-3'-phosphate
  modified_base 6: mod_base = OTHER; note = 2'-O-methylguanosine-3'-phosphate
  modified_base 7: mod_base = OTHER; note = 2'-fluoroguanosine-3'-phosphate
  modified_base 8: mod_base = OTHER; note = 2'-O-methylguanosine-3'-phosphate
  modified_base 9: mod_base = OTHER; note = 2'-fluorouridine-3'-phosphate
  modified_base 10: mod_base = OTHER; note = 2'-fluoroguanosine-3'-phosphate
  modified_base 11: mod_base = OTHER; note = 2'-fluorouridine-3'-phosphate
  modified_base 12: mod_base = OTHER; note = 2'-O-methylcytidine-3'-phosphate
  modified_base 13: mod_base = OTHER; note = 2'-fluorocytidine-3'-phosphate
  modified_base 14: mod_base = OTHER; note = 2'-O-methyluridine-3'-phosphate
  modified_base 15: mod_base = OTHER; note = 2'-fluoroadenosine-3'-phosphate
  modified_base 16: mod_base = OTHER; note = 2'-O-methylguanosine-3'-phosphate
  modified_base 17: mod_base = OTHER; note = 2'-fluoroguanosine-3'-phosphate
  modified_base 18: mod_base = OTHER; note = 2'-O-methyladenosine-3'-phosphate
  modified_base 19: mod_base = OTHER; note = 2'-fluoroadenosine-3'-phosphate
  modified_base 20: mod_base = OTHER; note = 2'-O-methylcytidine-3'-phosphate
  modified_base 21: mod_base = OTHER; note = 2'-fluoroadenosine-3'-phosphate attached to N-[tris(N-acetylgalactosamine-alkyl)-amidodecanoyl)]-4-hydr oxyprolinol Hyp-(N-acetylgalactosamine-alkyl)3
tcaatgggtgtcctaggaaca

SEQ ID NO: 31 - RNA, 21 nt, synthetic construct
  misc_feature 1..21: note = Description of Artificial Sequence: Synthetic oligonucleotide
  source 1..21: mol_type = other RNA
  modified_base 1: mod_base = OTHER; note = 2'-fluorouridine -3'-phosphorothioate
  modified_base 2: mod_base = OTHER; note = 2'-O-methyluridine-3'-phosphorothioate
  modified_base 3: mod_base = OTHER; note = 2'-fluoroguanosine-3'-phosphate
  modified_base 4: mod_base = OTHER; note = 2'-O-methyladenosine-3'-phosphate
  modified_base 5: mod_base = OTHER; note = 2'-fluorocytidine-3'-phosphate
  modified_base 6: mod_base = OTHER; note = 2'-O-methyluridine-3'-phosphate
  modified_base 7: mod_base = OTHER; note = 2'-fluorouridine-3'-phosphate
  modified_base 8: mod_base = OTHER; note = 2'-O-methyluridine-3'-phosphate
  modified_base 9: mod_base = OTHER; note = 2'-fluorouridine-3'-phosphate
  modified_base 10: mod_base = OTHER; note = 2'-fluorocytidine-3'-phosphate
  modified_base 11: mod_base = OTHER; note = 2'-fluoroadenosine-3'-phosphate
  modified_base 12: mod_base = OTHER; note = 2'-O-methyladenosine-3'-phosphate
  modified_base 13: mod_base = OTHER; note = 2'-fluorouridine-3'-phosphate
  modified_base 14: mod_base = OTHER; note = 2'-O-methylguanosine-3'-phosphate
  modified_base 15: mod_base = OTHER; note = 2'-fluoroguanosine-3'-phosphate
  modified_base 16: mod_base = OTHER; note = 2'-O-methylguanosine-3'-phosphate
  modified_base 17: mod_base = OTHER; note = 2'-fluorouridine-3'-phosphate
  modified_base 18: mod_base = OTHER; note = 2'-O-methylguanosine-3'-phosphate
  modified_base 19: mod_base = OTHER; note = 2'-fluorouridine-3'-phosphate
  modified_base 20: mod_base = OTHER; note = 2'-O-methylcytidine-3'-phosphate
  modified_base 21: mod_base = OTHER; note = 2'-fluoroadenosine-3'-phosphate attached to N-[tris(N-acetylgalactosamine-alkyl)-amidodecanoyl)]-4-hydr oxyprolinol Hyp-(N-acetylgalactosamine-alkyl)3
ttgacttttcaatgggtgtca

SEQ ID NO: 32 - RNA, 21 nt, synthetic construct
  misc_feature 1..21: note = Description of Artificial Sequence: Synthetic oligonucleotide
  source 1..21: mol_type = other RNA
  modified_base 1: mod_base = OTHER; note = 2'-fluoroadenosine-3'-phosphorothioate
  modified_base 2: mod_base = OTHER; note = 2'-O-methyladenosine-3'- phosphorothioate
  modified_base 3: mod_base = OTHER; note = 2'-fluoroadenosine-3'-phosphate
  modified_base 4: mod_base = OTHER; note = 2'-O-methylguanosine-3'-phosphate
  modified_base 5: mod_base = OTHER; note = 2'-fluorouridine-3'-phosphate
  modified_base 6: mod_base = OTHER; note = 2'-O-methylcytidine-3'-phosphate
  modified_base 7: mod_base = OTHER; note = 2'-fluoroadenosine-3'-phosphate
  modified_base 8: mod_base = OTHER; note = 2'-O-methyluridine-3'-phosphate
  modified_base 9: mod_base = OTHER; note = 2'-fluorocytidine-3'-phosphate
  modified_base 10: mod_base = OTHER; note = 2'-fluoroguanosine-3'-phosphate
  modified_base 11: mod_base = OTHER; note = 2'-fluoroadenosine-3'-phosphate
  modified_base 12: mod_base = OTHER; note = 2'-O-methylcytidine-3'-phosphate
  modified_base 13: mod_base = OTHER; note = 2'-fluoroadenosine-3'-phosphate
  modified_base 14: mod_base = OTHER; note = 2'-O-methyladenosine-3'-phosphate
  modified_base 15: mod_base = OTHER; note = 2'-fluoroguanosine-3'-phosphate
  modified_base 16: mod_base = OTHER; note = 2'-O-methyladenosine-3'-phosphate
  modified_base 17: mod_base = OTHER; note = 2'-fluorocytidine-3'-phosphate
  modified_base 18: mod_base = OTHER; note = 2'-O-methyladenosine-3'-phosphate
  modified_base 19: mod_base = OTHER; note = 2'-fluorouridine-3'-phosphate
  modified_base 20: mod_base = OTHER; note = 2'-O-methyluridine-3'-phosphate
  modified_base 21: mod_base = OTHER; note = 2'-fluoroadenosine-3'-phosphate attached to N-[tris(N-acetylgalactosamine-alkyl)-amidodecanoyl)]-4-hydr oxyprolinol Hyp-(N-acetylgalactosamine-alkyl)3
aaagtcatcgacaagacatta

SEQ ID NO: 33 - RNA, 21 nt, synthetic construct
  misc_feature 1..21: note = Description of Artificial Sequence: Synthetic oligonucleotide
  source 1..21: mol_type = other RNA
  modified_base 1: mod_base = OTHER; note = 2'-fluorocytidine-3'-phosphorothioate
  modified_base 2: mod_base = OTHER; note = 2'-O-methyladenosine-3'- phosphorothioate
  modified_base 3: mod_base = OTHER; note = 2'-fluoroguanosine-3'-phosphate
  modified_base 4: mod_base = OTHER; note = 2'-O-methylguanosine-3'-phosphate
  modified_base 5: mod_base = OTHER; note = 2'-fluoroguanosine-3'-phosphate
  modified_base 6: mod_base = OTHER; note = 2'-O-methylguanosine-3'-phosphate
  modified_base 7: mod_base = OTHER; note = 2'-fluoroguanosine-3'-phosphate
  modified_base 8: mod_base = OTHER; note = 2'-O-methyladenosine-3'-phosphate
  modified_base 9: mod_base = OTHER; note = 2'-fluoroguanosine-3'-phosphate
  modified_base 10: mod_base = OTHER; note = 2'-fluoroadenosine-3'-phosphate
  modified_base 11: mod_base = OTHER; note = 2'-fluoroadenosine-3'-phosphate
  modified_base 12: mod_base = OTHER; note = 2'-O-methyladenosine-3'-phosphate
  modified_base 13: mod_base = OTHER; note = 2'-fluoroguanosine-3'-phosphate
  modified_base 14: mod_base = OTHER; note = 2'-O-methylguanosine-3'-phosphate
  modified_base 15: mod_base = OTHER; note = 2'-fluorouridine-3'-phosphate
  modified_base 16: mod_base = OTHER; note = 2'-O-methylguanosine-3'-phosphate
  modified_base 17: mod_base = OTHER; note = 2'-fluorouridine-3'-phosphate
  modified_base 18: mod_base = OTHER; note = 2'-O-methyluridine-3'-phosphate
  modified_base 19: mod_base = OTHER; note = 2'-fluorocytidine-3'-phosphate
  modified_base 20: mod_base = OTHER; note = 2'-O-methyladenosine-3'-phosphate
  modified_base 21: mod_base = OTHER; note = 2'-fluoroadenosine-3'-phosphate attached to N-[tris(N-acetylgalactosamine-alkyl)-amidodecanoyl)]-4-hydr oxyprolinol Hyp-(N-acetylgalactosamine-alkyl)3
cagggggagaaaggtgttcaa

SEQ ID NO: 34 - RNA, 21 nt, synthetic construct
  misc_feature 1..21: note = Description of Artificial Sequence: Synthetic oligonucleotide
  source 1..21: mol_type = other RNA
  modified_base 1: mod_base = OTHER; note = 2'-fluorocytidine-3'-phosphorothioate
  modified_base 2: mod_base = OTHER; note = 2'-O-methyladenosine-3'- phosphorothioate
  modified_base 3: mod_base = OTHER; note = 2'-fluorouridine-3'-phosphate
  modified_base 4: mod_base = OTHER; note = 2'-O-methyluridine-3'-phosphate
  modified_base 5: mod_base = OTHER; note = 2'-fluoroguanosine-3'-phosphate
  modified_base 6: mod_base = OTHER; note = 2'-O-methylguanosine-3'-phosphate
  modified_base 7: mod_base = OTHER; note = 2'-fluorouridine-3'-phosphate
  modified_base 8: mod_base = OTHER; note = 2'-O-methylguanosine-3'-phosphate
  modified_base 9: mod_base = OTHER; note = 2'-fluoroadenosine-3'-phosphate
  modified_base 10: mod_base = OTHER; note = 2'-fluoroguanosine-3'-phosphate
  modified_base 11: mod_base = OTHER; note = 2'-fluoroguanosine-3'-phosphate
  modified_base 12: mod_base = OTHER; note = 2'-O-methyladenosine-3'-phosphate
  modified_base 13: mod_base = OTHER; note = 2'-fluoroadenosine-3'-phosphate
  modified_base 14: mod_base = OTHER; note = 2'-O-methyladenosine-3'-phosphate
  modified_base 15: mod_base = OTHER; note = 2'-fluoroadenosine-3'-phosphate
  modified_base 16: mod_base = OTHER; note = 2'-O-methyladenosine-3'-phosphate
  modified_base 17: mod_base = OTHER; note = 2'-fluorouridine-3'-phosphate
  modified_base 18: mod_base = OTHER; note = 2'-O-methylcytidine-3'-phosphate
  modified_base 19: mod_base = OTHER; note = 2'-fluorocytidine-3'-phosphate
  modified_base 20: mod_base = OTHER; note = 2'-O-methyluridine-3'-phosphate
  modified_base 21: mod_base = OTHER; note = 2'-fluorouridine-3'-phosphate attached to N-[tris(N-acetylgalactosamine-alkyl)-amidodecanoyl)]-4-hydr oxyprolinol Hyp-(N-acetylgalactosamine-alkyl)3
cattggtgaggaaaaatcctt

SEQ ID NO: 35 - RNA, 21 nt, synthetic construct
  misc_feature 1..21: note = Description of Artificial Sequence: Synthetic oligonucleotide
  source 1..21: mol_type = other RNA
  modified_base 1: mod_base = OTHER; note = 2'-fluoroadenosine-3'-phosphorothioate
  modified_base 2: mod_base = OTHER; note = 2'-O-methylcytidine-3'- phosphorothioate
  modified_base 3: mod_base = OTHER; note = 2'-fluoroadenosine-3'-phosphate
  modified_base 4: mod_base = OTHER; note = 2'-O-methyluridine-3'-phosphate
  modified_base 5: mod_base = OTHER; note = 2'-fluorouridine-3'-phosphate
  modified_base 6: mod_base = OTHER; note = 2'-O-methylguanosine-3'-phosphate
  modified_base 7: mod_base = OTHER; note = 2'-fluoroguanosine-3'-phosphate
  modified_base 8: mod_base = OTHER; note = 2'-O-methyluridine-3'-phosphate
  modified_base 9: mod_base = OTHER; note = 2'-fluoroguanosine-3'-phosphate
  modified_base 10: mod_base = OTHER; note = 2'-fluoroadenosine-3'-phosphate
  modified_base 11: mod_base = OTHER; note = 2'-fluoroguanosine-3'-phosphate
  modified_base 12: mod_base = OTHER; note = 2'-O-methylguanosine-3'-phosphate
  modified_base 13: mod_base = OTHER; note = 2'-fluoroadenosine-3'-phosphate
  modified_base 14: mod_base = OTHER; note = 2'-O-methyladenosine-3'-phosphate
  modified_base 15: mod_base = OTHER; note = 2'-fluoroadenosine-3'-phosphate
  modified_base 16: mod_base = OTHER; note = 2'-O-methyladenosine-3'-phosphate
  modified_base 17: mod_base = OTHER; note = 2'-fluoroadenosine-3'-phosphate
  modified_base 18: mod_base = OTHER; note = 2'-O-methyluridine-3'-phosphate
  modified_base 19: mod_base = OTHER; note = 2'-fluorocytidine-3'-phosphate
  modified_base 20: mod_base = OTHER; note = 2'-O-methylcytidine-3'-phosphate
  modified_base 21: mod_base = OTHER; note = 2'-fluorouridine-3'-phosphate attached to N-[tris(N-acetylgalactosamine-alkyl)-amidodecanoyl)]-4-hydr oxyprolinol Hyp-(N-acetylgalactosamine-alkyl)3
acattggtgaggaaaaatcct

SEQ ID NO: 36 - RNA, 21 nt, synthetic construct
  misc_feature 1..21: note = Description of Artificial Sequence: Synthetic oligonucleotide
  source 1..21: mol_type = other RNA
  modified_base 1: mod_base = OTHER; note = 2'-fluoroadenosine-3'-phosphorothioate
  modified_base 2: mod_base = OTHER; note = 2'-O-methylguanosine-3'- phosphorothioate
  modified_base 3: mod_base = OTHER; note = 2'-fluoroguanosine-3'-phosphate
  modified_base 4: mod_base = OTHER; note = 2'-O-methylguanosine-3'-phosphate
  modified_base 5: mod_base = OTHER; note = 2'-fluoroguanosine-3'-phosphate
  modified_base 6: mod_base = OTHER; note = 2'-O-methylguanosine-3'-phosphate
  modified_base 7: mod_base = OTHER; note = 2'-fluoroadenosine-3'-phosphate
  modified_base 8: mod_base = OTHER; note = 2'-O-methylguanosine-3'-phosphate
  modified_base 9: mod_base = OTHER; note = 2'-fluoroadenosine-3'-phosphate
  modified_base 10: mod_base = OTHER; note = 2'-fluoroadenosine-3'-phosphate
  modified_base 11: mod_base = OTHER; note = 2'-fluoroadenosine-3'-phosphate
  modified_base 12: mod_base = OTHER; note = 2'-O-methylguanosine-3'-phosphate
  modified_base 13: mod_base = OTHER; note = 2'-fluoroguanosine-3'-phosphate
  modified_base 14: mod_base = OTHER; note = 2'-O-methyluridine-3'-phosphate
  modified_base 15: mod_base = OTHER; note = 2'-fluoroguanosine-3'-phosphate
  modified_base 16: mod_base = OTHER; note = 2'-O-methyluridine-3'-phosphate
  modified_base 17: mod_base = OTHER; note = 2'-fluorouridine-3'-phosphate
  modified_base 18: mod_base = OTHER; note = 2'-O-methylcytidine-3'-phosphate
  modified_base 19: mod_base = OTHER; note = 2'-fluoroadenosine-3'-phosphate
  modified_base 20: mod_base = OTHER; note = 2'-O-methyladenosine-3'-phosphate
  modified_base 21: mod_base = OTHER; note = 2'-fluoroadenosine-3'-phosphate attached to N-[tris(N-acetylgalactosamine-alkyl)-amidodecanoyl)]-4-hydr oxyprolinol Hyp-(N-acetylgalactosamine-alkyl)3
agggggagaaaggtgttcaaa

SEQ ID NO: 37 - RNA, 21 nt, synthetic construct
  misc_feature 1..21: note = Description of Artificial Sequence: Synthetic oligonucleotide
  source 1..21: mol_type = other RNA
  modified_base 1: mod_base = OTHER; note = 2'-fluoroadenosine-3'-phosphorothioate
  modified_base 2: mod_base = OTHER; note = 2'-O-methyluridine-3'-phosphorothioate
  modified_base 3: mod_base = OTHER; note = 2'-fluoroguanosine-3'-phosphate
  modified_base 4: mod_base = OTHER; note = 2'-O-methylguanosine-3'-phosphate
  modified_base 5: mod_base = OTHER; note = 2'-fluorouridine-3'-phosphate
  modified_base 6: mod_base = OTHER; note = 2'-O-methylguanosine-3'-phosphate
  modified_base 7: mod_base = OTHER; note = 2'-fluoroguanosine-3'-phosphate
  modified_base 8: mod_base = OTHER; note = 2'-O-methyluridine-3'-phosphate
  modified_base 9: mod_base = OTHER; note = 2'-fluoroadenosine-3'-phosphate
  modified_base 10: mod_base = OTHER; note = 2'-fluoroadenosine-3'-phosphate
  modified_base 11: mod_base = OTHER; note = 2'-fluorouridine-3'-phosphate
  modified_base 12: mod_base = OTHER; note = 2'-O-methyluridine-3'-phosphate
  modified_base 13: mod_base = OTHER; note = 2'-fluorouridine-3'-phosphate
  modified_base 14: mod_base = OTHER; note = 2'-O-methylguanosine-3'-phosphate
  modified_base 15: mod_base = OTHER; note = 2'-fluorouridine-3'-phosphate
  modified_base 16: mod_base = OTHER; note = 2'-O-methylguanosine-3'-phosphate
  modified_base 17: mod_base = OTHER; note = 2'-fluoroadenosine-3'-phosphate
  modified_base 18: mod_base = OTHER; note = 2'-O-methyluridine-3'-phosphate
  modified_base 19: mod_base = OTHER; note = 2'-fluorouridine-3'-phosphate
  modified_base 20: mod_base = OTHER; note = 2'-O-methyluridine-3'-phosphate
  modified_base 21: mod_base = OTHER; note = 2'-fluorouridine-3'-phosphate attached to N-[tris(N-acetylgalactosamine-alkyl)-amidodecanoyl)]-4-hydr oxyprolinol Hyp-(N-acetylgalactosamine-alkyl)3
atggtggtaatttgtgatttt

SEQ ID NO: 38 - RNA, 21 nt, synthetic construct
  misc_feature 1..21: note = Description of Artificial Sequence: Synthetic oligonucleotide
  source 1..21: mol_type = other RNA
  modified_base 1: mod_base = OTHER; note = 2'-fluoroguanosine-3'-phosphorothioate
  modified_base 2: mod_base = OTHER; note = 2'-O-methyladenosine-3'- phosphorothioate
  modified_base 3: mod_base = OTHER; note = 2'-fluorocytidine-3'-phosphate
  modified_base 4: mod_base = OTHER; note = 2'-O-methyluridine-3'-phosphate
  modified_base 5: mod_base = OTHER; note = 2'-fluorouridine-3'-phosphate
  modified_base 6: mod_base = OTHER; note = 2'-O-methylguanosine-3'-phosphate
  modified_base 7: mod_base = OTHER; note = 2'-fluorocytidine-3'-phosphate
  modified_base 8: mod_base = OTHER; note = 2'-O-methyladenosine-3'-phosphate
  modified_base 9: mod_base = OTHER; note = 2'-fluorouridine-3'-phosphate
  modified_base 10: mod_base = OTHER; note = 2'-fluorocytidine-3'-phosphate
  modified_base 11: mod_base = OTHER; note = 2'-fluorocytidine-3'-phosphate
  modified_base 12: mod_base = OTHER; note = 2'-O-methyluridine-3'-phosphate
  modified_base 13: mod_base = OTHER; note = 2'-fluoroguanosine-3'-phosphate
  modified_base 14: mod_base = OTHER; note = 2'-O-methylguanosine-3'-phosphate
  modified_base 15: mod_base = OTHER; note = 2'-fluoroadenosine-3'-phosphate
  modified_base 16: mod_base = OTHER; note = 2'-O-methyladenosine-3'-phosphate
  modified_base 17: mod_base = OTHER; note = 2'-fluoroadenosine-3'-phosphate
  modified_base 18: mod_base = OTHER; note = 2'-O-methyluridine-3'-phosphate
  modified_base 19: mod_base = OTHER; note = 2'-fluoroadenosine-3'-phosphate
  modified_base 20: mod_base = OTHER; note = 2'-O-methyluridine-3'-phosphate
  modified_base 21: mod_base = OTHER; note = 2'-fluoroadenosine-3'-phosphate attached to N-[tris(N-acetylgalactosamine-alkyl)-amidodecanoyl)]-4-hydr oxyprolinol Hyp-(N-acetylgalactosamine-alkyl)3
gacttgcatcctggaaatata

SEQ ID NO: 39 - RNA, 21 nt, synthetic construct
  misc_feature 1..21: note = Description of Artificial Sequence: Synthetic oligonucleotide
  source 1..21: mol_type = other RNA
  modified_base 1: mod_base = OTHER; note = 2'-fluoroguanosine-3'-phosphorothioate
  modified_base 2: mod_base = OTHER; note = 2'-O-methylguanosine-3'- phosphorothioate
  modified_base 3: mod_base = OTHER; note = 2'-fluoroadenosine-3'-phosphate
  modified_base 4: mod_base = OTHER; note = 2'-O-methyladenosine-3'-phosphate
  modified_base 5: mod_base = OTHER; note = 2'-fluoroguanosine-3'-phosphate
  modified_base 6: mod_base = OTHER; note = 2'-O-methylguanosine-3'-phosphate
  modified_base 7: mod_base = OTHER; note = 2'-fluoroguanosine-3'-phosphate
  modified_base 8: mod_base = OTHER; note = 2'-O-methyladenosine-3'-phosphate
  modified_base 9: mod_base = OTHER; note = 2'-fluoroadenosine-3'-phosphate
  modified_base 10: mod_base = OTHER; note = 2'-fluoroguanosine-3'-phosphate
  modified_base 11: mod_base = OTHER; note = 2'-fluoroguanosine-3'-phosphate
  modified_base 12: mod_base = OTHER; note = 2'-O-methyluridine-3'-phosphate
  modified_base 13: mod_base = OTHER; note = 2'-fluoroadenosine-3'-phosphate
  modified_base 14: mod_base = OTHER; note = 2'-O-methylguanosine-3'-phosphate
  modified_base 15: mod_base = OTHER; note = 2'-fluoroadenosine-3'-phosphate
  modified_base 16: mod_base = OTHER; note = 2'-O-methyladenosine-3'-phosphate
  modified_base 17: mod_base = OTHER; note = 2'-fluoroguanosine-3'-phosphate
  modified_base 18: mod_base = OTHER; note = 2'-O-methyluridine-3'-phosphate
  modified_base 19: mod_base = OTHER; note = 2'-fluorocytidine-3'-phosphate
  modified_base 20: mod_base = OTHER; note = 2'-O-methyluridine-3'-phosphate
  modified_base 21: mod_base = OTHER; note = 2'-fluorouridine-3'-phosphate attached to N-[tris(N-acetylgalactosamine-alkyl)-amidodecanoyl)]-4-hydr oxyprolinol Hyp-(N-acetylgalactosamine-alkyl)3
ggaagggaaggtagaagtctt

SEQ ID NO: 40 - RNA, 21 nt, synthetic construct
  misc_feature 1..21: note = Description of Artificial Sequence: Synthetic oligonucleotide
  source 1..21: mol_type = other RNA
  modified_base 1: mod_base = OTHER; note = 2'-fluorouridine -3'-phosphorothioate
  modified_base 2: mod_base = OTHER; note = 2'-O-methylguanosine-3'- phosphorothioate
  modified_base 3: mod_base = OTHER; note = 2'-fluorouridine-3'-phosphate
  modified_base 4: mod_base = OTHER; note = 2'-O-methylcytidine-3'-phosphate
  modified_base 5: mod_base = OTHER; note = 2'-fluorouridine-3'-phosphate
  modified_base 6: mod_base = OTHER; note = 2'-O-methyluridine-3'-phosphate
  modified_base 7: mod_base = OTHER; note = 2'-fluorocytidine-3'-phosphate
  modified_base 8: mod_base = OTHER; note = 2'-O-methyluridine-3'-phosphate
  modified_base 9: mod_base = OTHER; note = 2'-fluoroguanosine-3'-phosphate
  modified_base 10: mod_base = OTHER; note = 2'-fluorouridine-3'-phosphate
  modified_base 11: mod_base = OTHER; note = 2'-fluorouridine-3'-phosphate
  modified_base 12: mod_base = OTHER; note = 2'-O-methyluridine-3'-phosphate
  modified_base 13: mod_base = OTHER; note = 2'-fluoroadenosine-3'-phosphate
  modified_base 14: mod_base = OTHER; note = 2'-O-methylguanosine-3'-phosphate
  modified_base 15: mod_base = OTHER; note = 2'-fluoroadenosine-3'-phosphate
  modified_base 16: mod_base = OTHER; note = 2'-O-methyluridine-3'-phosphate
  modified_base 17: mod_base = OTHER; note = 2'-fluorouridine-3'-phosphate
  modified_base 18: mod_base = OTHER; note = 2'-O-methyluridine-3'-phosphate
  modified_base 19: mod_base = OTHER; note = 2'-fluorocytidine-3'-phosphate
  modified_base 20: mod_base = OTHER; note = 2'-O-methylcytidine-3'-phosphate
  modified_base 21: mod_base = OTHER; note = 2'-fluorouridine-3'-phosphate attached to N-[tris(N-acetylgalactosamine-alkyl)-amidodecanoyl)]-4-hydr oxyprolinol Hyp-(N-acetylgalactosamine-alkyl)3
tgtcttctgtttagatttcct

SEQ ID NO: 41 - RNA, 21 nt, synthetic construct
  misc_feature 1..21: note = Description of Artificial Sequence: Synthetic oligonucleotide
  source 1..21: mol_type = other RNA
  modified_base 1: mod_base = OTHER; note = 2'-fluorocytidine-3'-phosphorothioate
  modified_base 2: mod_base = OTHER; note = 2'-O-methyluridine-3'-phosphorothioate
  modified_base 3: mod_base = OTHER; note = 2'-fluorouridine-3'-phosphate
  modified_base 4: mod_base = OTHER; note = 2'-O-methyluridine-3'-phosphate
  modified_base 5: mod_base = OTHER; note = 2'-fluoroguanosine-3'-phosphate
  modified_base 6: mod_base = OTHER; note = 2'-O-methylguanosine-3'-phosphate
  modified_base 7: mod_base = OTHER; note = 2'-fluorocytidine-3'-phosphate
  modified_base 8: mod_base = OTHER; note = 2'-O-methyluridine-3'-phosphate
  modified_base 9: mod_base = OTHER; note = 2'-fluoroguanosine-3'-phosphate
  modified_base 10: mod_base = OTHER; note = 2'-fluorouridine-3'-phosphate
  modified_base 11: mod_base = OTHER; note = 2'-fluorouridine-3'-phosphate
  modified_base 12: mod_base = OTHER; note = 2'-O-methyluridine-3'-phosphate
  modified_base 13: mod_base = OTHER; note = 2'-fluorocytidine-3'-phosphate
  modified_base 14: mod_base = OTHER; note = 2'-O-methylcytidine-3'-phosphate
  modified_base 15: mod_base = OTHER; note = 2'-fluoroadenosine-3'-phosphate
  modified_base 16: mod_base = OTHER; note = 2'-O-methyladenosine-3'-phosphate
  modified_base 17: mod_base = OTHER; note = 2'-fluoroguanosine-3'-phosphate
  modified_base 18: mod_base = OTHER; note = 2'-O-methyladenosine-3'-phosphate
  modified_base 19: mod_base = OTHER; note = 2'-fluorouridine-3'-phosphate
  modified_base 20: mod_base = OTHER; note = 2'-O-methylcytidine-3'-phosphate
  modified_base 21: mod_base = OTHER; note = 2'-fluorouridine-3'-phosphate attached to N-[tris(N-acetylgalactosamine-alkyl)-amidodecanoyl)]-4-hydr oxyprolinol Hyp-(N-acetylgalactosamine-alkyl)3
ctttggctgtttccaagatct

SEQ ID NO: 42 - RNA, 21 nt, synthetic construct
  misc_feature 1..21: note = Description of Artificial Sequence: Synthetic oligonucleotide
  source 1..21: mol_type = other RNA
  modified_base 1: mod_base = OTHER; note = 2'-fluoroadenosine-3'-phosphorothioate
  modified_base 2: mod_base = OTHER; note = 2'-O-methyladenosine-3'- phosphorothioate
  modified_base 3: mod_base = OTHER; note = 2'-fluorouridine-3'-phosphate
  modified_base 4: mod_base = OTHER; note = 2'-O-methylguanosine-3'-phosphate
  modified_base 5: mod_base = OTHER; note = 2'-fluorouridine-3'-phosphate
  modified_base 6: mod_base = OTHER; note = 2'-O-methylguanosine-3'-phosphate
  modified_base 7: mod_base = OTHER; note = 2'-fluorouridine-3'-phosphate
  modified_base 8: mod_base = OTHER; note = 2'-O-methyluridine-3'-phosphate
  modified_base 9: mod_base = OTHER; note = 2'-fluorouridine-3'-phosphate
  modified_base 10: mod_base = OTHER; note = 2'-fluoroguanosine-3'-phosphate
  modified_base 11: mod_base = OTHER; note = 2'-fluoroguanosine-3'-phosphate
  modified_base 12: mod_base = OTHER; note = 2'-O-methylguanosine-3'-phosphate
  modified_base 13: mod_base = OTHER; note = 2'-fluorocytidine-3'-phosphate
  modified_base 14: mod_base = OTHER; note = 2'-O-methyladenosine-3'-phosphate
  modified_base 15: mod_base = OTHER; note = 2'-fluoroadenosine-3'-phosphate
  modified_base 16: mod_base = OTHER; note = 2'-O-methylcytidine-3'-phosphate
  modified_base 17: mod_base = OTHER; note = 2'-fluoroguanosine-3'-phosphate
  modified_base 18: mod_base = OTHER; note = 2'-O-methyluridine-3'-phosphate
  modified_base 19: mod_base = OTHER; note = 2'-fluorocytidine-3'-phosphate
  modified_base 20: mod_base = OTHER; note = 2'-O-methyladenosine-3'-phosphate
  modified_base 21: mod_base = OTHER; note = 2'-fluorouridine-3'-phosphate attached to N-[tris(N-acetylgalactosamine-alkyl)-amidodecanoyl)]-4-hydr oxyprolinol Hyp-(N-acetylgalactosamine-alkyl)3
aatgtgtttgggcaacgtcat

SEQ ID NO: 43 - RNA, 21 nt, synthetic construct
  misc_feature 1..21: note = Description of Artificial Sequence: Synthetic oligonucleotide
  source 1..21: mol_type = other RNA
  modified_base 1: mod_base = OTHER; note = 2'-fluorouridine -3'-phosphorothioate
  modified_base 2: mod_base = OTHER; note = 2'-O-methylguanosine-3'- phosphorothioate
  modified_base 3: mod_base = OTHER; note = 2'-fluorouridine-3'-phosphate
  modified_base 4: mod_base = OTHER; note = 2'-O-methylguanosine-3'-phosphate
  modified_base 5: mod_base = OTHER; note = 2'-fluoroadenosine-3'-phosphate
  modified_base 6: mod_base = OTHER; note = 2'-O-methylcytidine-3'-phosphate
  modified_base 7: mod_base = OTHER; note = 2'-fluorouridine-3'-phosphate
  modified_base 8: mod_base = OTHER; note = 2'-O-methylguanosine-3'-phosphate
  modified_base 9: mod_base = OTHER; note = 2'-fluorouridine-3'-phosphate
  modified_base 10: mod_base = OTHER; note = 2'-fluoroguanosine-3'-phosphate
  modified_base 11: mod_base = OTHER; note = 2'-fluoroguanosine-3'-phosphate
  modified_base 12: mod_base = OTHER; note = 2'-O-methyladenosine-3'-phosphate
  modified_base 13: mod_base = OTHER; note = 2'-fluorocytidine-3'-phosphate
  modified_base 14: mod_base = OTHER; note = 2'-O-methyladenosine-3'-phosphate
  modified_base 15: mod_base = OTHER; note = 2'-fluorocytidine-3'-phosphate
  modified_base 16: mod_base = OTHER; note = 2'-O-methylcytidine-3'-phosphate
  modified_base 17: mod_base = OTHER; note = 2'-fluorocytidine-3'-phosphate
  modified_base 18: mod_base = OTHER; note = 2'-O-methylcytidine-3'-phosphate
  modified_base 19: mod_base = OTHER; note = 2'-fluorouridine-3'-phosphate
  modified_base 20: mod_base = OTHER; note = 2'-O-methyluridine-3'-phosphate
  modified_base 21: mod_base = OTHER; note = 2'-fluoroadenosine-3'-phosphate attached to N-[tris(N-acetylgalactosamine-alkyl)-amidodecanoyl)]-4-hydr oxyprolinol Hyp-(N-acetylgalactosamine-alkyl)3
tgtgactgtggacacccctta

SEQ ID NO: 44 - RNA, 21 nt, synthetic construct
  misc_feature 1..21: note = Description of Artificial Sequence: Synthetic oligonucleotide
  source 1..21: mol_type = other RNA
  modified_base 1: mod_base = OTHER; note = 2'-fluoroguanosine-3'-phosphorothioate
  modified_base 2: mod_base = OTHER; note = 2'-O-methyladenosine-3'- phosphorothioate
  modified_base 3: mod_base = OTHER; note = 2'-fluorouridine-3'-phosphate
  modified_base 4: mod_base = OTHER; note = 2'-O-methylguanosine-3'-phosphate
  modified_base 5: mod_base = OTHER; note = 2'-fluoroguanosine-3'-phosphate
  modified_base 6: mod_base = OTHER; note = 2'-O-methylguanosine-3'-phosphate
  modified_base 7: mod_base = OTHER; note = 2'-fluoroguanosine-3'-phosphate
  modified_base 8: mod_base = OTHER; note = 2'-O-methyluridine-3'-phosphate
  modified_base 9: mod_base = OTHER; note = 2'-fluoroguanosine-3'-phosphate
  modified_base 10: mod_base = OTHER; note = 2'-fluorocytidine-3'-phosphate
  modified_base 11: mod_base = OTHER; note = 2'-fluorocytidine-3'-phosphate
  modified_base 12: mod_base = OTHER; note = 2'-O-methyladenosine-3'-phosphate
  modified_base 13: mod_base = OTHER; note = 2'-fluoroguanosine-3'-phosphate
  modified_base 14: mod_base = OTHER; note = 2'-O-methylcytidine-3'-phosphate
  modified_base 15: mod_base = OTHER; note = 2'-fluorouridine-3'-phosphate
  modified_base 16: mod_base = OTHER; note = 2'-O-methyladenosine-3'-phosphate
  modified_base 17: mod_base = OTHER; note = 2'-fluorocytidine-3'-phosphate
  modified_base 18: mod_base = OTHER; note = 2'-O-methyluridine-3'-phosphate
  modified_base 19: mod_base = OTHER; note = 2'-fluoroadenosine-3'-phosphate
  modified_base 20: mod_base = OTHER; note = 2'-O-methyluridine-3'-phosphate
  modified_base 21: mod_base = OTHER; note = 2'-fluorouridine-3'-phosphate attached to N-[tris(N-acetylgalactosamine-alkyl)-amidodecanoyl)]-4-hydr oxyprolinol Hyp-(N-acetylgalactosamine-alkyl)3
gatggggtgccagctactatt

SEQ ID NO: 45 - RNA, 21 nt, synthetic construct
  misc_feature 1..21: note = Description of Artificial Sequence: Synthetic oligonucleotide
  source 1..21: mol_type = other RNA
  modified_base 1: mod_base = OTHER; note = 2'-fluoroguanosine-3'-phosphorothioate
  modified_base 2: mod_base = OTHER; note = 2'-O-methyladenosine-3'- phosphorothioate
  modified_base 3: mod_base = OTHER; note = 2'-fluoroadenosine-3'-phosphate
  modified_base 4: mod_base = OTHER; note = 2'-O-methyladenosine-3'-phosphate
  modified_base 5: mod_base = OTHER; note = 2'-fluoroadenosine-3'-phosphate
  modified_base 6: mod_base = OTHER; note = 2'-O-methyluridine-3'-phosphate
  modified_base 7: mod_base = OTHER; note = 2'-fluoroguanosine-3'-phosphate
  modified_base 8: mod_base = OTHER; note = 2'-O-methyluridine-3'-phosphate
  modified_base 9: mod_base = OTHER; note = 2'-fluoroguanosine-3'-phosphate
  modified_base 10: mod_base = OTHER; note = 2'-fluorouridine-3'-phosphate
  modified_base 11: mod_base = OTHER; note = 2'-fluorouridine-3'-phosphate
  modified_base 12: mod_base = OTHER; note = 2'-O-methyluridine-3'-phosphate
  modified_base 13: mod_base = OTHER; note = 2'-fluoroguanosine-3'-phosphate
  modified_base 14: mod_base = OTHER; note = 2'-O-methylguanosine-3'-phosphate
  modified_base 15: mod_base = OTHER; note = 2'-fluoroguanosine-3'-phosphate
  modified_base 16: mod_base = OTHER; note = 2'-O-methylcytidine-3'-phosphate
  modified_base 17: mod_base = OTHER; note = 2'-fluoroadenosine-3'-phosphate
  modified_base 18: mod_base = OTHER; note = 2'-O-methyladenosine-3'-phosphate
  modified_base 19: mod_base = OTHER; note = 2'-fluorocytidine-3'-phosphate
  modified_base 20: mod_base = OTHER; note = 2'-O-methylguanosine-3'-phosphate
  modified_base 21: mod_base = OTHER; note = 2'-fluorouridine-3'-phosphate attached to N-[tris(N-acetylgalactosamine-alkyl)-amidodecanoyl)]-4-hydr oxyprolinol Hyp-(N-acetylgalactosamine-alkyl)3
gaaaatgtgtttgggcaacgt

SEQ ID NO: 46 - RNA, 21 nt, synthetic construct
  misc_feature 1..21: note = Description of Artificial Sequence: Synthetic oligonucleotide
  source 1..21: mol_type = other RNA
  modified_base 1: mod_base = OTHER; note = 2'-fluoroguanosine-3'-phosphorothioate
  modified_base 2: mod_base = OTHER; note = 2'-O-methylguanosine-3'- phosphorothioate
  modified_base 3: mod_base = OTHER; note = 2'-fluorocytidine-3'-phosphate
  modified_base 4: mod_base = OTHER; note = 2'-O-methyluridine-3'-phosphate
  modified_base 5: mod_base = OTHER; note = 2'-fluoroguanosine-3'-phosphate
  modified_base 6: mod_base = OTHER; note = 2'-O-methyluridine-3'-phosphate
  modified_base 7: mod_base = OTHER; note = 2'-fluorouridine-3'-phosphate
  modified_base 8: mod_base = OTHER; note = 2'-O-methyluridine-3'-phosphate
  modified_base 9: mod_base = OTHER; note = 2'-fluorocytidine-3'-phosphate
  modified_base 10: mod_base = OTHER; note = 2'-fluorocytidine-3'-phosphate
  modified_base 11: mod_base = OTHER; note = 2'-fluoroadenosine-3'-phosphate
  modified_base 12: mod_base = OTHER; note = 2'-O-methyladenosine-3'-phosphate
  modified_base 13: mod_base = OTHER; note = 2'-fluoroguanosine-3'-phosphate
  modified_base 14: mod_base = OTHER; note = 2'-O-methyladenosine-3'-phosphate
  modified_base 15: mod_base = OTHER; note = 2'-fluorouridine-3'-phosphate
  modified_base 16: mod_base = OTHER; note = 2'-O-methylcytidine-3'-phosphate
  modified_base 17: mod_base = OTHER; note = 2'-fluorouridine-3'-phosphate
  modified_base 18: mod_base = OTHER; note = 2'-O-methylguanosine-3'-phosphate
  modified_base 19: mod_base = OTHER; note = 2'-fluoroadenosine-3'-phosphate
  modified_base 20: mod_base = OTHER; note = 2'-O-methylcytidine-3'-phosphate
  modified_base 21: mod_base = OTHER; note = 2'-fluoroadenosine-3'-phosphate attached to N-[tris(N-acetylgalactosamine-alkyl)-amidodecanoyl)]-4-hydr oxyprolinol Hyp-(N-acetylgalactosamine-alkyl)3
ggctgtttccaagatctgaca

SEQ ID NO: 47 - RNA, 21 nt, synthetic construct
  misc_feature 1..21: note = Description of Artificial Sequence: Synthetic oligonucleotide
  source 1..21: mol_type = other RNA
  modified_base 1: mod_base = OTHER; note = 2'-fluorouridine -3'-phosphorothioate
  modified_base 2: mod_base = OTHER; note = 2'-O-methylcytidine-3'- phosphorothioate
  modified_base 3: mod_base = OTHER; note = 2'-fluorocytidine-3'-phosphate
  modified_base 4: mod_base = OTHER; note = 2'-O-methyladenosine-3'-phosphate
  modified_base 5: mod_base = OTHER; note = 2'-fluoroadenosine-3'-phosphate
  modified_base 6: mod_base = OTHER; note = 2'-O-methylcytidine-3'-phosphate
  modified_base 7: mod_base = OTHER; note = 2'-fluoroadenosine-3'-phosphate
  modified_base 8: mod_base = OTHER; note = 2'-O-methyladenosine-3'-phosphate
  modified_base 9: mod_base = OTHER; note = 2'-fluoroadenosine-3'-phosphate
  modified_base 10: mod_base = OTHER; note = 2'-fluoroadenosine-3'-phosphate
  modified_base 11: mod_base = OTHER; note = 2'-fluorouridine-3'-phosphate
  modified_base 12: mod_base = OTHER; note = 2'-O-methyladenosine-3'-phosphate
  modified_base 13: mod_base = OTHER; note = 2'-fluoroguanosine-3'-phosphate
  modified_base 14: mod_base = OTHER; note = 2'-O-methylcytidine-3'-phosphate
  modified_base 15: mod_base = OTHER; note = 2'-fluorocytidine-3'-phosphate
  modified_base 16: mod_base = OTHER; note = 2'-O-methyladenosine-3'-phosphate
  modified_base 17: mod_base = OTHER; note = 2'-fluorocytidine-3'-phosphate
  modified_base 18: mod_base = OTHER; note = 2'-O-methylcytidine-3'-phosphate
  modified_base 19: mod_base = OTHER; note = 2'-fluorocytidine-3'-phosphate
  modified_base 20: mod_base = OTHER; note = 2'-O-methylcytidine-3'-phosphate
  modified_base 21: mod_base = OTHER; note = 2'-fluorouridine-3'-phosphate attached to N-[tris(N-acetylgalactosamine-alkyl)-amidodecanoyl)]-4-hydr oxyprolinol Hyp-(N-acetylgalactosamine-alkyl)3
tccaacaaaatagccacccct

SEQ ID NO: 48 - RNA, 21 nt, synthetic construct
  misc_feature 1..21: note = Description of Artificial Sequence: Synthetic oligonucleotide
  source 1..21: mol_type = other RNA
  modified_base 1: mod_base = OTHER; note = 2'-fluoroguanosine-3'-phosphorothioate
  modified_base 2: mod_base = OTHER; note = 2'-O-methyluridine-3'-phosphorothioate
  modified_base 3: mod_base = OTHER; note = 2'-fluorocytidine-3'-phosphate
  modified_base 4: mod_base = OTHER; note = 2'-O-methyluridine-3'-phosphate
  modified_base 5: mod_base = OTHER; note = 2'-fluorouridine-3'-phosphate
  modified_base 6: mod_base = OTHER; note = 2'-O-methylcytidine-3'-phosphate
  modified_base 7: mod_base = OTHER; note = 2'-fluorouridine-3'-phosphate
  modified_base 8: mod_base = OTHER; note = 2'-O-methylguanosine-3'-phosphate
  modified_base 9: mod_base = OTHER; note = 2'-fluorouridine-3'-phosphate
  modified_base 10: mod_base = OTHER; note = 2'-fluorouridine-3'-phosphate
  modified_base 11: mod_base = OTHER; note = 2'-fluorouridine-3'-phosphate
  modified_base 12: mod_base = OTHER; note = 2'-O-methyladenosine-3'-phosphate
  modified_base 13: mod_base = OTHER; note = 2'-fluoroguanosine-3'-phosphate
  modified_base 14: mod_base = OTHER; note = 2'-O-methyladenosine-3'-phosphate
  modified_base 15: mod_base = OTHER; note = 2'-fluorouridine-3'-phosphate
  modified_base 16: mod_base = OTHER; note = 2'-O-methyluridine-3'-phosphate
  modified_base 17: mod_base = OTHER; note = 2'-fluorouridine-3'-phosphate
  modified_base 18: mod_base = OTHER; note = 2'-O-methylcytidine-3'-phosphate
  modified_base 19: mod_base = OTHER; note = 2'-fluorocytidine-3'-phosphate
  modified_base 20: mod_base = OTHER; note = 2'-O-methyluridine-3'-phosphate
  modified_base 21: mod_base = OTHER; note = 2'-fluorouridine-3'-phosphate attached to N-[tris(N-acetylgalactosamine-alkyl)-amidodecanoyl)]-4-hydr oxyprolinol Hyp-(N-acetylgalactosamine-alkyl)3
gtcttctgtttagatttcctt

SEQ ID NO: 49 - RNA, 21 nt, synthetic construct
  misc_feature 1..21: note = Description of Artificial Sequence: Synthetic oligonucleotide
  source 1..21: mol_type = other RNA
  modified_base 1: mod_base = OTHER; note = 2'-fluorouridine -3'-phosphorothioate
  modified_base 2: mod_base = OTHER; note = 2'-O-methylguanosine-3'- phosphorothioate
  modified_base 3: mod_base = OTHER; note = 2'-fluoroguanosine-3'-phosphate
  modified_base 4: mod_base = OTHER; note = 2'-O-methyladenosine-3'-phosphate
  modified_base 5: mod_base = OTHER; note = 2'-fluoroadenosine-3'-phosphate
  modified_base 6: mod_base = OTHER; note = 2'-O-methylguanosine-3'-phosphate
  modified_base 7: mod_base = OTHER; note = 2'-fluoroguanosine-3'-phosphate
  modified_base 8: mod_base = OTHER; note = 2'-O-methylguanosine-3'-phosphate
  modified_base 9: mod_base = OTHER; note = 2'-fluoroadenosine-3'-phosphate
  modified_base 10: mod_base = OTHER; note = 2'-fluoroadenosine-3'-phosphate
  modified_base 11: mod_base = OTHER; note = 2'-fluoroguanosine-3'-phosphate
  modified_base 12: mod_base = OTHER; note = 2'-O-methylguanosine-3'-phosphate
  modified_base 13: mod_base = OTHER; note = 2'-fluorouridine-3'-phosphate
  modified_base 14: mod_base = OTHER; note = 2'-O-methyladenosine-3'-phosphate
  modified_base 15: mod_base = OTHER; note = 2'-fluoroguanosine-3'-phosphate
  modified_base 16: mod_base = OTHER; note = 2'-O-methyladenosine-3'-phosphate
  modified_base 17: mod_base = OTHER; note = 2'-fluoroadenosine-3'-phosphate
  modified_base 18: mod_base = OTHER; note = 2'-O-methylguanosine-3'-phosphate
  modified_base 19: mod_base = OTHER; note = 2'-fluorouridine-3'-phosphate
  modified_base 20: mod_base = OTHER; note = 2'-O-methylcytidine-3'-phosphate
  modified_base 21: mod_base = OTHER; note = 2'-fluorouridine-3'-phosphate attached to N-[tris(N-acetylgalactosamine-alkyl)-amidodecanoyl)]-4-hydr oxyprolinol Hyp-(N-acetylgalactosamine-alkyl)3
tggaagggaaggtagaagtct

SEQ ID NO: 50 - RNA, 21 nt, synthetic construct
  misc_feature 1..21: note = Description of Artificial Sequence: Synthetic oligonucleotide
  source 1..21: mol_type = other RNA
  modified_base 1: mod_base = OTHER; note = 2'-fluorouridine -3'-phosphorothioate
  modified_base 2: mod_base = OTHER; note = 2'-O-methylcytidine-3'- phosphorothioate
  modified_base 3: mod_base = OTHER; note = 2'-fluorocytidine-3'-phosphate
  modified_base 4: mod_base = OTHER; note = 2'-O-methyluridine-3'-phosphate
  modified_base 5: mod_base = OTHER; note = 2'-fluorouridine-3'-phosphate
  modified_base 6: mod_base = OTHER; note = 2'-O-methyluridine-3'-phosphate
  modified_base 7: mod_base = OTHER; note = 2'-fluoroguanosine-3'-phosphate
  modified_base 8: mod_base = OTHER; note = 2'-O-methylguanosine-3'-phosphate
  modified_base 9: mod_base = OTHER; note = 2'-fluorocytidine-3'-phosphate
  modified_base 10: mod_base = OTHER; note = 2'-fluorouridine-3'-phosphate
  modified_base 11: mod_base = OTHER; note = 2'-fluoroguanosine-3'-phosphate
  modified_base 12: mod_base = OTHER; note = 2'-O-methyluridine-3'-phosphate
  modified_base 13: mod_base = OTHER; note = 2'-fluorouridine-3'-phosphate
  modified_base 14: mod_base = OTHER; note = 2'-O-methyluridine-3'-phosphate
  modified_base 15: mod_base = OTHER; note = 2'-fluorocytidine-3'-phosphate
  modified_base 16: mod_base = OTHER; note = 2'-O-methylcytidine-3'-phosphate
  modified_base 17: mod_base = OTHER; note = 2'-fluoroadenosine-3'-phosphate
  modified_base 18: mod_base = OTHER; note = 2'-O-methyladenosine-3'-phosphate
  modified_base 19: mod_base = OTHER; note = 2'-fluoroguanosine-3'-phosphate
  modified_base 20: mod_base = OTHER; note = 2'-O-methyladenosine-3'-phosphate
  modified_base 21: mod_base = OTHER; note = 2'-fluorouridine-3'-phosphate attached to N-[tris(N-acetylgalactosamine-alkyl)-amidodecanoyl)]-4-hydr oxyprolinol Hyp-(N-acetylgalactosamine-alkyl)3
tcctttggctgtttccaagat

SEQ ID NO: 51 - RNA, 21 nt, synthetic construct
  misc_feature 1..21: note = Description of Artificial Sequence: Synthetic oligonucleotide
  source 1..21: mol_type = other RNA
  modified_base 1: mod_base = OTHER; note = 2'-fluorocytidine-3'-phosphorothioate
  modified_base 2: mod_base = OTHER; note = 2'-O-methyladenosine-3'- phosphorothioate
  modified_base 3: mod_base = OTHER; note = 2'-fluorouridine-3'-phosphate
  modified_base 4: mod_base = OTHER; note = 2'-O-methylcytidine-3'-phosphate
  modified_base 5: mod_base = OTHER; note = 2'-fluorouridine-3'-phosphate
  modified_base 6: mod_base = OTHER; note = 2'-O-methylcytidine-3'-phosphate
  modified_base 7: mod_base = OTHER; note = 2'-fluorouridine-3'-phosphate
  modified_base 8: mod_base = OTHER; note = 2'-O-methylcytidine-3'-phosphate
  modified_base 9: mod_base = OTHER; note = 2'-fluoroadenosine-3'-phosphate
  modified_base 10: mod_base = OTHER; note = 2'-fluoroguanosine-3'-phosphate
  modified_base 11: mod_base = OTHER; note = 2'-fluorocytidine-3'-phosphate
  modified_base 12: mod_base = OTHER; note = 2'-O-methyluridine-3'-phosphate
  modified_base 13: mod_base = OTHER; note = 2'-fluoroguanosine-3'-phosphate
  modified_base 14: mod_base = OTHER; note = 2'-O-methylguanosine-3'-phosphate
  modified_base 15: mod_base = OTHER; note = 2'-fluoroguanosine-3'-phosphate
  modified_base 16: mod_base = OTHER; note = 2'-O-methyladenosine-3'-phosphate
  modified_base 17: mod_base = OTHER; note = 2'-fluorouridine-3'-phosphate
  modified_base 18: mod_base = OTHER; note = 2'-O-methylguanosine-3'-phosphate
  modified_base 19: mod_base = OTHER; note = 2'-fluoroadenosine-3'-phosphate
  modified_base 20: mod_base = OTHER; note = 2'-O-methyluridine-3'-phosphate
  modified_base 21: mod_base = OTHER; note = 2'-fluoroadenosine-3'-phosphate attached to N-[tris(N-acetylgalactosamine-alkyl)-amidodecanoyl)]-4-hydr oxyprolinol Hyp-(N-acetylgalactosamine-alkyl)3
catctctcagctgggatgata

SEQ ID NO: 52 - RNA, 21 nt, synthetic construct
  misc_feature 1..21: note = Description of Artificial Sequence: Synthetic oligonucleotide
  source 1..21: mol_type = other RNA
  modified_base 1: mod_base = OTHER; note = 2'-fluoroguanosine-3'-phosphorothioate
  modified_base 2: mod_base = OTHER; note = 2'-O-methylguanosine-3'- phosphorothioate
  modified_base 3: mod_base = OTHER; note = 2'-fluoroguanosine-3'-phosphate
  modified_base 4: mod_base = OTHER; note = 2'-O-methylguanosine-3'-phosphate
  modified_base 5: mod_base = OTHER; note = 2'-fluorouridine-3'-phosphate
  modified_base 6: mod_base = OTHER; note = 2'-O-methylguanosine-3'-phosphate
  modified_base 7: mod_base = OTHER; note = 2'-fluorocytidine-3'-phosphate
  modified_base 8: mod_base = OTHER; note = 2'-O-methylcytidine-3'-phosphate
  modified_base 9: mod_base = OTHER; note = 2'-fluoroadenosine-3'-phosphate
  modified_base 10: mod_base = OTHER; note = 2'-fluoroguanosine-3'-phosphate
  modified_base 11: mod_base = OTHER; note = 2'-fluorocytidine-3'-phosphate
  modified_base 12: mod_base = OTHER; note = 2'-O-methyluridine-3'-phosphate
  modified_base 13: mod_base = OTHER; note = 2'-fluoroadenosine-3'-phosphate
  modified_base 14: mod_base = OTHER; note = 2'-O-methylcytidine-3'-phosphate
  modified_base 15: mod_base = OTHER; note = 2'-fluorouridine-3'-phosphate
  modified_base 16: mod_base = OTHER; note = 2'-O-methyladenosine-3'-phosphate
  modified_base 17: mod_base = OTHER; note = 2'-fluorouridine-3'-phosphate
  modified_base 18: mod_base = OTHER; note = 2'-O-methyluridine-3'-phosphate
  modified_base 19: mod_base = OTHER; note = 2'-fluoroguanosine-3'-phosphate
  modified_base 20: mod_base = OTHER; note = 2'-O-methyladenosine-3'-phosphate
  modified_base 21: mod_base = OTHER; note = 2'-fluorouridine-3'-phosphate attached to N-[tris(N-acetylgalactosamine-alkyl)-amidodecanoyl)]-4-hydr oxyprolinol Hyp-(N-acetylgalactosamine-alkyl)3
ggggtgccagctactattgat

SEQ ID NO: 53 - RNA, 21 nt, synthetic construct
  misc_feature 1..21: note = Description of Artificial Sequence: Synthetic oligonucleotide
  source 1..21: mol_type = other RNA
  modified_base 1: mod_base = OTHER; note = 2'-fluoroadenosine-3'-phosphorothioate
  modified_base 2: mod_base = OTHER; note = 2'-O-methyluridine-3'-phosphorothioate
  modified_base 3: mod_base = OTHER; note = 2'-fluoroguanosine-3'-phosphate
  modified_base 4: mod_base = OTHER; note = 2'-O-methyluridine-3'-phosphate
  modified_base 5: mod_base = OTHER; note = 2'-fluoroguanosine-3'-phosphate
  modified_base 6: mod_base = OTHER; note = 2'-O-methyluridine-3'-phosphate
  modified_base 7: mod_base = OTHER; note = 2'-fluorouridine-3'-phosphate
  modified_base 8: mod_base = OTHER; note = 2'-O-methyluridine-3'-phosphate
  modified_base 9: mod_base = OTHER; note = 2'-fluoroguanosine-3'-phosphate
  modified_base 10: mod_base = OTHER; note = 2'-fluoroguanosine-3'-phosphate
  modified_base 11: mod_base = OTHER; note = 2'-fluoroguanosine-3'-phosphate
  modified_base 12: mod_base = OTHER; note = 2'-O-methylcytidine-3'-phosphate
  modified_base 13: mod_base = OTHER; note = 2'-fluoroadenosine-3'-phosphate
  modified_base 14: mod_base = OTHER; note = 2'-O-methyladenosine-3'-phosphate
  modified_base 15: mod_base = OTHER; note = 2'-fluorocytidine-3'-phosphate
  modified_base 16: mod_base = OTHER; note = 2'-O-methylguanosine-3'-phosphate
  modified_base 17: mod_base = OTHER; note = 2'-fluorouridine-3'-phosphate
  modified_base 18: mod_base = OTHER; note = 2'-O-methylcytidine-3'-phosphate
  modified_base 19: mod_base = OTHER; note = 2'-fluoroadenosine-3'-phosphate
  modified_base 20: mod_base = OTHER; note = 2'-O-methyluridine-3'-phosphate
  modified_base 21: mod_base = OTHER; note = 2'-fluoroadenosine-3'-phosphate attached to N-[tris(N-acetylgalactosamine-alkyl)-amidodecanoyl)]-4-hydr oxyprolinol Hyp-(N-acetylgalactosamine-alkyl)3
atgtgtttgggcaacgtcata

SEQ ID NO: 54 - RNA, 21 nt, synthetic construct
  misc_feature 1..21: note = Description of Artificial Sequence: Synthetic oligonucleotide
  source 1..21: mol_type = other RNA
  modified_base 1: mod_base = OTHER; note = 2'-fluorocytidine-3'-phosphorothioate
  modified_base 2: mod_base = OTHER; note = 2'-O-methyluridine-3'-phosphorothioate
  modified_base 3: mod_base = OTHER; note = 2'-fluoroguanosine-3'-phosphate
  modified_base 4: mod_base = OTHER; note = 2'-O-methyluridine-3'-phosphate
  modified_base 5: mod_base = OTHER; note = 2'-fluorouridine-3'-phosphate
  modified_base 6: mod_base = OTHER; note = 2'-O-methyluridine-3'-phosphate
  modified_base 7: mod_base = OTHER; note = 2'-fluoroadenosine-3'-phosphate
  modified_base 8: mod_base = OTHER; note = 2'-O-methylguanosine-3'-phosphate
  modified_base 9: mod_base = OTHER; note = 2'-fluoroadenosine-3'-phosphate
  modified_base 10: mod_base = OTHER; note = 2'-fluorouridine-3'-phosphate
  modified_base 11: mod_base = OTHER; note = 2'-fluorouridine-3'-phosphate
  modified_base 12: mod_base = OTHER; note = 2'-O-methyluridine-3'-phosphate
  modified_base 13: mod_base = OTHER; note = 2'-fluorocytidine-3'-phosphate
  modified_base 14: mod_base = OTHER; note = 2'-O-methylcytidine-3'-phosphate
  modified_base 15: mod_base = OTHER; note = 2'-fluorouridine-3'-phosphate
  modified_base 16: mod_base = OTHER; note = 2'-O-methyluridine-3'-phosphate
  modified_base 17: mod_base = OTHER; note = 2'-fluoroadenosine-3'-phosphate
  modified_base 18: mod_base = OTHER; note = 2'-O-methyladenosine-3'-phosphate
  modified_base 19: mod_base = OTHER; note = 2'-fluoroguanosine-3'-phosphate
  modified_base 20: mod_base = OTHER; note = 2'-O-methyladenosine-3'-phosphate
  modified_base 21: mod_base = OTHER; note = 2'-fluoroadenosine-3'-phosphate attached to N-[tris(N-acetylgalactosamine-alkyl)-amidodecanoyl)]-4-hydr oxyprolinol Hyp-(N-acetylgalactosamine-alkyl)3
ctgtttagatttccttaagaa

SEQ ID NO: 55 - RNA, 21 nt, synthetic construct
  misc_feature 1..21: note = Description of Artificial Sequence: Synthetic oligonucleotide
  source 1..21: mol_type = other RNA
  modified_base 1: mod_base = OTHER; note = 2'-fluoroadenosine-3'-phosphorothioate
  modified_base 2: mod_base = OTHER; note = 2'-O-methylguanosine-3'- phosphorothioate
  modified_base 3: mod_base = OTHER; note = 2'-fluoroadenosine-3'-phosphate
  modified_base 4: mod_base = OTHER; note = 2'-O-methyladenosine-3'-phosphate
  modified_base 5: mod_base = OTHER; note = 2'-fluoroadenosine-3'-phosphate
  modified_base 6: mod_base = OTHER; note = 2'-O-methylguanosine-3'-phosphate
  modified_base 7: mod_base = OTHER; note = 2'-fluoroadenosine-3'-phosphate
  modified_base 8: mod_base = OTHER; note = 2'-O-methyladenosine-3'-phosphate
  modified_base 9: mod_base = OTHER; note = 2'-fluoroadenosine-3'-phosphate
  modified_base 10: mod_base = OTHER; note = 2'-fluorouridine-3'-phosphate
  modified_base 11: mod_base = OTHER; note = 2'-fluoroguanosine-3'-phosphate
  modified_base 12: mod_base = OTHER; note = 2'-O-methylguanosine-3'-phosphate
  modified_base 13: mod_base = OTHER; note = 2'-fluoroadenosine-3'-phosphate
  modified_base 14: mod_base = OTHER; note = 2'-O-methylcytidine-3'-phosphate
  modified_base 15: mod_base = OTHER; note = 2'-fluorouridine-3'-phosphate
  modified_base 16: mod_base = OTHER; note = 2'-O-methyluridine-3'-phosphate
  modified_base 17: mod_base = OTHER; note = 2'-fluoroguanosine-3'-phosphate
  modified_base 18: mod_base = OTHER; note = 2'-O-methylcytidine-3'-phosphate
  modified_base 19: mod_base = OTHER; note = 2'-fluoroadenosine-3'-phosphate
  modified_base 20: mod_base = OTHER; note = 2'-O-methyluridine-3'-phosphate
  modified_base 21: mod_base = OTHER; note = 2'-fluoroadenosine-3'-phosphate attached to N-[tris(N-acetylgalactosamine-alkyl)-amidodecanoyl)]-4-hydr oxyprolinol Hyp-(N-acetylgalactosamine-alkyl)3
agaaagaaatggacttgcata

SEQ ID NO: 56 - RNA, 21 nt, synthetic construct
  misc_feature 1..21: note = Description of Artificial Sequence: Synthetic oligonucleotide
  source 1..21: mol_type = other RNA
  modified_base 1: mod_base = OTHER; note = 2'-fluoroguanosine-3'-phosphorothioate
  modified_base 2: mod_base = OTHER; note = 2'-O-methylcytidine-3'- phosphorothioate
  modified_base 3: mod_base = OTHER; note = 2'-fluoroadenosine-3'-phosphate
  modified_base 4: mod_base = OTHER; note = 2'-O-methyluridine-3'-phosphate
  modified_base 5: mod_base = OTHER; note = 2'-fluorocytidine-3'-phosphate
  modified_base 6: mod_base = OTHER; note = 2'-O-methylcytidine-3'-phosphate
  modified_base 7: mod_base = OTHER; note = 2'-fluorouridine-3'-phosphate
  modified_base 8: mod_base = OTHER; note = 2'-O-methylguanosine-3'-phosphate
  modified_base 9: mod_base = OTHER; note = 2'-fluoroguanosine-3'-phosphate
  modified_base 10: mod_base = OTHER; note = 2'-fluoroadenosine-3'-phosphate
  modified_base 11: mod_base = OTHER; note = 2'-fluoroadenosine-3'-phosphate
  modified_base 12: mod_base = OTHER; note = 2'-O-methyladenosine-3'-phosphate
  modified_base 13: mod_base = OTHER; note = 2'-fluorouridine-3'-phosphate
  modified_base 14: mod_base = OTHER; note = 2'-O-methyladenosine-3'-phosphate
  modified_base 15: mod_base = OTHER; note = 2'-fluorouridine-3'-phosphate
  modified_base 16: mod_base = OTHER; note = 2'-O-methyladenosine-3'-phosphate
  modified_base 17: mod_base = OTHER; note = 2'-fluorouridine-3'-phosphate
  modified_base 18: mod_base = OTHER; note = 2'-O-methyluridine-3'-phosphate
  modified_base 19: mod_base = OTHER; note = 2'-fluoroadenosine-3'-phosphate
  modified_base 20: mod_base = OTHER; note = 2'-O-methyladenosine-3'-phosphate
  modified_base 21: mod_base = OTHER; note = 2'-fluoroadenosine-3'-phosphate attached to N-[tris(N-acetylgalactosamine-alkyl)-amidodecanoyl)]-4-hydr oxyprolinol Hyp-(N-acetylgalactosamine-alkyl)3
gcatcctggaaatatattaaa

SEQ ID NO: 57 - RNA, 21 nt, synthetic construct
  misc_feature 1..21: note = Description of Artificial Sequence: Synthetic oligonucleotide
  source 1..21: mol_type = other RNA
  modified_base 1: mod_base = OTHER; note = 2'-fluorocytidine-3'-phosphorothioate
  modified_base 2: mod_base = OTHER; note = 2'-O-methylcytidine-3'- phosphorothioate
  modified_base 3: mod_base = OTHER; note = 2'-fluorouridine-3'-phosphate
  modified_base 4: mod_base = OTHER; note = 2'-O-methylguanosine-3'-phosphate
  modified_base 5: mod_base = OTHER; note = 2'-fluorouridine-3'-phosphate
  modified_base 6: mod_base = OTHER; note = 2'-O-methylcytidine-3'-phosphate
  modified_base 7: mod_base = OTHER; note = 2'-fluoroadenosine-3'-phosphate
  modified_base 8: mod_base = OTHER; note = 2'-O-methylguanosine-3'-phosphate
  modified_base 9: mod_base = OTHER; note = 2'-fluoroadenosine-3'-phosphate
  modified_base 10: mod_base = OTHER; note = 2'-fluorocytidine-3'-phosphate
  modified_base 11: mod_base = OTHER; note = 2'-fluorocytidine-3'-phosphate
  modified_base 12: mod_base = OTHER; note = 2'-O-methyladenosine-3'-phosphate
  modified_base 13: mod_base = OTHER; note = 2'-fluorouridine-3'-phosphate
  modified_base 14: mod_base = OTHER; note = 2'-O-methylguanosine-3'-phosphate
  modified_base 15: mod_base = OTHER; note = 2'-fluoroguanosine-3'-phosphate
  modified_base 16: mod_base = OTHER; note = 2'-O-methylguanosine-3'-phosphate
  modified_base 17: mod_base = OTHER; note = 2'-fluoroadenosine-3'-phosphate
  modified_base 18: mod_base = OTHER; note = 2'-O-methyladenosine-3'-phosphate
  modified_base 19: mod_base = OTHER; note = 2'-fluorocytidine-3'-phosphate
  modified_base 20: mod_base = OTHER; note = 2'-O-methyluridine-3'-phosphate
  modified_base 21: mod_base = OTHER; note = 2'-fluoroadenosine-3'-phosphate attached to N-[tris(N-acetylgalactosamine-alkyl)-amidodecanoyl)]-4-hydr oxyprolinol Hyp-(N-acetylgalactosamine-alkyl)3
cctgtcagaccatgggaacta

SEQ ID NO: 58 - RNA, 21 nt, synthetic construct
  misc_feature 1..21: note = Description of Artificial Sequence: Synthetic oligonucleotide
  source 1..21: mol_type = other RNA
  modified_base 1: mod_base = OTHER; note = 2'-fluoroadenosine-3'-phosphorothioate
  modified_base 2: mod_base = OTHER; note = 2'-O-methyladenosine-3'- phosphorothioate
  modified_base 3: mod_base = OTHER; note = 2'-fluoroadenosine-3'-phosphate
  modified_base 4: mod_base = OTHER; note = 2'-O-methylcytidine-3'-phosphate
  modified_base 5: mod_base = OTHER; note = 2'-fluoroadenosine-3'-phosphate
  modified_base 6: mod_base = OTHER; note = 2'-O-methyluridine-3'-phosphate
  modified_base 7: mod_base = OTHER; note = 2'-fluoroguanosine-3'-phosphate
  modified_base 8: mod_base = OTHER; note = 2'-O-methylguanosine-3'-phosphate
  modified_base 9: mod_base = OTHER; note = 2'-fluorouridine-3'-phosphate
  modified_base 10: mod_base = OTHER; note = 2'-fluoroguanosine-3'-phosphate
  modified_base 11: mod_base = OTHER; note = 2'-fluorouridine-3'-phosphate
  modified_base 12: mod_base = OTHER; note = 2'-O-methylguanosine-3'-phosphate
  modified_base 13: mod_base = OTHER; note = 2'-fluoroguanosine-3'-phosphate
  modified_base 14: mod_base = OTHER; note = 2'-O-methyladenosine-3'-phosphate
  modified_base 15: mod_base = OTHER; note = 2'-fluorouridine-3'-phosphate
  modified_base 16: mod_base = OTHER; note = 2'-O-methylguanosine-3'-phosphate
  modified_base 17: mod_base = OTHER; note = 2'-fluoroguanosine-3'-phosphate
  modified_base 18: mod_base = OTHER; note = 2'-O-methylguanosine-3'-phosphate
  modified_base 19: mod_base = OTHER; note = 2'-fluoroadenosine-3'-phosphate
  modified_base 20: mod_base = OTHER; note = 2'-O-methyluridine-3'-phosphate
  modified_base 21: mod_base = OTHER; note = 2'-fluoroadenosine-3'-phosphate attached to N-[tris(N-acetylgalactosamine-alkyl)-amidodecanoyl)]-4-hydr oxyprolinol Hyp-(N-acetylgalactosamine-alkyl)3
aaacatggtgtggatgggata

SEQ ID NO: 59 - RNA, 21 nt, synthetic construct
  misc_feature 1..21: note = Description of Artificial Sequence: Synthetic oligonucleotide
  source 1..21: mol_type = other RNA
  modified_base 1: mod_base = OTHER; note = 2'-fluorocytidine-3'-phosphorothioate
  modified_base 2: mod_base = OTHER; note = 2'-O-methyluridine-3'-phosphorothioate
  modified_base 3: mod_base = OTHER; note = 2'-fluorocytidine-3'-phosphate
  modified_base 4: mod_base = OTHER; note = 2'-O-methyladenosine-3'-phosphate
  modified_base 5: mod_base = OTHER; note = 2'-fluoroguanosine-3'-phosphate
  modified_base 6: mod_base = OTHER; note = 2'-O-methylguanosine-3'-phosphate
  modified_base 7: mod_base = OTHER; note = 2'-fluoroadenosine-3'-phosphate
  modified_base 8: mod_base = OTHER; note = 2'-O-methyluridine-3'-phosphate
  modified_base 9: mod_base = OTHER; note = 2'-fluoroguanosine-3'-phosphate
  modified_base 10: mod_base = OTHER; note = 2'-fluoroadenosine-3'-phosphate
  modified_base 11: mod_base = OTHER; note = 2'-fluoroadenosine-3'-phosphate
  modified_base 12: mod_base = OTHER; note = 2'-O-methyladenosine-3'-phosphate
  modified_base 13: mod_base = OTHER; note = 2'-fluoroadenosine-3'-phosphate
  modified_base 14: mod_base = OTHER; note = 2'-O-methyladenosine-3'-phosphate
  modified_base 15: mod_base = OTHER; note = 2'-fluorouridine-3'-phosphate
  modified_base 16: mod_base = OTHER; note = 2'-O-methyluridine-3'-phosphate
  modified_base 17: mod_base = OTHER; note = 2'-fluorouridine-3'-phosphate
  modified_base 18: mod_base = OTHER; note = 2'-O-methyluridine-3'-phosphate
  modified_base 19: mod_base = OTHER; note = 2'-fluoroguanosine-3'-phosphate
  modified_base 20: mod_base = OTHER; note = 2'-O-methyladenosine-3'-phosphate
  modified_base 21: mod_base = OTHER; note = 2'-fluoroadenosine-3'-phosphate attached to N-[tris(N-acetylgalactosamine-alkyl)-amidodecanoyl)]-4-hydr oxyprolinol Hyp-(N-acetylgalactosamine-alkyl)3
ctcaggatgaaaaattttgaa

SEQ ID NO: 60 - RNA, 21 nt, synthetic construct
  misc_feature 1..21: note = Description of Artificial Sequence: Synthetic oligonucleotide
  source 1..21: mol_type = other RNA
  modified_base 1: mod_base = OTHER; note = 2'-fluorocytidine-3'-phosphorothioate
  modified_base 2: mod_base = OTHER; note = 2'-O-methyladenosine-3'- phosphorothioate
  modified_base 3: mod_base = OTHER; note = 2'-fluoroguanosine-3'-phosphate
  modified_base 4: mod_base = OTHER; note = 2'-O-methylcytidine-3'-phosphate
  modified_base 5: mod_base = OTHER; note = 2'-fluoroadenosine-3'-phosphate
  modified_base 6: mod_base = OTHER; note = 2'-O-methyluridine-3'-phosphate
  modified_base 7: mod_base = OTHER; note = 2'-fluoroguanosine-3'-phosphate
  modified_base 8: mod_base = OTHER; note = 2'-O-methyluridine-3'-phosphate
  modified_base 9: mod_base = OTHER; note = 2'-fluoroadenosine-3'-phosphate
  modified_base 10: mod_base = OTHER; note = 2'-fluorouridine-3'-phosphate
  modified_base 11: mod_base = OTHER; note = 2'-fluorouridine-3'-phosphate
  modified_base 12: mod_base = OTHER; note = 2'-O-methyladenosine-3'-phosphate
  modified_base 13: mod_base = OTHER; note = 2'-fluorocytidine-3'-phosphate
  modified_base 14: mod_base = OTHER; note = 2'-O-methyluridine-3'-phosphate
  modified_base 15: mod_base = OTHER; note = 2'-fluorouridine-3'-phosphate
  modified_base 16: mod_base = OTHER; note = 2'-O-methylguanosine-3'-phosphate
  modified_base 17: mod_base = OTHER; note = 2'-fluoroadenosine-3'-phosphate
  modified_base 18: mod_base = OTHER; note = 2'-O-methylcytidine-3'-phosphate
  modified_base 19: mod_base = OTHER; note = 2'-fluoroadenosine-3'-phosphate
  modified_base 20: mod_base = OTHER; note = 2'-O-methyladenosine-3'-phosphate
  modified_base 21: mod_base = OTHER; note = 2'-fluoroadenosine-3'-phosphate attached to N-[tris(N-acetylgalactosamine-alkyl)-amidodecanoyl)]-4-hydr oxyprolinol Hyp-(N-acetylgalactosamine-alkyl)3
cagcatgtattacttgacaaa

SEQ ID NO: 61 - RNA, 21 nt, synthetic construct
  misc_feature 1..21: note = Description of Artificial Sequence: Synthetic oligonucleotide
  source 1..21: mol_type = other RNA
  modified_base 1: mod_base = OTHER; note = 2'-fluorouridine -3'-phosphorothioate
  modified_base 2: mod_base = OTHER; note = 2'-O-methyladenosine-3'- phosphorothioate
  modified_base 3: mod_base = OTHER; note = 2'-fluorouridine-3'-phosphate
  modified_base 4: mod_base = OTHER; note = 2'-O-methylguanosine-3'-phosphate
  modified_base 5: mod_base = OTHER; note = 2'-fluoroadenosine-3'-phosphate
  modified_base 6: mod_base = OTHER; note = 2'-O-methyladenosine-3'-phosphate
  modified_base 7: mod_base = OTHER; note = 2'-fluorocytidine-3'-phosphate
  modified_base 8: mod_base = OTHER; note = 2'-O-methyladenosine-3'-phosphate
  modified_base 9: mod_base = OTHER; note = 2'-fluoroadenosine-3'-phosphate
  modified_base 10: mod_base = OTHER; note = 2'-fluorocytidine-3'-phosphate
  modified_base 11: mod_base = OTHER; note = 2'-fluoroadenosine-3'-phosphate
  modified_base 12: mod_base = OTHER; note = 2'-O-methyluridine-3'-phosphate
  modified_base 13: mod_base = OTHER; note = 2'-fluoroguanosine-3'-phosphate
  modified_base 14: mod_base = OTHER; note = 2'-O-methylcytidine-3'-phosphate
  modified_base 15: mod_base = OTHER; note = 2'-fluorouridine-3'-phosphate
  modified_base 16: mod_base = OTHER; note = 2'-O-methyladenosine-3'-phosphate
  modified_base 17: mod_base = OTHER; note = 2'-fluoroadenosine-3'-phosphate
  modified_base 18: mod_base = OTHER; note = 2'-O-methyladenosine-3'-phosphate
  modified_base 19: mod_base = OTHER; note = 2'-fluorouridine-3'-phosphate
  modified_base 20: mod_base = OTHER; note = 2'-O-methylcytidine-3'-phosphate
  modified_base 21: mod_base = OTHER; note = 2'-fluoroadenosine-3'-phosphate attached to N-[tris(N-acetylgalactosamine-alkyl)-amidodecanoyl)]-4-hydr oxyprolinol Hyp-(N-acetylgalactosamine-alkyl)3
tatgaacaacatgctaaatca

SEQ ID NO: 62 - RNA, 21 nt, synthetic construct
  misc_feature 1..21: note = Description of Artificial Sequence: Synthetic oligonucleotide
  source 1..21: mol_type = other RNA
  modified_base 1: mod_base = OTHER; note = 2'-fluoroadenosine-3'-phosphorothioate
  modified_base 2: mod_base = OTHER; note = 2'-O-methyluridine-3'-phosphorothioate
  modified_base 3: mod_base = OTHER; note = 2'-fluoroadenosine-3'-phosphate
  modified_base 4: mod_base = OTHER; note = 2'-O-methyluridine-3'-phosphate
  modified_base 5: mod_base = OTHER; note = 2'-fluoroadenosine-3'-phosphate
  modified_base 6: mod_base = OTHER; note = 2'-O-methyluridine-3'-phosphate
  modified_base 7: mod_base = OTHER; note = 2'-fluorocytidine-3'-phosphate
  modified_base 8: mod_base = OTHER; note = 2'-O-methylcytidine-3'-phosphate
  modified_base 9: mod_base = OTHER; note = 2'-fluoroadenosine-3'-phosphate
  modified_base 10: mod_base = OTHER; note = 2'-fluoroadenosine-3'-phosphate
  modified_base 11: mod_base = OTHER; note = 2'-fluoroadenosine-3'-phosphate
  modified_base 12: mod_base = OTHER; note = 2'-O-methyluridine-3'-phosphate
  modified_base 13: mod_base = OTHER; note = 2'-fluoroguanosine-3'-phosphate
  modified_base 14: mod_base = OTHER; note = 2'-O-methyluridine-3'-phosphate
  modified_base 15: mod_base = OTHER; note = 2'-fluorouridine-3'-phosphate
  modified_base 16: mod_base = OTHER; note = 2'-O-methyluridine-3'-phosphate
  modified_base 17: mod_base = OTHER; note = 2'-fluorouridine-3'-phosphate
  modified_base 18: mod_base = OTHER; note = 2'-O-methyladenosine-3'-phosphate
  modified_base 19: mod_base = OTHER; note = 2'-fluoroguanosine-3'-phosphate
  modified_base 20: mod_base = OTHER; note = 2'-O-methylguanosine-3'-phosphate
  modified_base 21: mod_base = OTHER; note = 2'-fluoroadenosine-3'-phosphate attached to N-[tris(N-acetylgalactosamine-alkyl)-amidodecanoyl)]-4-hydr oxyprolinol Hyp-(N-acetylgalactosamine-alkyl)3
atatatccaaatgttttagga

SEQ ID NO: 63 - RNA, 21 nt, synthetic construct
  misc_feature 1..21: note = Description of Artificial Sequence: Synthetic oligonucleotide
  source 1..21: mol_type = other RNA
  modified_base 1: mod_base = OTHER; note = 2'-fluorocytidine-3'-phosphorothioate
  modified_base 2: mod_base = OTHER; note = 2'-O-methylcytidine-3'- phosphorothioate
  modified_base 3: mod_base = OTHER; note = 2'-fluoroadenosine-3'-phosphate
  modified_base 4: mod_base = OTHER; note = 2'-O-methylguanosine-3'-phosphate
  modified_base 5: mod_base = OTHER; note = 2'-fluoroadenosine-3'-phosphate
  modified_base 6: mod_base = OTHER; note = 2'-O-methyluridine-3'-phosphate
  modified_base 7: mod_base = OTHER; note = 2'-fluoroguanosine-3'-phosphate
  modified_base 8: mod_base = OTHER; note = 2'-O-methylguanosine-3'-phosphate
  modified_base 9: mod_base = OTHER; note = 2'-fluoroadenosine-3'-phosphate
  modified_base 10: mod_base = OTHER; note = 2'-fluoroadenosine-3'-phosphate
  modified_base 11: mod_base = OTHER; note = 2'-fluoroguanosine-3'-phosphate
  modified_base 12: mod_base = OTHER; note = 2'-O-methylcytidine-3'-phosphate
  modified_base 13: mod_base = OTHER; note = 2'-fluorouridine-3'-phosphate
  modified_base 14: mod_base = OTHER; note = 2'-O-methylguanosine-3'-phosphate
  modified_base 15: mod_base = OTHER; note = 2'-fluorouridine-3'-phosphate
  modified_base 16: mod_base = OTHER; note = 2'-O-methyladenosine-3'-phosphate
  modified_base 17: mod_base = OTHER; note = 2'-fluorouridine-3'-phosphate
  modified_base 18: mod_base = OTHER; note = 2'-O-methylcytidine-3'-phosphate
  modified_base 19: mod_base = OTHER; note = 2'-fluorocytidine-3'-phosphate
  modified_base 20: mod_base = OTHER; note = 2'-O-methyladenosine-3'-phosphate
  modified_base 21: mod_base = OTHER; note = 2'-fluoroadenosine-3'-phosphate attached to N-[tris(N-acetylgalactosamine-alkyl)-amidodecanoyl)]-4-hydr oxyprolinol Hyp-(N-acetylgalactosamine-alkyl)3
ccagatggaagctgtatccaa

SEQ ID NO: 64 - RNA, 21 nt, synthetic construct
  misc_feature 1..21: note = Description of Artificial Sequence: Synthetic oligonucleotide
  source 1..21: mol_type = other RNA
  modified_base 1: mod_base = OTHER; note = 2'-fluoroguanosine-3'-phosphorothioate
  modified_base 2: mod_base = OTHER; note = 2'-O-methyladenosine-3'- phosphorothioate
  modified_base 3: mod_base = OTHER; note = 2'-fluorocytidine-3'-phosphate
  modified_base 4: mod_base = OTHER; note = 2'-O-methyluridine-3'-phosphate
  modified_base 5: mod_base = OTHER; note = 2'-fluorouridine-3'-phosphate
  modified_base 6: mod_base = OTHER; note = 2'-O-methyluridine-3'-phosphate
  modified_base 7: mod_base = OTHER; note = 2'-fluorocytidine-3'-phosphate
  modified_base 8: mod_base = OTHER; note = 2'-O-methyladenosine-3'-phosphate
  modified_base 9: mod_base = OTHER; note = 2'-fluorouridine-3'-phosphate
  modified_base 10: mod_base = OTHER; note = 2'-fluorocytidine-3'-phosphate
  modified_base 11: mod_base = OTHER; note = 2'-fluorocytidine-3'-phosphate
  modified_base 12: mod_base = OTHER; note = 2'-O-methyluridine-3'-phosphate
  modified_base 13: mod_base = OTHER; note = 2'-fluoroguanosine-3'-phosphate
  modified_base 14: mod_base = OTHER; note = 2'-O-methylguanosine-3'-phosphate
  modified_base 15: mod_base = OTHER; note = 2'-fluoroadenosine-3'-phosphate
  modified_base 16: mod_base = OTHER; note = 2'-O-methyladenosine-3'-phosphate
  modified_base 17: mod_base = OTHER; note = 2'-fluoroadenosine-3'-phosphate
  modified_base 18: mod_base = OTHER; note = 2'-O-methyluridine-3'-phosphate
  modified_base 19: mod_base = OTHER; note = 2'-fluoroadenosine-3'-phosphate
  modified_base 20: mod_base = OTHER; note = 2'-O-methyluridine-3'-phosphate
  modified_base 21: mod_base = OTHER; note = 2'-fluoroadenosine-3'-phosphate attached to N-[tris(N-acetylgalactosamine-alkyl)-amidodecanoyl)]-4-hydr oxyprolinol Hyp-(N-acetylgalactosamine-alkyl)3
gactttcatcctggaaatata

SEQ ID NO: 65 - RNA, 21 nt, synthetic construct
  misc_feature 1..21: note = Description of Artificial Sequence: Synthetic oligonucleotide
  source 1..21: mol_type = other RNA
  modified_base 1: mod_base = OTHER; note = 2'-fluorocytidine-3'-phosphorothioate
  modified_base 2: mod_base = OTHER; note = 2'-O-methylcytidine-3'- phosphorothioate
  modified_base 3: mod_base = OTHER; note = 2'-fluorocytidine-3'-phosphate
  modified_base 4: mod_base = OTHER; note = 2'-O-methylcytidine-3'-phosphate
  modified_base 5: mod_base = OTHER; note = 2'-fluoroguanosine-3'-phosphate
  modified_base 6: mod_base = OTHER; note = 2'-O-methylguanosine-3'-phosphate
  modified_base 7: mod_base = OTHER; note = 2'-fluorocytidine-3'-phosphate
  modified_base 8: mod_base = OTHER; note = 2'-O-methyluridine-3'-phosphate
  modified_base 9: mod_base = OTHER; note = 2'-fluoroadenosine-3'-phosphate
  modified_base 10: mod_base = OTHER; note = 2'-fluoroadenosine-3'-phosphate
  modified_base 11: mod_base = OTHER; note = 2'-fluorouridine-3'-phosphate
  modified_base 12: mod_base = OTHER; note = 2'-O-methyluridine-3'-phosphate
  modified_base 13: mod_base = OTHER; note = 2'-fluorouridine-3'-phosphate
  modified_base 14: mod_base = OTHER; note = 2'-O-methylguanosine-3'-phosphate
  modified_base 15: mod_base = OTHER; note = 2'-fluorouridine-3'-phosphate
  modified_base 16: mod_base = OTHER; note = 2'-O-methyladenosine-3'-phosphate
  modified_base 17: mod_base = OTHER; note = 2'-fluorouridine-3'-phosphate
  modified_base 18: mod_base = OTHER; note = 2'-O-methylcytidine-3'-phosphate
  modified_base 19: mod_base = OTHER; note = 2'-fluoroadenosine-3'-phosphate
  modified_base 20: mod_base = OTHER; note = 2'-O-methyladenosine-3'-phosphate
  modified_base 21: mod_base = OTHER; note = 2'-fluorouridine-3'-phosphate attached to N-[tris(N-acetylgalactosamine-alkyl)-amidodecanoyl)]-4-hydr oxyprolinol Hyp-(N-acetylgalactosamine-alkyl)3
ccccggctaatttgtatcaat

SEQ ID NO: 66 - RNA, 21 nt, synthetic construct
  misc_feature 1..21: note = Description of Artificial Sequence: Synthetic oligonucleotide
  source 1..21: mol_type = other RNA
  modified_base 1: mod_base = OTHER; note = 2'-fluorouridine -3'-phosphorothioate
  modified_base 2: mod_base = OTHER; note = 2'-O-methyluridine-3'-phosphorothioate
  modified_base 3: mod_base = OTHER; note = 2'-fluoroadenosine-3'-phosphate
  modified_base 4: mod_base = OTHER; note = 2'-O-methyladenosine-3'-phosphate
  modified_base 5: mod_base = OTHER; note = 2'-fluoroadenosine-3'-phosphate
  modified_base 6: mod_base = OTHER; note = 2'-O-methylcytidine-3'-phosphate
  modified_base 7: mod_base = OTHER; note = 2'-fluoroadenosine-3'-phosphate
  modified_base 8: mod_base = OTHER; note = 2'-O-methyluridine-3'-phosphate
  modified_base 9: mod_base = OTHER; note = 2'-fluoroguanosine-3'-phosphate
  modified_base 10: mod_base = OTHER; note = 2'-fluoroguanosine-3'-phosphate
  modified_base 11: mod_base = OTHER; note = 2'-fluorocytidine-3'-phosphate
  modified_base 12: mod_base = OTHER; note = 2'-O-methyluridine-3'-phosphate
  modified_base 13: mod_base = OTHER; note = 2'-fluorouridine-3'-phosphate
  modified_base 14: mod_base = OTHER; note = 2'-O-methylguanosine-3'-phosphate
  modified_base 15: mod_base = OTHER; note = 2'-fluoroadenosine-3'-phosphate
  modified_base 16: mod_base = OTHER; note = 2'-O-methyladenosine-3'-phosphate
  modified_base 17: mod_base = OTHER; note = 2'-fluorouridine-3'-phosphate
  modified_base 18: mod_base = OTHER; note = 2'-O-methylguanosine-3'-phosphate
  modified_base 19: mod_base = OTHER; note = 2'-fluoroguanosine-3'-phosphate
  modified_base 20: mod_base = OTHER; note = 2'-O-methylguanosine-3'-phosphate
  modified_base 21: mod_base = OTHER; note = 2'-fluoroadenosine-3'-phosphate attached to N-[tris(N-acetylgalactosamine-alkyl)-amidodecanoyl)]-4-hydr oxyprolinol Hyp-(N-acetylgalactosamine-alkyl)3
ttaaacatggcttgaatggga

SEQ ID NO: 67 - RNA, 21 nt, synthetic construct
  misc_feature 1..21: note = Description of Artificial Sequence: Synthetic oligonucleotide
  source 1..21: mol_type = other RNA
  modified_base 1: mod_base = OTHER; note = 2'-fluoroadenosine-3'-phosphorothioate
  modified_base 2: mod_base = OTHER; note = 2'-O-methyladenosine-3'- phosphorothioate
  modified_base 3: mod_base = OTHER; note = 2'-fluorouridine-3'-phosphate
  modified_base 4: mod_base = OTHER; note = 2'-O-methylguanosine-3'-phosphate
  modified_base 5: mod_base = OTHER; note = 2'-fluorouridine-3'-phosphate
  modified_base 6: mod_base = OTHER; note = 2'-O-methylguanosine-3'-phosphate
  modified_base 7: mod_base = OTHER; note = 2'-fluorouridine-3'-phosphate
  modified_base 8: mod_base = OTHER; note = 2'-O-methyluridine-3'-phosphate
  modified_base 9: mod_base = OTHER; note = 2'-fluorouridine-3'-phosphate
  modified_base 10: mod_base = OTHER; note = 2'-fluoroadenosine-3'-phosphate
  modified_base 11: mod_base = OTHER; note = 2'-fluoroguanosine-3'-phosphate
  modified_base 12: mod_base = OTHER; note = 2'-O-methyladenosine-3'-phosphate
  modified_base 13: mod_base = OTHER; note = 2'-fluorocytidine-3'-phosphate
  modified_base 14: mod_base = OTHER; note = 2'-O-methyladenosine-3'-phosphate
  modified_base 15: mod_base = OTHER; note = 2'-fluoroadenosine-3'-phosphate
  modified_base 16: mod_base = OTHER; note = 2'-O-methylcytidine-3'-phosphate
  modified_base 17: mod_base = OTHER; note = 2'-fluoroguanosine-3'-phosphate
  modified_base 18: mod_base = OTHER; note = 2'-O-methyluridine-3'-phosphate
  modified_base 19: mod_base = OTHER; note = 2'-fluorocytidine-3'-phosphate
  modified_base 20: mod_base = OTHER; note = 2'-O-methyladenosine-3'-phosphate
  modified_base 21: mod_base = OTHER; note = 2'-fluorouridine-3'-phosphate attached to N-[tris(N-acetylgalactosamine-alkyl)-amidodecanoyl)]-4-hydr oxyprolinol Hyp-(N-acetylgalactosamine-alkyl)3
aatgtgtttagacaacgtcat

SEQ ID NO: 68 - RNA, 21 nt, synthetic construct
  misc_feature 1..21: note = Description of Artificial Sequence: Synthetic oligonucleotide
  source 1..21: mol_type = other RNA
  modified_base 1: mod_base = OTHER; note = 2'-fluoroadenosine-3'-phosphorothioate
  modified_base 2: mod_base = OTHER; note = 2'-O-methylcytidine-3'- phosphorothioate
  modified_base 3: mod_base = OTHER; note = 2'-fluorouridine-3'-phosphate
  modified_base 4: mod_base = OTHER; note = 2'-O-methyladenosine-3'-phosphate
  modified_base 5: mod_base = OTHER; note = 2'-fluoroadenosine-3'-phosphate
  modified_base 6: mod_base = OTHER; note = 2'-O-methyladenosine-3'-phosphate
  modified_base 7: mod_base = OTHER; note = 2'-fluoroguanosine-3'-phosphate
  modified_base 8: mod_base = OTHER; note = 2'-O-methylguanosine-3'-phosphate
  modified_base 9: mod_base = OTHER; note = 2'-fluoroadenosine-3'-phosphate
  modified_base 10: mod_base = OTHER; note = 2'-fluoroadenosine-3'-phosphate
  modified_base 11: mod_base = OTHER; note = 2'-fluoroguanosine-3'-phosphate
  modified_base 12: mod_base = OTHER; note = 2'-O-methyladenosine-3'-phosphate
  modified_base 13: mod_base = OTHER; note = 2'-fluoroadenosine-3'-phosphate
  modified_base 14: mod_base = OTHER; note = 2'-O-methyluridine-3'-phosphate
  modified_base 15: mod_base = OTHER; note = 2'-fluorouridine-3'-phosphate
  modified_base 16: mod_base = OTHER; note = 2'-O-methylcytidine-3'-phosphate
  modified_base 17: mod_base = OTHER; note = 2'-fluorocytidine-3'-phosphate
  modified_base 18: mod_base = OTHER; note = 2'-O-methylguanosine-3'-phosphate
  modified_base 19: mod_base = OTHER; note = 2'-fluoroguanosine-3'-phosphate
  modified_base 20: mod_base = OTHER; note = 2'-O-methyluridine-3'-phosphate
  modified_base 21: mod_base = OTHER; note = 2'-fluorouridine-3'-phosphate attached to N-[tris(N-acetylgalactosamine-alkyl)-amidodecanoyl)]-4-hydr oxyprolinol Hyp-(N-acetylgalactosamine-alkyl)3
actaaaggaagaattccggtt

SEQ ID NO: 69 - RNA, 21 nt, synthetic construct
  misc_feature 1..21: note = Description of Artificial Sequence: Synthetic oligonucleotide
  source 1..21: mol_type = other RNA
  modified_base 1: mod_base = OTHER; note = 2'-fluorouridine -3'-phosphorothioate
  modified_base 2: mod_base = OTHER; note = 2'-O-methyladenosine-3'- phosphorothioate
  modified_base 3: mod_base = OTHER; note = 2'-fluorouridine-3'-phosphate
  modified_base 4: mod_base = OTHER; note = 2'-O-methyladenosine-3'-phosphate
  modified_base 5: mod_base = OTHER; note = 2'-fluorouridine-3'-phosphate
  modified_base 6: mod_base = OTHER; note = 2'-O-methylcytidine-3'-phosphate
  modified_base 7: mod_base = OTHER; note = 2'-fluorocytidine-3'-phosphate
  modified_base 8: mod_base = OTHER; note = 2'-O-methyladenosine-3'-phosphate
  modified_base 9: mod_base = OTHER; note = 2'-fluoroadenosine-3'-phosphate
  modified_base 10: mod_base = OTHER; note = 2'-fluoroadenosine-3'-phosphate
  modified_base 11: mod_base = OTHER; note = 2'-fluorouridine-3'-phosphate
  modified_base 12: mod_base = OTHER; note = 2'-O-methylguanosine-3'-phosphate
  modified_base 13: mod_base = OTHER; note = 2'-fluorouridine-3'-phosphate
  modified_base 14: mod_base = OTHER; note = 2'-O-methyluridine-3'-phosphate
  modified_base 15: mod_base = OTHER; note = 2'-fluorouridine-3'-phosphate
  modified_base 16: mod_base = OTHER; note = 2'-O-methyluridine-3'-phosphate
  modified_base 17: mod_base = OTHER; note = 2'-fluoroadenosine-3'-phosphate
  modified_base 18: mod_base = OTHER; note = 2'-O-methylguanosine-3'-phosphate
  modified_base 19: mod_base = OTHER; note = 2'-fluoroguanosine-3'-phosphate
  modified_base 20: mod_base = OTHER; note = 2'-O-methyladenosine-3'-phosphate
  modified_base 21: mod_base = OTHER; note = 2'-fluorouridine-3'-phosphate attached to N-[tris(N-acetylgalactosamine-alkyl)-amidodecanoyl)]-4-hydr oxyprolinol Hyp-(N-acetylgalactosamine-alkyl)3
tatatccaaatgttttaggat

SEQ ID NO: 70 - RNA, 21 nt, synthetic construct
  misc_feature 1..21: note = Description of Artificial Sequence: Synthetic oligonucleotide
  source 1..21: mol_type = other RNA
  modified_base 1: mod_base = OTHER; note = 2'-fluoroguanosine-3'-phosphorothioate
  modified_base 2: mod_base = OTHER; note = 2'-O-methyluridine-3'-phosphorothioate
  modified_base 3: mod_base = OTHER; note = 2'-fluoroguanosine-3'-phosphate
  modified_base 4: mod_base = OTHER; note = 2'-O-methylcytidine-3'-phosphate
  modified_base 5: mod_base = OTHER; note = 2'-fluoroguanosine-3'-phosphate
  modified_base 6: mod_base = OTHER; note = 2'-O-methylguanosine-3'-phosphate
  modified_base 7: mod_base = OTHER; note = 2'-fluoroadenosine-3'-phosphate
  modified_base 8: mod_base = OTHER; note = 2'-O-methyladenosine-3'-phosphate
  modified_base 9: mod_base = OTHER; note = 2'-fluoroadenosine-3'-phosphate
  modified_base 10: mod_base = OTHER; note = 2'-fluoroguanosine-3'-phosphate
  modified_base 11: mod_base = OTHER; note = 2'-fluoroguanosine-3'-phosphate
  modified_base 12: mod_base = OTHER; note = 2'-O-methylcytidine-3'-phosphate
  modified_base 13: mod_base = OTHER; note = 2'-fluoroadenosine-3'-phosphate
  modified_base 14: mod_base = OTHER; note = 2'-O-methylcytidine-3'-phosphate
  modified_base 15: mod_base = OTHER; note = 2'-fluorouridine-3'-phosphate
  modified_base 16: mod_base = OTHER; note = 2'-O-methylguanosine-3'-phosphate
  modified_base 17: mod_base = OTHER; note = 2'-fluoroadenosine-3'-phosphate
  modified_base 18: mod_base = OTHER; note = 2'-O-methyluridine-3'-phosphate
  modified_base 19: mod_base = OTHER; note = 2'-fluoroguanosine-3'-phosphate
  modified_base 20: mod_base = OTHER; note = 2'-O-methyluridine-3'-phosphate
  modified_base 21: mod_base = OTHER; note = 2'-fluorouridine-3'-phosphate attached to N-[tris(N-acetylgalactosamine-alkyl)-amidodecanoyl)]-4-hydr oxyprolinol Hyp-(N-acetylgalactosamine-alkyl)3
gtgcggaaaggcactgatgtt

SEQ ID NO: 71 - RNA, 21 nt, synthetic construct
  misc_feature 1..21: note = Description of Artificial Sequence: Synthetic oligonucleotide
  source 1..21: mol_type = other RNA
  modified_base 1: mod_base = OTHER; note = 2'-fluorouridine -3'-phosphorothioate
  modified_base 2: mod_base = OTHER; note = 2'-O-methyladenosine-3'- phosphorothioate
  modified_base 3: mod_base = OTHER; note = 2'-fluoroadenosine-3'-phosphate
  modified_base 4: mod_base = OTHER; note = 2'-O-methyladenosine-3'-phosphate
  modified_base 5: mod_base = OTHER; note = 2'-fluoroadenosine-3'-phosphate
  modified_base 6: mod_base = OTHER; note = 2'-O-methylcytidine-3'-phosphate
  modified_base 7: mod_base = OTHER; note = 2'-fluoroadenosine-3'-phosphate
  modified_base 8: mod_base = OTHER; note = 2'-O-methylguanosine-3'-phosphate
  modified_base 9: mod_base = OTHER; note = 2'-fluorouridine-3'-phosphate
  modified_base 10: mod_base = OTHER; note = 2'-fluoroguanosine-3'-phosphate
  modified_base 11: mod_base = OTHER; note = 2'-fluoroguanosine-3'-phosphate
  modified_base 12: mod_base = OTHER; note = 2'-O-methyluridine-3'-phosphate
  modified_base 13: mod_base = OTHER; note = 2'-fluorouridine-3'-phosphate
  modified_base 14: mod_base = OTHER; note = 2'-O-methylcytidine-3'-phosphate
  modified_base 15: mod_base = OTHER; note = 2'-fluorouridine-3'-phosphate
  modified_base 16: mod_base = OTHER; note = 2'-O-methyluridine-3'-phosphate
  modified_base 17: mod_base = OTHER; note = 2'-fluoroadenosine-3'-phosphate
  modified_base 18: mod_base = OTHER; note = 2'-O-methyladenosine-3'-phosphate
  modified_base 19: mod_base = OTHER; note = 2'-fluoroadenosine-3'-phosphate
  modified_base 20: mod_base = OTHER; note = 2'-O-methyluridine-3'-phosphate
  modified_base 21: mod_base = OTHER; note = 2'-fluorouridine-3'-phosphate attached to N-[tris(N-acetylgalactosamine-alkyl)-amidodecanoyl)]-4-hydr oxyprolinol Hyp-(N-acetylgalactosamine-alkyl)3
taaaacagtggttcttaaatt

SEQ ID NO: 72 - RNA, 21 nt, synthetic construct
  misc_feature 1..21: note = Description of Artificial Sequence: Synthetic oligonucleotide
  source 1..21: mol_type = other RNA
  modified_base 1: mod_base = OTHER; note = 2'-fluoroadenosine-3'-phosphorothioate
  modified_base 2: mod_base = OTHER; note = 2'-O-methyluridine-3'-phosphorothioate
  modified_base 3: mod_base = OTHER; note = 2'-fluoroguanosine-3'-phosphate
  modified_base 4: mod_base = OTHER; note = 2'-O-methyladenosine-3'-phosphate
  modified_base 5: mod_base = OTHER; note = 2'-fluoroadenosine-3'-phosphate
  modified_base 6: mod_base = OTHER; note = 2'-O-methyladenosine-3'-phosphate
  modified_base 7: mod_base = OTHER; note = 2'-fluoroadenosine-3'-phosphate
  modified_base 8: mod_base = OTHER; note = 2'-O-methyladenosine-3'-phosphate
  modified_base 9: mod_base = OTHER; note = 2'-fluorouridine-3'-phosphate
  modified_base 10: mod_base = OTHER; note = 2'-fluorouridine-3'-phosphate
  modified_base 11: mod_base = OTHER; note = 2'-fluorouridine-3'-phosphate
  modified_base 12: mod_base = OTHER; note = 2'-O-methyluridine-3'-phosphate
  modified_base 13: mod_base = OTHER; note = 2'-fluoroguanosine-3'-phosphate
  modified_base 14: mod_base = OTHER; note = 2'-O-methyladenosine-3'-phosphate
  modified_base 15: mod_base = OTHER; note = 2'-fluoroadenosine-3'-phosphate
  modified_base 16: mod_base = OTHER; note = 2'-O-methyladenosine-3'-phosphate
  modified_base 17: mod_base = OTHER; note = 2'-fluorocytidine-3'-phosphate
  modified_base 18: mod_base = OTHER; note = 2'-O-methylcytidine-3'-phosphate
  modified_base 19: mod_base = OTHER; note = 2'-fluoroadenosine-3'-phosphate
  modified_base 20: mod_base = OTHER; note = 2'-O-methylguanosine-3'-phosphate
  modified_base 21: mod_base = OTHER; note = 2'-fluorouridine-3'-phosphate attached to N-[tris(N-acetylgalactosamine-alkyl)-amidodecanoyl)]-4-hydr oxyprolinol Hyp-(N-acetylgalactosamine-alkyl)3
atgaaaaattttgaaaccagt

SEQ ID NO: 73 - RNA, 21 nt, synthetic construct
  misc_feature 1..21: note = Description of Artificial Sequence: Synthetic oligonucleotide
  source 1..21: mol_type = other RNA
  modified_base 1: mod_base = OTHER; note = 2'-fluoroadenosine-3'-phosphorothioate
  modified_base 2: mod_base = OTHER; note = 2'-O-methyladenosine-3'- phosphorothioate
  modified_base 3: mod_base = OTHER; note = 2'-fluorocytidine-3'-phosphate
  modified_base 4: mod_base = OTHER; note = 2'-O-methyladenosine-3'-phosphate
  modified_base 5: mod_base = OTHER; note = 2'-fluoroadenosine-3'-phosphate
  modified_base 6: mod_base = OTHER; note = 2'-O-methyladenosine-3'-phosphate
  modified_base 7: mod_base = OTHER; note = 2'-fluoroadenosine-3'-phosphate
  modified_base 8: mod_base = OTHER; note = 2'-O-methyluridine-3'-phosphate
  modified_base 9: mod_base = OTHER; note = 2'-fluoroadenosine-3'-phosphate
  modified_base 10: mod_base = OTHER; note = 2'-fluoroguanosine-3'-phosphate
  modified_base 11: mod_base = OTHER; note = 2'-fluorocytidine-3'-phosphate
  modified_base 12: mod_base = OTHER; note = 2'-O-methyladenosine-3'-phosphate
  modified_base 13: mod_base = OTHER; note = 2'-fluoroadenosine-3'-phosphate
  modified_base 14: mod_base = OTHER; note = 2'-O-methyluridine-3'-phosphate
  modified_base 15: mod_base = OTHER; note = 2'-fluorocytidine-3'-phosphate
  modified_base 16: mod_base = OTHER; note = 2'-O-methylcytidine-3'-phosphate
  modified_base 17: mod_base = OTHER; note = 2'-fluorocytidine-3'-phosphate
  modified_base 18: mod_base = OTHER; note = 2'-O-methyluridine-3'-phosphate
  modified_base 19: mod_base = OTHER; note = 2'-fluorouridine-3'-phosphate
  modified_base 20: mod_base = OTHER; note = 2'-O-methyluridine-3'-phosphate
  modified_base 21: mod_base = OTHER; note = 2'-fluorouridine-3'-phosphate attached to N-[tris(N-acetylgalactosamine-alkyl)-amidodecanoyl)]-4-hydr oxyprolinol Hyp-(N-acetylgalactosamine-alkyl)3
aacaaaatagcaatccctttt

SEQ ID NO: 74 - RNA, 21 nt, synthetic construct
  misc_feature 1..21: note = Description of Artificial Sequence: Synthetic oligonucleotide
  source 1..21: mol_type = other RNA
  modified_base 1: mod_base = OTHER; note = 2'-fluorocytidine-3'-phosphorothioate
  modified_base 2: mod_base = OTHER; note = 2'-O-methyluridine-3'-phosphorothioate
  modified_base 3: mod_base = OTHER; note = 2'-fluoroguanosine-3'-phosphate
  modified_base 4: mod_base = OTHER; note = 2'-O-methyladenosine-3'-phosphate
  modified_base 5: mod_base = OTHER; note = 2'-fluoroadenosine-3'-phosphate
  modified_base 6: mod_base = OTHER; note = 2'-O-methyladenosine-3'-phosphate
  modified_base 7: mod_base = OTHER; note = 2'-fluorocytidine-3'-phosphate
  modified_base 8: mod_base = OTHER; note = 2'-O-methyladenosine-3'-phosphate
  modified_base 9: mod_base = OTHER; note = 2'-fluoroguanosine-3'-phosphate
  modified_base 10: mod_base = OTHER; note = 2'-fluoroadenosine-3'-phosphate
  modified_base 11: mod_base = OTHER; note = 2'-fluorouridine-3'-phosphate
  modified_base 12: mod_base = OTHER; note = 2'-O-methylcytidine-3'-phosphate
  modified_base 13: mod_base = OTHER; note = 2'-fluorouridine-3'-phosphate
  modified_base 14: mod_base = OTHER; note = 2'-O-methylguanosine-3'-phosphate
  modified_base 15: mod_base = OTHER; note = 2'-fluorouridine-3'-phosphate
  modified_base 16: mod_base = OTHER; note = 2'-O-methylcytidine-3'-phosphate
  modified_base 17: mod_base = OTHER; note = 2'-fluoroguanosine-3'-phosphate
  modified_base 18: mod_base = OTHER; note = 2'-O-methyladenosine-3'-phosphate
  modified_base 19: mod_base = OTHER; note = 2'-fluorocytidine-3'-phosphate
  modified_base 20: mod_base = OTHER; note = 2'-O-methyluridine-3'-phosphate
  modified_base 21: mod_base = OTHER; note = 2'-fluorouridine-3'-phosphate attached to N-[tris(N-acetylgalactosamine-alkyl)-amidodecanoyl)]-4-hydr oxyprolinol Hyp-(N-acetylgalactosamine-alkyl)3
ctgaaacagatctgtcgactt

SEQ ID NO: 75 - RNA, 21 nt, synthetic construct
  misc_feature 1..21: note = Description of Artificial Sequence: Synthetic oligonucleotide
  source 1..21: mol_type = other RNA
  modified_base 1: mod_base = OTHER; note = 2'-fluorouridine -3'-phosphorothioate
  modified_base 2: mod_base = OTHER; note = 2'-O-methyluridine-3'-phosphorothioate
  modified_base 3: mod_base = OTHER; note = 2'-fluoroguanosine-3'-phosphate
  modified_base 4: mod_base = OTHER; note = 2'-O-methyluridine-3'-phosphate
  modified_base 5: mod_base = OTHER; note = 2'-fluorouridine-3'-phosphate
  modified_base 6: mod_base = OTHER; note = 2'-O-methylguanosine-3'-phosphate
  modified_base 7: mod_base = OTHER; note = 2'-fluorocytidine-3'-phosphate
  modified_base 8: mod_base = OTHER; note = 2'-O-methyladenosine-3'-phosphate
  modified_base 9: mod_base = OTHER; note = 2'-fluoroadenosine-3'-phosphate
  modified_base 10: mod_base = OTHER; note = 2'-fluoroadenosine-3'-phosphate
  modified_base 11: mod_base = OTHER; note = 2'-fluoroguanosine-3'-phosphate
  modified_base 12: mod_base = OTHER; note = 2'-O-methylguanosine-3'-phosphate
  modified_base 13: mod_base = OTHER; note = 2'-fluoroguanosine-3'-phosphate
  modified_base 14: mod_base = OTHER; note = 2'-O-methylcytidine-3'-phosphate
  modified_base 15: mod_base = OTHER; note = 2'-fluoroadenosine-3'-phosphate
  modified_base 16: mod_base = OTHER; note = 2'-O-methyluridine-3'-phosphate
  modified_base 17: mod_base = OTHER; note = 2'-fluorouridine-3'-phosphate
  modified_base 18: mod_base = OTHER; note = 2'-O-methyluridine-3'-phosphate
  modified_base 19: mod_base = OTHER; note = 2'-fluorouridine-3'-phosphate
  modified_base 20: mod_base = OTHER; note = 2'-O-methylguanosine-3'-phosphate
  modified_base 21: mod_base = OTHER; note = 2'-fluoroadenosine-3'-phosphate attached to N-[tris(N-acetylgalactosamine-alkyl)-amidodecanoyl)]-4-hydr oxyprolinol Hyp-(N-acetylgalactosamine-alkyl)3
ttgttgcaaagggcattttga

SEQ ID NO: 76 - RNA, 21 nt, synthetic construct
  misc_feature 1..21: note = Description of Artificial Sequence: Synthetic oligonucleotide
  source 1..21: mol_type = other RNA
  modified_base 1: mod_base = OTHER; note = 2'-fluorocytidine-3'-phosphorothioate
  modified_base 2: mod_base = OTHER; note = 2'-O-methyluridine-3'-phosphorothioate
  modified_base 3: mod_base = OTHER; note = 2'-fluorocytidine-3'-phosphate
  modified_base 4: mod_base = OTHER; note = 2'-O-methyladenosine-3'-phosphate
  modified_base 5: mod_base = OTHER; note = 2'-fluorouridine-3'-phosphate
  modified_base 6: mod_base = OTHER; note = 2'-O-methyluridine-3'-phosphate
  modified_base 7: mod_base = OTHER; note = 2'-fluoroguanosine-3'-phosphate
  modified_base 8: mod_base = OTHER; note = 2'-O-methyluridine-3'-phosphate
  modified_base 9: mod_base = OTHER; note = 2'-fluorouridine-3'-phosphate
  modified_base 10: mod_base = OTHER; note = 2'-fluorouridine-3'-phosphate
  modified_base 11: mod_base = OTHER; note = 2'-fluoroadenosine-3'-phosphate
  modified_base 12: mod_base = OTHER; note = 2'-O-methyluridine-3'-phosphate
  modified_base 13: mod_base = OTHER; note = 2'-fluorouridine-3'-phosphate
  modified_base 14: mod_base = OTHER; note = 2'-O-methyladenosine-3'-phosphate
  modified_base 15: mod_base = OTHER; note = 2'-fluoroadenosine-3'-phosphate
  modified_base 16: mod_base = OTHER; note = 2'-O-methylcytidine-3'-phosphate
  modified_base 17: mod_base = OTHER; note = 2'-fluorocytidine-3'-phosphate
  modified_base 18: mod_base = OTHER; note = 2'-O-methyluridine-3'-phosphate
  modified_base 19: mod_base = OTHER; note = 2'-fluoroguanosine-3'-phosphate
  modified_base 20: mod_base = OTHER; note = 2'-O-methyluridine-3'-phosphate
  modified_base 21: mod_base = OTHER; note = 2'-fluoroadenosine-3'-phosphate attached to N-[tris(N-acetylgalactosamine-alkyl)-amidodecanoyl)]-4-hydr oxyprolinol Hyp-(N-acetylgalactosamine-alkyl)3
ctcattgtttattaacctgta

SEQ ID NO: 77 - RNA, 21 nt, synthetic construct
  misc_feature 1..21: note = Description of Artificial Sequence: Synthetic oligonucleotide
  source 1..21: mol_type = other RNA
  modified_base 1: mod_base = OTHER; note = 2'-fluorocytidine-3'-phosphorothioate
  modified_base 2: mod_base = OTHER; note = 2'-O-methyladenosine-3'- phosphorothioate
  modified_base 3: mod_base = OTHER; note = 2'-fluoroadenosine-3'-phosphate
  modified_base 4: mod_base = OTHER; note = 2'-O-methylcytidine-3'-phosphate
  modified_base 5: mod_base = OTHER; note = 2'-fluoroadenosine-3'-phosphate
  modified_base 6: mod_base = OTHER; note = 2'-O-methyladenosine-3'-phosphate
  modified_base 7: mod_base = OTHER; note = 2'-fluoroadenosine-3'-phosphate
  modified_base 8: mod_base = OTHER; note = 2'-O-methyladenosine-3'-phosphate
  modified_base 9: mod_base = OTHER; note = 2'-fluorouridine-3'-phosphate
  modified_base 10: mod_base = OTHER; note = 2'-fluoroadenosine-3'-phosphate
  modified_base 11: mod_base = OTHER; note = 2'-fluoroguanosine-3'-phosphate
  modified_base 12: mod_base = OTHER; note = 2'-O-methylcytidine-3'-phosphate
  modified_base 13: mod_base = OTHER; note = 2'-fluoroadenosine-3'-phosphate
  modified_base 14: mod_base = OTHER; note = 2'-O-methyladenosine-3'-phosphate
  modified_base 15: mod_base = OTHER; note = 2'-fluorouridine-3'-phosphate
  modified_base 16: mod_base = OTHER; note = 2'-O-methylcytidine-3'-phosphate
  modified_base 17: mod_base = OTHER; note = 2'-fluorocytidine-3'-phosphate
  modified_base 18: mod_base = OTHER; note = 2'-O-methylcytidine-3'-phosphate
  modified_base 19: mod_base = OTHER; note = 2'-fluorouridine-3'-phosphate
  modified_base 20: mod_base = OTHER; note = 2'-O-methyluridine-3'-phosphate
  modified_base 21: mod_base = OTHER; note = 2'-fluorouridine-3'-phosphate attached to N-[tris(N-acetylgalactosamine-alkyl)-amidodecanoyl)]-4-hydr oxyprolinol Hyp-(N-acetylgalactosamine-alkyl)3
caacaaaatagcaatcccttt

SEQ ID NO: 78 - RNA, 21 nt, synthetic construct
  misc_feature 1..21: note = Description of Artificial Sequence: Synthetic oligonucleotide
  source 1..21: mol_type = other RNA
  modified_base 1: mod_base = OTHER; note = 2'-fluorocytidine-3'-phosphorothioate
  modified_base 2: mod_base = OTHER; note = 2'-O-methyladenosine-3'- phosphorothioate
  modified_base 3: mod_base = OTHER; note = 2'-fluorouridine-3'-phosphate
  modified_base 4: mod_base = OTHER; note = 2'-O-methyluridine-3'-phosphate
  modified_base 5: mod_base = OTHER; note = 2'-fluoroguanosine-3'-phosphate
  modified_base 6: mod_base = OTHER; note = 2'-O-methyluridine-3'-phosphate
  modified_base 7: mod_base = OTHER; note = 2'-fluorouridine-3'-phosphate
  modified_base 8: mod_base = OTHER; note = 2'-O-methyluridine-3'-phosphate
  modified_base 9: mod_base = OTHER; note = 2'-fluoroadenosine-3'-phosphate
  modified_base 10: mod_base = OTHER; note = 2'-fluorouridine-3'-phosphate
  modified_base 11: mod_base = OTHER; note = 2'-fluorouridine-3'-phosphate
  modified_base 12: mod_base = OTHER; note = 2'-O-methyladenosine-3'-phosphate
  modified_base 13: mod_base = OTHER; note = 2'-fluoroadenosine-3'-phosphate
  modified_base 14: mod_base = OTHER; note = 2'-O-methylcytidine-3'-phosphate
  modified_base 15: mod_base = OTHER; note = 2'-fluorocytidine-3'-phosphate
  modified_base 16: mod_base = OTHER; note = 2'-O-methyluridine-3'-phosphate
  modified_base 17: mod_base = OTHER; note = 2'-fluoroguanosine-3'-phosphate
  modified_base 18: mod_base = OTHER; note = 2'-O-methyluridine-3'-phosphate
  modified_base 19: mod_base = OTHER; note = 2'-fluoroadenosine-3'-phosphate
  modified_base 20: mod_base = OTHER; note = 2'-O-methyluridine-3'-phosphate
  modified_base 21: mod_base = OTHER; note = 2'-fluorouridine-3'-phosphate attached to N-[tris(N-acetylgalactosamine-alkyl)-amidodecanoyl)]-4-hydr oxyprolinol Hyp-(N-acetylgalactosamine-alkyl)3
cattgtttattaacctgtatt

SEQ ID NO: 79 - RNA, 21 nt, synthetic construct
  misc_feature 1..21: note = Description of Artificial Sequence: Synthetic oligonucleotide
  source 1..21: mol_type = other RNA
  modified_base 1: mod_base = OTHER; note = 2'-fluorouridine -3'-phosphorothioate
  modified_base 2: mod_base = OTHER; note = 2'-O-methyladenosine-3'- phosphorothioate
  modified_base 3: mod_base = OTHER; note = 2'-fluorouridine-3'-phosphate
  modified_base 4: mod_base = OTHER; note = 2'-O-methylcytidine-3'-phosphate
  modified_base 5: mod_base = OTHER; note = 2'-fluoroadenosine-3'-phosphate
  modified_base 6: mod_base = OTHER; note = 2'-O-methylguanosine-3'-phosphate
  modified_base 7: mod_base = OTHER; note = 2'-fluorocytidine-3'-phosphate
  modified_base 8: mod_base = OTHER; note = 2'-O-methyluridine-3'-phosphate
  modified_base 9: mod_base = OTHER; note = 2'-fluoroguanosine-3'-phosphate
  modified_base 10: mod_base = OTHER; note = 2'-fluoroguanosine-3'-phosphate
  modified_base 11: mod_base = OTHER; note = 2'-fluoroguanosine-3'-phosphate
  modified_base 12: mod_base = OTHER; note = 2'-O-methyladenosine-3'-phosphate
  modified_base 13: mod_base = OTHER; note = 2'-fluoroadenosine-3'-phosphate
  modified_base 14: mod_base = OTHER; note = 2'-O-methylguanosine-3'-phosphate
  modified_base 15: mod_base = OTHER; note = 2'-fluoroadenosine-3'-phosphate
  modified_base 16: mod_base = OTHER; note = 2'-O-methyluridine-3'-phosphate
  modified_base 17: mod_base = OTHER; note = 2'-fluoroadenosine-3'-phosphate
  modified_base 18: mod_base = OTHER; note = 2'-O-methyluridine-3'-phosphate
  modified_base 19: mod_base = OTHER; note = 2'-fluorocytidine-3'-phosphate
  modified_base 20: mod_base = OTHER; note = 2'-O-methyladenosine-3'-phosphate
  modified_base 21: mod_base = OTHER; note = 2'-fluoroadenosine-3'-phosphate attached to N-[tris(N-acetylgalactosamine-alkyl)-amidodecanoyl)]-4-hydr oxyprolinol Hyp-(N-acetylgalactosamine-alkyl)3
tatcagctgggaagatatcaa

SEQ ID NO: 80 - RNA, 21 nt, synthetic construct
  misc_feature 1..21: note = Description of Artificial Sequence: Synthetic oligonucleotide
  source 1..21: mol_type = other RNA
  modified_base 1: mod_base = OTHER; note = 2'-fluorouridine -3'-phosphorothioate
  modified_base 2: mod_base = OTHER; note = 2'-O-methylguanosine-3'- phosphorothioate
  modified_base 3: mod_base = OTHER; note = 2'-fluorouridine-3'-phosphate
  modified_base 4: mod_base = OTHER; note = 2'-O-methylcytidine-3'-phosphate
  modified_base 5: mod_base = OTHER; note = 2'-fluorocytidine-3'-phosphate
  modified_base 6: mod_base = OTHER; note = 2'-O-methyluridine-3'-phosphate
  modified_base 7: mod_base = OTHER; note = 2'-fluoroadenosine-3'-phosphate
  modified_base 8: mod_base = OTHER; note = 2'-O-methylguanosine-3'-phosphate
  modified_base 9: mod_base = OTHER; note = 2'-fluoroguanosine-3'-phosphate
  modified_base 10: mod_base = OTHER; note = 2'-fluoroadenosine-3'-phosphate
  modified_base 11: mod_base = OTHER; note = 2'-fluoroadenosine-3'-phosphate
  modified_base 12: mod_base = OTHER; note = 2'-O-methylcytidine-3'-phosphate
  modified_base 13: mod_base = OTHER; note = 2'-fluorocytidine-3'-phosphate
  modified_base 14: mod_base = OTHER; note = 2'-O-methyluridine-3'-phosphate
  modified_base 15: mod_base = OTHER; note = 2'-fluorouridine-3'-phosphate
  modified_base 16: mod_base = OTHER; note = 2'-O-methyluridine-3'-phosphate
  modified_base 17: mod_base = OTHER; note = 2'-fluorouridine-3'-phosphate
  modified_base 18: mod_base = OTHER; note = 2'-O-methyladenosine-3'-phosphate
  modified_base 19: mod_base = OTHER; note = 2'-fluoroguanosine-3'-phosphate
  modified_base 20: mod_base = OTHER; note = 2'-O-methyladenosine-3'-phosphate
  modified_base 21: mod_base = OTHER; note = 2'-fluoroadenosine-3'-phosphate attached to N-[tris(N-acetylgalactosamine-alkyl)-amidodecanoyl)]-4-hydr oxyprolinol Hyp-(N-acetylgalactosamine-alkyl)3
tgtcctaggaaccttttagaa

SEQ ID NO: 81 - RNA, 21 nt, synthetic construct
  misc_feature 1..21: note = Description of Artificial Sequence: Synthetic oligonucleotide
  source 1..21: mol_type = other RNA
  modified_base 1: mod_base = OTHER; note = 2'-fluorouridine -3'-phosphorothioate
  modified_base 2: mod_base = OTHER; note = 2'-O-methylcytidine-3'- phosphorothioate
  modified_base 3: mod_base = OTHER; note = 2'-fluorocytidine-3'-phosphate
  modified_base 4: mod_base = OTHER; note = 2'-O-methyladenosine-3'-phosphate
  modified_base 5: mod_base = OTHER; note = 2'-fluoroadenosine-3'-phosphate
  modified_base 6: mod_base = OTHER; note = 2'-O-methylcytidine-3'-phosphate
  modified_base 7: mod_base = OTHER; note = 2'-fluoroadenosine-3'-phosphate
  modified_base 8: mod_base = OTHER; note = 2'-O-methyladenosine-3'-phosphate
  modified_base 9: mod_base = OTHER; note = 2'-fluoroadenosine-3'-phosphate
  modified_base 10: mod_base = OTHER; note = 2'-fluoroadenosine-3'-phosphate
  modified_base 11: mod_base = OTHER; note = 2'-fluorouridine-3'-phosphate
  modified_base 12: mod_base = OTHER; note = 2'-O-methyladenosine-3'-phosphate
  modified_base 13: mod_base = OTHER; note = 2'-fluoroguanosine-3'-phosphate
  modified_base 14: mod_base = OTHER; note = 2'-O-methylcytidine-3'-phosphate
  modified_base 15: mod_base = OTHER; note = 2'-fluoroadenosine-3'-phosphate
  modified_base 16: mod_base = OTHER; note = 2'-O-methyladenosine-3'-phosphate
  modified_base 17: mod_base = OTHER; note = 2'-fluorouridine-3'-phosphate
  modified_base 18: mod_base = OTHER; note = 2'-O-methylcytidine-3'-phosphate
  modified_base 19: mod_base = OTHER; note = 2'-fluorocytidine-3'-phosphate
  modified_base 20: mod_base = OTHER; note = 2'-O-methylcytidine-3'-phosphate
  modified_base 21: mod_base = OTHER; note = 2'-fluorouridine-3'-phosphate attached to N-[tris(N-acetylgalactosamine-alkyl)-amidodecanoyl)]-4-hydr oxyprolinol Hyp-(N-acetylgalactosamine-alkyl)3
tccaacaaaatagcaatccct

SEQ ID NO: 82 - RNA, 21 nt, synthetic construct
  misc_feature 1..21: note = Description of Artificial Sequence: Synthetic oligonucleotide
  source 1..21: mol_type = other RNA
  modified_base 1: mod_base = OTHER; note = 2'-fluoroguanosine-3'-phosphorothioate
  modified_base 2: mod_base = OTHER; note = 2'-O-methylguanosine-3'- phosphorothioate
  modified_base 3: mod_base = OTHER; note = 2'-fluorouridine-3'-phosphate
  modified_base 4: mod_base = OTHER; note = 2'-O-methylguanosine-3'-phosphate
  modified_base 5: mod_base = OTHER; note = 2'-fluorouridine-3'-phosphate
  modified_base 6: mod_base = OTHER; note = 2'-O-methylguanosine-3'-phosphate
  modified_base 7: mod_base = OTHER; note = 2'-fluorocytidine-3'-phosphate
  modified_base 8: mod_base = OTHER; note = 2'-O-methylguanosine-3'-phosphate
  modified_base 9: mod_base = OTHER; note = 2'-fluoroguanosine-3'-phosphate
  modified_base 10: mod_base = OTHER; note = 2'-fluoroadenosine-3'-phosphate
  modified_base 11: mod_base = OTHER; note = 2'-fluoroadenosine-3'-phosphate
  modified_base 12: mod_base = OTHER; note = 2'-O-methyladenosine-3'-phosphate
  modified_base 13: mod_base = OTHER; note = 2'-fluoroguanosine-3'-phosphate
  modified_base 14: mod_base = OTHER; note = 2'-O-methylguanosine-3'-phosphate
  modified_base 15: mod_base = OTHER; note = 2'-fluorocytidine-3'-phosphate
  modified_base 16: mod_base = OTHER; note = 2'-O-methyladenosine-3'-phosphate
  modified_base 17: mod_base = OTHER; note = 2'-fluorocytidine-3'-phosphate
  modified_base 18: mod_base = OTHER; note = 2'-O-methyluridine-3'-phosphate
  modified_base 19: mod_base = OTHER; note = 2'-fluoroguanosine-3'-phosphate
  modified_base 20: mod_base = OTHER; note = 2'-O-methyladenosine-3'-phosphate
  modified_base 21: mod_base = OTHER; note = 2'-fluorouridine-3'-phosphate attached to N-[tris(N-acetylgalactosamine-alkyl)-amidodecanoyl)]-4-hydr oxyprolinol Hyp-(N-acetylgalactosamine-alkyl)3
ggtgtgcggaaaggcactgat

SEQ ID NO: 83 - RNA, 21 nt, synthetic construct
  misc_feature 1..21: note = Description of Artificial Sequence: Synthetic oligonucleotide
  source 1..21: mol_type = other RNA
  modified_base 1: mod_base = OTHER; note = 2'-fluorouridine -3'-phosphorothioate
  modified_base 2: mod_base = OTHER; note = 2'-O-methyluridine-3'-phosphorothioate
  modified_base 3: mod_base = OTHER; note = 2'-fluoroguanosine-3'-phosphate
  modified_base 4: mod_base = OTHER; note = 2'-O-methyladenosine-3'-phosphate
  modified_base 5: mod_base = OTHER; note = 2'-fluoroadenosine-3'-phosphate
  modified_base 6: mod_base = OTHER; note = 2'-O-methyladenosine-3'-phosphate
  modified_base 7: mod_base = OTHER; note = 2'-fluorocytidine-3'-phosphate
  modified_base 8: mod_base = OTHER; note = 2'-O-methylcytidine-3'-phosphate
  modified_base 9: mod_base = OTHER; note = 2'-fluoroadenosine-3'-phosphate
  modified_base 10: mod_base = OTHER; note = 2'-fluoroguanosine-3'-phosphate
  modified_base 11: mod_base = OTHER; note = 2'-fluorouridine-3'-phosphate
  modified_base 12: mod_base = OTHER; note = 2'-O-methyladenosine-3'-phosphate
  modified_base 13: mod_base = OTHER; note = 2'-fluorocytidine-3'-phosphate
  modified_base 14: mod_base = OTHER; note = 2'-O-methyluridine-3'-phosphate
  modified_base 15: mod_base = OTHER; note = 2'-fluorouridine-3'-phosphate
  modified_base 16: mod_base = OTHER; note = 2'-O-methyluridine-3'-phosphate
  modified_base 17: mod_base = OTHER; note = 2'-fluoroadenosine-3'-phosphate
  modified_base 18: mod_base = OTHER; note = 2'-O-methyluridine-3'-phosphate
  modified_base 19: mod_base = OTHER; note = 2'-fluorocytidine-3'-phosphate
  modified_base 20: mod_base = OTHER; note = 2'-O-methyladenosine-3'-phosphate
  modified_base 21: mod_base = OTHER; note = 2'-fluorouridine-3'-phosphate attached to N-[tris(N-acetylgalactosamine-alkyl)-amidodecanoyl)]-4-hydr oxyprolinol Hyp-(N-acetylgalactosamine-alkyl)3
ttgaaaccagtactttatcat

SEQ ID NO: 84 - RNA, 21 nt, synthetic construct
  misc_feature 1..21: note = Description of Artificial Sequence: Synthetic oligonucleotide
  source 1..21: mol_type = other RNA
  modified_base 1: mod_base = OTHER; note = 2'-fluorouridine -3'-phosphorothioate
  modified_base 2: mod_base = OTHER; note = 2'-O-methyladenosine-3'- phosphorothioate
  modified_base 3: mod_base = OTHER; note = 2'-fluorocytidine-3'-phosphate
  modified_base 4: mod_base = OTHER; note = 2'-O-methyluridine-3'-phosphate
  modified_base 5: mod_base = OTHER; note = 2'-fluorouridine-3'-phosphate
  modified_base 6: mod_base = OTHER; note = 2'-O-methylcytidine-3'-phosphate
  modified_base 7: mod_base = OTHER; note = 2'-fluorocytidine-3'-phosphate
  modified_base 8: mod_base = OTHER; note = 2'-O-methyladenosine-3'-phosphate
  modified_base 9: mod_base = OTHER; note = 2'-fluoroadenosine-3'-phosphate
  modified_base 10: mod_base = OTHER; note = 2'-fluoroadenosine-3'-phosphate
  modified_base 11: mod_base = OTHER; note = 2'-fluoroguanosine-3'-phosphate
  modified_base 12: mod_base = OTHER; note = 2'-O-methyluridine-3'-phosphate
  modified_base 13: mod_base = OTHER; note = 2'-fluorocytidine-3'-phosphate
  modified_base 14: mod_base = OTHER; note = 2'-O-methyluridine-3'-phosphate
  modified_base 15: mod_base = OTHER; note = 2'-fluoroadenosine-3'-phosphate
  modified_base 16: mod_base = OTHER; note = 2'-O-methyluridine-3'-phosphate
  modified_base 17: mod_base = OTHER; note = 2'-fluoroadenosine-3'-phosphate
  modified_base 18: mod_base = OTHER; note = 2'-O-methyluridine-3'-phosphate
  modified_base 19: mod_base = OTHER; note = 2'-fluoroadenosine-3'-phosphate
  modified_base 20: mod_base = OTHER; note = 2'-O-methyluridine-3'-phosphate
  modified_base 21: mod_base = OTHER; note = 2'-fluoroadenosine-3'-phosphate attached to N-[tris(N-acetylgalactosamine-alkyl)-amidodecanoyl)]-4-hydr oxyprolinol Hyp-(N-acetylgalactosamine-alkyl)3
tacttccaaagtctatatata

SEQ ID NO: 85 - RNA, 21 nt, synthetic construct
  misc_feature 1..21: note = Description of Artificial Sequence: Synthetic oligonucleotide
  source 1..21: mol_type = other RNA
  modified_base 1: mod_base = OTHER; note = 2'-fluorouridine -3'-phosphorothioate
  modified_base 2: mod_base = OTHER; note = 2'-O-methylcytidine-3'- phosphorothioate
  modified_base 3: mod_base = OTHER; note = 2'-fluorocytidine-3'-phosphate
  modified_base 4: mod_base = OTHER; note = 2'-O-methyluridine-3'-phosphate
  modified_base 5: mod_base = OTHER; note = 2'-fluoroadenosine-3'-phosphate
  modified_base 6: mod_base = OTHER; note = 2'-O-methylguanosine-3'-phosphate
  modified_base 7: mod_base = OTHER; note = 2'-fluoroguanosine-3'-phosphate
  modified_base 8: mod_base = OTHER; note = 2'-O-methyladenosine-3'-phosphate
  modified_base 9: mod_base = OTHER; note = 2'-fluoroadenosine-3'-phosphate
  modified_base 10: mod_base = OTHER; note = 2'-fluorocytidine-3'-phosphate
  modified_base 11: mod_base = OTHER; note = 2'-fluorocytidine-3'-phosphate
  modified_base 12: mod_base = OTHER; note = 2'-O-methyluridine-3'-phosphate
  modified_base 13: mod_base = OTHER; note = 2'-fluorouridine-3'-phosphate
  modified_base 14: mod_base = OTHER; note = 2'-O-methyluridine-3'-phosphate
  modified_base 15: mod_base = OTHER; note = 2'-fluorouridine-3'-phosphate
  modified_base 16: mod_base = OTHER; note = 2'-O-methyladenosine-3'-phosphate
  modified_base 17: mod_base = OTHER; note = 2'-fluoroguanosine-3'-phosphate
  modified_base 18: mod_base = OTHER; note = 2'-O-methyladenosine-3'-phosphate
  modified_base 19: mod_base = OTHER; note = 2'-fluoroadenosine-3'-phosphate
  modified_base 20: mod_base = OTHER; note = 2'-O-methyladenosine-3'-phosphate
  modified_base 21: mod_base = OTHER; note = 2'-fluorouridine-3'-phosphate attached to N-[tris(N-acetylgalactosamine-alkyl)-amidodecanoyl)]-4-hydr oxyprolinol Hyp-(N-acetylgalactosamine-alkyl)3
tcctaggaaccttttagaaat

SEQ ID NO: 86 - RNA, 21 nt, synthetic construct
  misc_feature 1..21: note = Description of Artificial Sequence: Synthetic oligonucleotide
  source 1..21: mol_type = other RNA
  modified_base 1: mod_base = OTHER; note = 2'-fluorocytidine-3'-phosphorothioate
  modified_base 2: mod_base = OTHER; note = 2'-O-methyluridine-3'-phosphorothioate
  modified_base 3: mod_base = OTHER; note = 2'-fluorocytidine-3'-phosphate
  modified_base 4: mod_base = OTHER; note = 2'-O-methylcytidine-3'-phosphate
  modified_base 5: mod_base = OTHER; note = 2'-fluorouridine-3'-phosphate
  modified_base 6: mod_base = OTHER; note = 2'-O-methylguanosine-3'-phosphate
  modified_base 7: mod_base = OTHER; note = 2'-fluoroadenosine-3'-phosphate
  modified_base 8: mod_base = OTHER; note = 2'-O-methylguanosine-3'-phosphate
  modified_base 9: mod_base = OTHER; note = 2'-fluoroguanosine-3'-phosphate
  modified_base 10: mod_base = OTHER; note = 2'-fluoroadenosine-3'-phosphate
  modified_base 11: mod_base = OTHER; note = 2'-fluoroadenosine-3'-phosphate
  modified_base 12: mod_base = OTHER; note = 2'-O-methyladenosine-3'-phosphate
  modified_base 13: mod_base = OTHER; note = 2'-fluoroadenosine-3'-phosphate
  modified_base 14: mod_base = OTHER; note = 2'-O-methyluridine-3'-phosphate
  modified_base 15: mod_base = OTHER; note = 2'-fluorouridine-3'-phosphate
  modified_base 16: mod_base = OTHER; note = 2'-O-methyluridine-3'-phosphate
  modified_base 17: mod_base = OTHER; note = 2'-fluorouridine-3'-phosphate
  modified_base 18: mod_base = OTHER; note = 2'-O-methylguanosine-3'-phosphate
  modified_base 19: mod_base = OTHER; note = 2'-fluoroguanosine-3'-phosphate
  modified_base 20: mod_base = OTHER; note = 2'-O-methyladenosine-3'-phosphate
  modified_base 21: mod_base = OTHER; note = 2'-fluoroadenosine-3'-phosphate attached to N-[tris(N-acetylgalactosamine-alkyl)-amidodecanoyl)]-4-hydr oxyprolinol Hyp-(N-acetylgalactosamine-alkyl)3
ctcctgaggaaaattttggaa

SEQ ID NO: 87 - RNA, 21 nt, synthetic construct
  misc_feature 1..21: note = Description of Artificial Sequence: Synthetic oligonucleotide
  source 1..21: mol_type = other RNA
  modified_base 1: mod_base = OTHER; note = 2'-fluoroguanosine-3'-phosphorothioate
  modified_base 2: mod_base = OTHER; note = 2'-O-methylcytidine-3'- phosphorothioate
  modified_base 3: mod_base = OTHER; note = 2'-fluorouridine-3'-phosphate
  modified_base 4: mod_base = OTHER; note = 2'-O-methylcytidine-3'-phosphate
  modified_base 5: mod_base = OTHER; note = 2'-fluorocytidine-3'-phosphate
  modified_base 6: mod_base = OTHER; note = 2'-O-methylguanosine-3'-phosphate
  modified_base 7: mod_base = OTHER; note = 2'-fluoroguanosine-3'-phosphate
  modified_base 8: mod_base = OTHER; note = 2'-O-methyladenosine-3'-phosphate
  modified_base 9: mod_base = OTHER; note = 2'-fluoroadenosine-3'-phosphate
  modified_base 10: mod_base = OTHER; note = 2'-fluorouridine-3'-phosphate
  modified_base 11: mod_base = OTHER; note = 2'-fluoroguanosine-3'-phosphate
  modified_base 12: mod_base = OTHER; note = 2'-O-methyluridine-3'-phosphate
  modified_base 13: mod_base = OTHER; note = 2'-fluorouridine-3'-phosphate
  modified_base 14: mod_base = OTHER; note = 2'-O-methylguanosine-3'-phosphate
  modified_base 15: mod_base = OTHER; note = 2'-fluorocytidine-3'-phosphate
  modified_base 16: mod_base = OTHER; note = 2'-O-methyluridine-3'-phosphate
  modified_base 17: mod_base = OTHER; note = 2'-fluoroguanosine-3'-phosphate
  modified_base 18: mod_base = OTHER; note = 2'-O-methyladenosine-3'-phosphate
  modified_base 19: mod_base = OTHER; note = 2'-fluoroadenosine-3'-phosphate
  modified_base 20: mod_base = OTHER; note = 2'-O-methyladenosine-3'-phosphate
  modified_base 21: mod_base = OTHER; note = 2'-fluorouridine-3'-phosphate attached to N-[tris(N-acetylgalactosamine-alkyl)-amidodecanoyl)]-4-hydr oxyprolinol Hyp-(N-acetylgalactosamine-alkyl)3
gctccggaatgttgctgaaat

SEQ ID NO: 88 - RNA, 21 nt, synthetic construct
  misc_feature 1..21: note = Description of Artificial Sequence: Synthetic oligonucleotide
  source 1..21: mol_type = other RNA
  modified_base 1: mod_base = OTHER; note = 2'-fluoroguanosine-3'-phosphorothioate
  modified_base 2: mod_base = OTHER; note = 2'-O-methyluridine-3'-phosphorothioate
  modified_base 3: mod_base = OTHER; note = 2'-fluoroguanosine-3'-phosphate
  modified_base 4: mod_base = OTHER; note = 2'-O-methyluridine-3'-phosphate
  modified_base 5: mod_base = OTHER; note = 2'-fluorouridine-3'-phosphate
  modified_base 6: mod_base = OTHER; note = 2'-O-methyluridine-3'-phosphate
  modified_base 7: mod_base = OTHER; note = 2'-fluoroguanosine-3'-phosphate
  modified_base 8: mod_base = OTHER; note = 2'-O-methyluridine-3'-phosphate
  modified_base 9: mod_base = OTHER; note = 2'-fluoroguanosine-3'-phosphate
  modified_base 10: mod_base = OTHER; note = 2'-fluoroguanosine-3'-phosphate
  modified_base 11: mod_base = OTHER; note = 2'-fluoroguanosine-3'-phosphate
  modified_base 12: mod_base = OTHER; note = 2'-O-methylguanosine-3'-phosphate
  modified_base 13: mod_base = OTHER; note = 2'-fluoroadenosine-3'-phosphate
  modified_base 14: mod_base = OTHER; note = 2'-O-methylguanosine-3'-phosphate
  modified_base 15: mod_base = OTHER; note = 2'-fluoroadenosine-3'-phosphate
  modified_base 16: mod_base = OTHER; note = 2'-O-methylcytidine-3'-phosphate
  modified_base 17: mod_base = OTHER; note = 2'-fluorocytidine-3'-phosphate
  modified_base 18: mod_base = OTHER; note = 2'-O-methyladenosine-3'-phosphate
  modified_base 19: mod_base = OTHER; note = 2'-fluoroadenosine-3'-phosphate
  modified_base 20: mod_base = OTHER; note = 2'-O-methyluridine-3'-phosphate
  modified_base 21: mod_base = OTHER; note = 2'-fluoroadenosine-3'-phosphate attached to N-[tris(N-acetylgalactosamine-alkyl)-amidodecanoyl)]-4-hydr oxyprolinol Hyp-(N-acetylgalactosamine-alkyl)3
gtgtttgtggggagaccaata

SEQ ID NO: 89 - RNA, 23 nt, synthetic construct
  misc_feature 1..23: note = Description of Artificial Sequence: Synthetic oligonucleotide
  source 1..23: mol_type = other RNA
  modified_base 1: mod_base = OTHER; note = 2'-O-methyluridine-3'-phosphorothioate
  modified_base 2: mod_base = OTHER; note = 2'-fluorouridine -3'-phosphorothioate
  modified_base 3: mod_base = OTHER; note = 2'-O-methylguanosine-3'-phosphate
  modified_base 4: mod_base = OTHER; note = 2'-fluorouridine-3'-phosphate
  modified_base 5: mod_base = OTHER; note = 2'-O-methylcytidine-3'-phosphate
  modified_base 6: mod_base = OTHER; note = 2'-fluoroguanosine-3'-phosphate
  modified_base 7: mod_base = OTHER; note = 2'-O-methyladenosine-3'-phosphate
  modified_base 8: mod_base = OTHER; note = 2'-fluorouridine-3'-phosphate
  modified_base 9: mod_base = OTHER; note = 2'-O-methylguanosine-3'-phosphate
  modified_base 10: mod_base = OTHER; note = 2'-fluoroadenosine-3'-phosphate
  modified_base 11: mod_base = OTHER; note = 2'-O-methylcytidine-3'-phosphate
  modified_base 12: mod_base = OTHER; note = 2'-O-methyluridine-3'-phosphate
  modified_base 13: mod_base = OTHER; note = 2'-O-methyluridine-3'-phosphate
  modified_base 14: mod_base = OTHER; note = 2'-fluorouridine-3'-phosphate
  modified_base 15: mod_base = OTHER; note = 2'-O-methylcytidine-3'-phosphate
  modified_base 16: mod_base = OTHER; note = 2'-fluoroadenosine-3'-phosphate
  modified_base 17: mod_base = OTHER; note = 2'-O-methylcytidine-3'-phosphate
  modified_base 18: mod_base = OTHER; note = 2'-fluoroadenosine-3'-phosphate
  modified_base 19: mod_base = OTHER; note = 2'-O-methyluridine-3'-phosphate
  modified_base 20: mod_base = OTHER; note = 2'-fluorouridine-3'-phosphate
  modified_base 21: mod_base = OTHER; note = 2'-O-methylcytidine-3'- phosphorothioate
  modified_base 22: mod_base = OTHER; note = 2'-O-methyluridine-3'-phosphorothioate
  modified_base 23: mod_base = OTHER; note = 2'-O-methylguanosine-3'-phosphate
ttgtcgatgactttcacattctg

SEQ ID NO: 90 - RNA, 23 nt, synthetic construct
  misc_feature 1..23: note = Description of Artificial Sequence: Synthetic oligonucleotide
  source 1..23: mol_type = other RNA
  modified_base 1: mod_base = OTHER; note = 2'-O-methyluridine-3'-phosphorothioate
  modified_base 2: mod_base = OTHER; note = 2'-fluorocytidine-3'-phosphorothioate
  modified_base 3: mod_base = OTHER; note = 2'-O-methylcytidine-3'-phosphate
  modified_base 4: mod_base = OTHER; note = 2'-fluorouridine-3'-phosphate
  modified_base 5: mod_base = OTHER; note = 2'-O-methyladenosine-3'-phosphate
  modified_base 6: mod_base = OTHER; note = 2'-fluoroguanosine-3'-phosphate
  modified_base 7: mod_base = OTHER; note = 2'-O-methylguanosine-3'-phosphate
  modified_base 8: mod_base = OTHER; note = 2'-fluoroadenosine-3'-phosphate
  modified_base 9: mod_base = OTHER; note = 2'-O-methylcytidine-3'-phosphate
  modified_base 10: mod_base = OTHER; note = 2'-fluoroadenosine-3'-phosphate
  modified_base 11: mod_base = OTHER; note = 2'-O-methylcytidine-3'-phosphate
  modified_base 12: mod_base = OTHER; note = 2'-O-methylcytidine-3'-phosphate
  modified_base 13: mod_base = OTHER; note = 2'-O-methylcytidine-3'-phosphate
  modified_base 14: mod_base = OTHER; note = 2'-fluoroadenosine-3'-phosphate
  modified_base 15: mod_base = OTHER; note = 2'-O-methyluridine-3'-phosphate
  modified_base 16: mod_base = OTHER; note = 2'-fluorouridine-3'-phosphate
  modified_base 17: mod_base = OTHER; note = 2'-O-methylguanosine-3'-phosphate
  modified_base 18: mod_base = OTHER; note = 2'-fluoroadenosine-3'-phosphate
  modified_base 19: mod_base = OTHER; note = 2'-O-methyladenosine-3'-phosphate
  modified_base 20: mod_base = OTHER; note = 2'-fluoroadenosine-3'-phosphate
  modified_base 21: mod_base = OTHER; note = 2'-O-methyladenosine-3'- phosphorothioate
  modified_base 22: mod_base = OTHER; note = 2'-O-methylguanosine-3'- phosphorothioate
  modified_base 23: mod_base = OTHER; note = 2'-O-methyluridine-3'-phosphate
tcctaggacacccattgaaaagt

SEQ ID NO: 91 - RNA, 23 nt, synthetic construct
  misc_feature 1..23: note = Description of Artificial Sequence: Synthetic oligonucleotide
  source 1..23: mol_type = other RNA
  modified_base 1: mod_base = OTHER; note = 2'-O-methyladenosine-3'- phosphorothioate
  modified_base 2: mod_base = OTHER; note = 2'-fluoroadenosine-3'-phosphorothioate
  modified_base 3: mod_base = OTHER; note = 2'-O-methyluridine-3'-phosphate
  modified_base 4: mod_base = OTHER; note = 2'-fluoroguanosine-3'-phosphate
  modified_base 5: mod_base = OTHER; note = 2'-O-methyluridine-3'-phosphate
  modified_base 6: mod_base = OTHER; note = 2'-fluorocytidine-3'-phosphate
  modified_base 7: mod_base = OTHER; note = 2'-O-methyluridine-3'-phosphate
  modified_base 8: mod_base = OTHER; note = 2'-fluorouridine-3'-phosphate
  modified_base 9: mod_base = OTHER; note = 2'-O-methylguanosine-3'-phosphate
  modified_base 10: mod_base = OTHER; note = 2'-fluorouridine-3'-phosphate
  modified_base 11: mod_base = OTHER; note = 2'-O-methylcytidine-3'-phosphate
  modified_base 12: mod_base = OTHER; note = 2'-O-methylguanosine-3'-phosphate
  modified_base 13: mod_base = OTHER; note = 2'-O-methyladenosine-3'-phosphate
  modified_base 14: mod_base = OTHER; note = 2'-fluorouridine-3'-phosphate
  modified_base 15: mod_base = OTHER; note = 2'-O-methylguanosine-3'-phosphate
  modified_base 16: mod_base = OTHER; note = 2'-fluoroadenosine-3'-phosphate
  modified_base 17: mod_base = OTHER; note = 2'-O-methylcytidine-3'-phosphate
  modified_base 18: mod_base = OTHER; note = 2'-fluorouridine-3'-phosphate
  modified_base 19: mod_base = OTHER; note = 2'-O-methyluridine-3'-phosphate
  modified_base 20: mod_base = OTHER; note = 2'-fluorouridine-3'-phosphate
  modified_base 21: mod_base = OTHER; note = 2'-O-methylcytidine-3'- phosphorothioate
  modified_base 22: mod_base = OTHER; note = 2'-O-methyladenosine-3'- phosphorothioate
  modified_base 23: mod_base = OTHER; note = 2'-O-methylcytidine-3'-phosphate
aatgtcttgtcgatgactttcac

SEQ ID NO: 92 - RNA, 23 nt, synthetic construct
  misc_feature 1..23: note = Description of Artificial Sequence: Synthetic oligonucleotide
  source 1..23: mol_type = other RNA
  modified_base 1: mod_base = OTHER; note = 2'-O-methyluridine-3'-phosphorothioate
  modified_base 2: mod_base = OTHER; note = 2'-fluorocytidine-3'-phosphorothioate
  modified_base 3: mod_base = OTHER; note = 2'-O-methyladenosine-3'-phosphate
  modified_base 4: mod_base = OTHER; note = 2'-fluorocytidine-3'-phosphate
  modified_base 5: mod_base = OTHER; note = 2'-O-methylcytidine-3'-phosphate
  modified_base 6: mod_base = OTHER; note = 2'-fluoroadenosine-3'-phosphate
  modified_base 7: mod_base = OTHER; note = 2'-O-methyladenosine-3'-phosphate
  modified_base 8: mod_base = OTHER; note = 2'-fluorouridine-3'-phosphate
  modified_base 9: mod_base = OTHER; note = 2'-O-methylguanosine-3'-phosphate
  modified_base 10: mod_base = OTHER; note = 2'-fluorouridine-3'-phosphate
  modified_base 11: mod_base = OTHER; note = 2'-O-methylcytidine-3'-phosphate
  modified_base 12: mod_base = OTHER; note = 2'-O-methyluridine-3'-phosphate
  modified_base 13: mod_base = OTHER; note = 2'-O-methyluridine-3'-phosphate
  modified_base 14: mod_base = OTHER; note = 2'-fluoroguanosine-3'-phosphate
  modified_base 15: mod_base = OTHER; note = 2'-O-methyluridine-3'-phosphate
  modified_base 16: mod_base = OTHER; note = 2'-fluorocytidine-3'-phosphate
  modified_base 17: mod_base = OTHER; note = 2'-O-methylguanosine-3'-phosphate
  modified_base 18: mod_base = OTHER; note = 2'-fluoroadenosine-3'-phosphate
  modified_base 19: mod_base = OTHER; note = 2'-O-methyluridine-3'-phosphate
  modified_base 20: mod_base = OTHER; note = 2'-fluoroguanosine-3'-phosphate
  modified_base 21: mod_base = OTHER; note = 2'-O-methyladenosine-3'- phosphorothioate
  modified_base 22: mod_base = OTHER; note = 2'-O-methylcytidine-3'- phosphorothioate
  modified_base 23: mod_base = OTHER; note = 2'-O-methyluridine-3'-phosphate
tcaccaatgtcttgtcgatgact

SEQ ID NO: 93 - RNA, 23 nt, synthetic construct
  misc_feature 1..23: note = Description of Artificial Sequence: Synthetic oligonucleotide
  source 1..23: mol_type = other RNA
  modified_base 1: mod_base = OTHER; note = 2'-O-methyluridine-3'-phosphorothioate
  modified_base 2: mod_base = OTHER; note = 2'-fluorouridine -3'-phosphorothioate
  modified_base 3: mod_base = OTHER; note = 2'-O-methylcytidine-3'-phosphate
  modified_base 4: mod_base = OTHER; note = 2'-fluorocytidine-3'-phosphate
  modified_base 5: mod_base = OTHER; note = 2'-O-methyluridine-3'-phosphate
  modified_base 6: mod_base = OTHER; note = 2'-fluoroadenosine-3'-phosphate
  modified_base 7: mod_base = OTHER; note = 2'-O-methylguanosine-3'-phosphate
  modified_base 8: mod_base = OTHER; note = 2'-fluoroguanosine-3'-phosphate
  modified_base 9: mod_base = OTHER; note = 2'-O-methyladenosine-3'-phosphate
  modified_base 10: mod_base = OTHER; note = 2'-fluorocytidine-3'-phosphate
  modified_base 11: mod_base = OTHER; note = 2'-O-methyladenosine-3'-phosphate
  modified_base 12: mod_base = OTHER; note = 2'-O-methylcytidine-3'-phosphate
  modified_base 13: mod_base = OTHER; note = 2'-O-methylcytidine-3'-phosphate
  modified_base 14: mod_base = OTHER; note = 2'-fluorocytidine-3'-phosphate
  modified_base 15: mod_base = OTHER; note = 2'-O-methyladenosine-3'-phosphate
  modified_base 16: mod_base = OTHER; note = 2'-fluorouridine-3'-phosphate
  modified_base 17: mod_base = OTHER; note = 2'-O-methyluridine-3'-phosphate
  modified_base 18: mod_base = OTHER; note = 2'-fluoroguanosine-3'-phosphate
  modified_base 19: mod_base = OTHER; note = 2'-O-methyladenosine-3'-phosphate
  modified_base 20: mod_base = OTHER; note = 2'-fluoroadenosine-3'-phosphate
  modified_base 21: mod_base = OTHER; note = 2'-O-methyladenosine-3'- phosphorothioate
  modified_base 22: mod_base = OTHER; note = 2'-O-methyladenosine-3'- phosphorothioate
  modified_base 23: mod_base = OTHER; note = 2'-O-methylguanosine-3'-phosphate
ttcctaggacacccattgaaaag

SEQ ID NO: 94 - RNA, 23 nt, synthetic construct
  misc_feature 1..23: note = Description of Artificial Sequence: Synthetic oligonucleotide
  source 1..23: mol_type = other RNA
  modified_base 1: mod_base = OTHER; note = 2'-O-methyladenosine-3'- phosphorothioate
  modified_base 2: mod_base = OTHER; note = 2'-fluoroadenosine-3'-phosphorothioate
  modified_base 3: mod_base = OTHER; note = 2'-O-methylguanosine-3'-phosphate
  modified_base 4: mod_base = OTHER; note = 2'-fluoroguanosine-3'-phosphate
  modified_base 5: mod_base = OTHER; note = 2'-O-methyluridine-3'-phosphate
  modified_base 6: mod_base = OTHER; note = 2'-fluorouridine-3'-phosphate
  modified_base 7: mod_base = OTHER; note = 2'-O-methylcytidine-3'-phosphate
  modified_base 8: mod_base = OTHER; note = 2'-fluorocytidine-3'-phosphate
  modified_base 9: mod_base = OTHER; note = 2'-O-methyluridine-3'-phosphate
  modified_base 10: mod_base = OTHER; note = 2'-fluoroadenosine-3'-phosphate
  modified_base 11: mod_base = OTHER; note = 2'-O-methylguanosine-3'-phosphate
  modified_base 12: mod_base = OTHER; note = 2'-O-methylguanosine-3'-phosphate
  modified_base 13: mod_base = OTHER; note = 2'-O-methyladenosine-3'-phosphate
  modified_base 14: mod_base = OTHER; note = 2'-fluorocytidine-3'-phosphate
  modified_base 15: mod_base = OTHER; note = 2'-O-methyladenosine-3'-phosphate
  modified_base 16: mod_base = OTHER; note = 2'-fluorocytidine-3'-phosphate
  modified_base 17: mod_base = OTHER; note = 2'-O-methylcytidine-3'-phosphate
  modified_base 18: mod_base = OTHER; note = 2'-fluorocytidine-3'-phosphate
  modified_base 19: mod_base = OTHER; note = 2'-O-methyladenosine-3'-phosphate
  modified_base 20: mod_base = OTHER; note = 2'-fluorouridine-3'-phosphate
  modified_base 21: mod_base = OTHER; note = 2'-O-methyluridine-3'-phosphorothioate
  modified_base 22: mod_base = OTHER; note = 2'-O-methylguanosine-3'- phosphorothioate
  modified_base 23: mod_base = OTHER; note = 2'-O-methyladenosine-3'-phosphate
aaggttcctaggacacccattga

SEQ ID NO: 95 - RNA, 23 nt, synthetic construct
  misc_feature 1..23: note = Description of Artificial Sequence: Synthetic oligonucleotide
  source 1..23: mol_type = other RNA
  modified_base 1: mod_base = OTHER; note = 2'-O-methyluridine-3'-phosphorothioate
  modified_base 2: mod_base = OTHER; note = 2'-fluoroguanosine-3'-phosphorothioate
  modified_base 3: mod_base = OTHER; note = 2'-O-methylguanosine-3'-phosphate
  modified_base 4: mod_base = OTHER; note = 2'-fluoroadenosine-3'-phosphate
  modified_base 5: mod_base = OTHER; note = 2'-O-methyladenosine-3'-phosphate
  modified_base 6: mod_base = OTHER; note = 2'-fluoroadenosine-3'-phosphate
  modified_base 7: mod_base = OTHER; note = 2'-O-methyladenosine-3'-phosphate
  modified_base 8: mod_base = OTHER; note = 2'-fluorouridine-3'-phosphate
  modified_base 9: mod_base = OTHER; note = 2'-O-methyladenosine-3'-phosphate
  modified_base 10: mod_base = OTHER; note = 2'-fluorouridine-3'-phosphate
  modified_base 11: mod_base = OTHER; note = 2'-O-methyluridine-3'-phosphate
  modified_base 12: mod_base = OTHER; note = 2'-O-methylguanosine-3'-phosphate
  modified_base 13: mod_base = OTHER; note = 2'-O-methyluridine-3'-phosphate
  modified_base 14: mod_base = OTHER; note = 2'-fluoroguanosine-3'-phosphate
  modified_base 15: mod_base = OTHER; note = 2'-O-methylcytidine-3'-phosphate
  modified_base 16: mod_base = OTHER; note = 2'-fluoroadenosine-3'-phosphate
  modified_base 17: mod_base = OTHER; note = 2'-O-methylcytidine-3'-phosphate
  modified_base 18: mod_base = OTHER; note = 2'-fluorouridine-3'-phosphate
  modified_base 19: mod_base = OTHER; note = 2'-O-methylguanosine-3'-phosphate
  modified_base 20: mod_base = OTHER; note = 2'-fluorouridine-3'-phosphate
  modified_base 21: mod_base = OTHER; note = 2'-O-methylcytidine-3'- phosphorothioate
  modified_base 22: mod_base = OTHER; note = 2'-O-methyladenosine-3'- phosphorothioate
  modified_base 23: mod_base = OTHER; note = 2'-O-methylguanosine-3'-phosphate
tggaaaatattgtgcactgtcag

SEQ ID NO: 96 - RNA, 23 nt, synthetic construct
  misc_feature 1..23: note = Description of Artificial Sequence: Synthetic oligonucleotide
  source 1..23: mol_type = other RNA
  modified_base 1: mod_base = OTHER; note = 2'-O-methyluridine-3'-phosphorothioate
  modified_base 2: mod_base = OTHER; note = 2'-fluorouridine -3'-phosphorothioate
  modified_base 3: mod_base = OTHER; note = 2'-O-methyladenosine-3'-phosphate
  modified_base 4: mod_base = OTHER; note = 2'-fluoroguanosine-3'-phosphate
  modified_base 5: mod_base = OTHER; note = 2'-O-methylguanosine-3'-phosphate
  modified_base 6: mod_base = OTHER; note = 2'-fluoroadenosine-3'-phosphate
  modified_base 7: mod_base = OTHER; note = 2'-O-methylcytidine-3'-phosphate
  modified_base 8: mod_base = OTHER; note = 2'-fluoroadenosine-3'-phosphate
  modified_base 9: mod_base = OTHER; note = 2'-O-methylcytidine-3'-phosphate
  modified_base 10: mod_base = OTHER; note = 2'-fluorocytidine-3'-phosphate
  modified_base 11: mod_base = OTHER; note = 2'-O-methylcytidine-3'-phosphate
  modified_base 12: mod_base = OTHER; note = 2'-O-methyladenosine-3'-phosphate
  modified_base 13: mod_base = OTHER; note = 2'-O-methyluridine-3'-phosphate
  modified_base 14: mod_base = OTHER; note = 2'-fluorouridine-3'-phosphate
  modified_base 15: mod_base = OTHER; note = 2'-O-methylguanosine-3'-phosphate
  modified_base 16: mod_base = OTHER; note = 2'-fluoroadenosine-3'-phosphate
  modified_base 17: mod_base = OTHER; note = 2'-O-methyladenosine-3'-phosphate
  modified_base 18: mod_base = OTHER; note = 2'-fluoroadenosine-3'-phosphate
  modified_base 19: mod_base = OTHER; note = 2'-O-methyladenosine-3'-phosphate
  modified_base 20: mod_base = OTHER; note = 2'-fluoroguanosine-3'-phosphate
  modified_base 21: mod_base = OTHER; note = 2'-O-methyluridine-3'-phosphorothioate
  modified_base 22: mod_base = OTHER; note = 2'-O-methylcytidine-3'- phosphorothioate
  modified_base 23: mod_base = OTHER; note = 2'-O-methyladenosine-3'-phosphate
ttaggacacccattgaaaagtca

SEQ ID NO: 97 - RNA, 23 nt, synthetic construct
  misc_feature 1..23: note = Description of Artificial Sequence: Synthetic oligonucleotide
  source 1..23: mol_type = other RNA
  modified_base 1: mod_base = OTHER; note = 2'-O-methyluridine-3'-phosphorothioate
  modified_base 2: mod_base = OTHER; note = 2'-fluorocytidine-3'-phosphorothioate
  modified_base 3: mod_base = OTHER; note = 2'-O-methyladenosine-3'-phosphate
  modified_base 4: mod_base = OTHER; note = 2'-fluoroadenosine-3'-phosphate
  modified_base 5: mod_base = OTHER; note = 2'-O-methyluridine-3'-phosphate
  modified_base 6: mod_base = OTHER; note = 2'-fluoroguanosine-3'-phosphate
  modified_base 7: mod_base = OTHER; note = 2'-O-methyluridine-3'-phosphate
  modified_base 8: mod_base = OTHER; note = 2'-fluorocytidine-3'-phosphate
  modified_base 9: mod_base = OTHER; note = 2'-O-methyluridine-3'-phosphate
  modified_base 10: mod_base = OTHER; note = 2'-fluorouridine-3'-phosphate
  modified_base 11: mod_base = OTHER; note = 2'-O-methylguanosine-3'-phosphate
  modified_base 12: mod_base = OTHER; note = 2'-O-methyluridine-3'-phosphate
  modified_base 13: mod_base = OTHER; note = 2'-O-methylcytidine-3'-phosphate
  modified_base 14: mod_base = OTHER; note = 2'-fluoroguanosine-3'-phosphate
  modified_base 15: mod_base = OTHER; note = 2'-O-methyladenosine-3'-phosphate
  modified_base 16: mod_base = OTHER; note = 2'-fluorouridine-3'-phosphate
  modified_base 17: mod_base = OTHER; note = 2'-O-methylguanosine-3'-phosphate
  modified_base 18: mod_base = OTHER; note = 2'-fluoroadenosine-3'-phosphate
  modified_base 19: mod_base = OTHER; note = 2'-O-methylcytidine-3'-phosphate
  modified_base 20: mod_base = OTHER; note = 2'-fluorouridine-3'-phosphate
  modified_base 21: mod_base = OTHER; note = 2'-O-methyluridine-3'-phosphorothioate
  modified_base 22: mod_base = OTHER; note = 2'-O-methyluridine-3'-phosphorothioate
  modified_base 23: mod_base = OTHER; note = 2'-O-methylcytidine-3'-phosphate
tcaatgtcttgtcgatgactttc

SEQ ID NO: 98 - RNA, 23 nt, synthetic construct
  misc_feature 1..23: note = Description of Artificial Sequence: Synthetic oligonucleotide
  source 1..23: mol_type = other RNA
  modified_base 1: mod_base = OTHER; note = 2'-O-methyluridine-3'-phosphorothioate
  modified_base 2: mod_base = OTHER; note = 2'-fluorocytidine-3'-phosphorothioate
  modified_base 3: mod_base = OTHER; note = 2'-O-methyluridine-3'-phosphate
  modified_base 4: mod_base = OTHER; note = 2'-fluorocytidine-3'-phosphate
  modified_base 5: mod_base = OTHER; note = 2'-O-methyladenosine-3'-phosphate
  modified_base 6: mod_base = OTHER; note = 2'-fluorocytidine-3'-phosphate
  modified_base 7: mod_base = OTHER; note = 2'-O-methylcytidine-3'-phosphate
  modified_base 8: mod_base = OTHER; note = 2'-fluoroadenosine-3'-phosphate
  modified_base 9: mod_base = OTHER; note = 2'-O-methyladenosine-3'-phosphate
  modified_base 10: mod_base = OTHER; note = 2'-fluorouridine-3'-phosphate
  modified_base 11: mod_base = OTHER; note = 2'-O-methylguanosine-3'-phosphate
  modified_base 12: mod_base = OTHER; note = 2'-O-methyluridine-3'-phosphate
  modified_base 13: mod_base = OTHER; note = 2'-O-methylcytidine-3'-phosphate
  modified_base 14: mod_base = OTHER; note = 2'-fluorouridine-3'-phosphate
  modified_base 15: mod_base = OTHER; note = 2'-O-methyluridine-3'-phosphate
  modified_base 16: mod_base = OTHER; note = 2'-fluoroguanosine-3'-phosphate
  modified_base 17: mod_base = OTHER; note = 2'-O-methyluridine-3'-phosphate
  modified_base 18: mod_base = OTHER; note = 2'-fluorocytidine-3'-phosphate
  modified_base 19: mod_base = OTHER; note = 2'-O-methylguanosine-3'-phosphate
  modified_base 20: mod_base = OTHER; note = 2'-fluoroadenosine-3'-phosphate
  modified_base 21: mod_base = OTHER; note = 2'-O-methyluridine-3'-phosphorothioate
  modified_base 22: mod_base = OTHER; note = 2'-O-methylguanosine-3'- phosphorothioate
  modified_base 23: mod_base = OTHER; note = 2'-O-methyladenosine-3'-phosphate
tctcaccaatgtcttgtcgatga

SEQ ID NO: 99 - RNA, 23 nt, synthetic construct
  misc_feature 1..23: note = Description of Artificial Sequence: Synthetic oligonucleotide
  source 1..23: mol_type = other RNA
  modified_base 1: mod_base = OTHER; note = 2'-O-methyluridine-3'-phosphorothioate
  modified_base 2: mod_base = OTHER; note = 2'-fluoroadenosine-3'-phosphorothioate
  modified_base 3: mod_base = OTHER; note = 2'-O-methyluridine-3'-phosphate
  modified_base 4: mod_base = OTHER; note = 2'-fluorocytidine-3'-phosphate
  modified_base 5: mod_base = OTHER; note = 2'-O-methyluridine-3'-phosphate
  modified_base 6: mod_base = OTHER; note = 2'-fluorouridine-3'-phosphate
  modified_base 7: mod_base = OTHER; note = 2'-O-methylguanosine-3'-phosphate
  modified_base 8: mod_base = OTHER; note = 2'-fluoroadenosine-3'-phosphate
  modified_base 9: mod_base = OTHER; note = 2'-O-methyladenosine-3'-phosphate
  modified_base 10: mod_base = OTHER; note = 2'-fluorocytidine-3'-phosphate
  modified_base 11: mod_base = OTHER; note = 2'-O-methyladenosine-3'-phosphate
  modified_base 12: mod_base = OTHER; note = 2'-O-methylcytidine-3'-phosphate
  modified_base 13: mod_base = OTHER; note = 2'-O-methylcytidine-3'-phosphate
  modified_base 14: mod_base = OTHER; note = 2'-fluorouridine-3'-phosphate
  modified_base 15: mod_base = OTHER; note = 2'-O-methyluridine-3'-phosphate
  modified_base 16: mod_base = OTHER; note = 2'-fluorouridine-3'-phosphate
  modified_base 17: mod_base = OTHER; note = 2'-O-methylcytidine-3'-phosphate
  modified_base 18: mod_base = OTHER; note = 2'-fluorouridine-3'-phosphate
  modified_base 19: mod_base = OTHER; note = 2'-O-methylcytidine-3'-phosphate
  modified_base 20: mod_base = OTHER; note = 2'-fluorocytidine-3'-phosphate
  modified_base 21: mod_base = OTHER; note = 2'-O-methylcytidine-3'- phosphorothioate
  modified_base 22: mod_base = OTHER; note = 2'-O-methylcytidine-3'- phosphorothioate
  modified_base 23: mod_base = OTHER; note = 2'-O-methylcytidine-3'-phosphate
tatcttgaacacctttctccccc

SEQ ID NO: 100 - RNA, 23 nt, synthetic construct
  misc_feature 1..23: note = Description of Artificial Sequence: Synthetic oligonucleotide
  source 1..23: mol_type = other RNA
  modified_base 1: mod_base = OTHER; note = 2'-O-methyluridine-3'-phosphorothioate
  modified_base 2: mod_base = OTHER; note = 2'-fluorocytidine-3'-phosphorothioate
  modified_base 3: mod_base = OTHER; note = 2'-O-methyluridine-3'-phosphate
  modified_base 4: mod_base = OTHER; note = 2'-fluoroadenosine-3'-phosphate
  modified_base 5: mod_base = OTHER; note = 2'-O-methylguanosine-3'-phosphate
  modified_base 6: mod_base = OTHER; note = 2'-fluoroguanosine-3'-phosphate
  modified_base 7: mod_base = OTHER; note = 2'-O-methyladenosine-3'-phosphate
  modified_base 8: mod_base = OTHER; note = 2'-fluorocytidine-3'-phosphate
  modified_base 9: mod_base = OTHER; note = 2'-O-methyladenosine-3'-phosphate
  modified_base 10: mod_base = OTHER; note = 2'-fluorocytidine-3'-phosphate
  modified_base 11: mod_base = OTHER; note = 2'-O-methylcytidine-3'-phosphate
  modified_base 12: mod_base = OTHER; note = 2'-O-methylcytidine-3'-phosphate
  modified_base 13: mod_base = OTHER; note = 2'-O-methyladenosine-3'-phosphate
  modified_base 14: mod_base = OTHER; note = 2'-fluorouridine-3'-phosphate
  modified_base 15: mod_base = OTHER; note = 2'-O-methyluridine-3'-phosphate
  modified_base 16: mod_base = OTHER; note = 2'-fluoroguanosine-3'-phosphate
  modified_base 17: mod_base = OTHER; note = 2'-O-methyladenosine-3'-phosphate
  modified_base 18: mod_base = OTHER; note = 2'-fluoroadenosine-3'-phosphate
  modified_base 19: mod_base = OTHER; note = 2'-O-methyladenosine-3'-phosphate
  modified_base 20: mod_base = OTHER; note = 2'-fluoroadenosine-3'-phosphate
  modified_base 21: mod_base = OTHER; note = 2'-O-methylguanosine-3'- phosphorothioate
  modified_base 22: mod_base = OTHER; note = 2'-O-methyluridine-3'-phosphorothioate
  modified_base 23: mod_base = OTHER; note = 2'-O-methylcytidine-3'-phosphate
tctaggacacccattgaaaagtc

SEQ ID NO: 101 - RNA, 23 nt, synthetic construct
  misc_feature 1..23: note = Description of Artificial Sequence: Synthetic oligonucleotide
  source 1..23: mol_type = other RNA
  modified_base 1: mod_base = OTHER; note = 2'-O-methyluridine-3'-phosphorothioate
  modified_base 2: mod_base = OTHER; note = 2'-fluoroguanosine-3'-phosphorothioate
  modified_base 3: mod_base = OTHER; note = 2'-O-methyluridine-3'-phosphate
  modified_base 4: mod_base = OTHER; note = 2'-fluorouridine-3'-phosphate
  modified_base 5: mod_base = OTHER; note = 2'-O-methylcytidine-3'-phosphate
  modified_base 6: mod_base = OTHER; note = 2'-fluorocytidine-3'-phosphate
  modified_base 7: mod_base = OTHER; note = 2'-O-methyluridine-3'-phosphate
  modified_base 8: mod_base = OTHER; note = 2'-fluoroadenosine-3'-phosphate
  modified_base 9: mod_base = OTHER; note = 2'-O-methylguanosine-3'-phosphate
  modified_base 10: mod_base = OTHER; note = 2'-fluoroguanosine-3'-phosphate
  modified_base 11: mod_base = OTHER; note = 2'-O-methyladenosine-3'-phosphate
  modified_base 12: mod_base = OTHER; note = 2'-O-methylcytidine-3'-phosphate
  modified_base 13: mod_base = OTHER; note = 2'-O-methyladenosine-3'-phosphate
  modified_base 14: mod_base = OTHER; note = 2'-fluorocytidine-3'-phosphate
  modified_base 15: mod_base = OTHER; note = 2'-O-methylcytidine-3'-phosphate
  modified_base 16: mod_base = OTHER; note = 2'-fluorocytidine-3'-phosphate
  modified_base 17: mod_base = OTHER; note = 2'-O-methyladenosine-3'-phosphate
  modified_base 18: mod_base = OTHER; note = 2'-fluorouridine-3'-phosphate
  modified_base 19: mod_base = OTHER; note = 2'-O-methyluridine-3'-phosphate
  modified_base 20: mod_base = OTHER; note = 2'-fluoroguanosine-3'-phosphate
  modified_base 21: mod_base = OTHER; note = 2'-O-methyladenosine-3'- phosphorothioate
  modified_base 22: mod_base = OTHER; note = 2'-O-methyladenosine-3'- phosphorothioate
  modified_base 23: mod_base = OTHER; note = 2'-O-methyladenosine-3'-phosphate
tgttcctaggacacccattgaaa

SEQ ID NO: 102 - RNA, 23 nt, synthetic construct
  misc_feature 1..23: note = Description of Artificial Sequence: Synthetic oligonucleotide
  source 1..23: mol_type = other RNA
  modified_base 1: mod_base = OTHER; note = 2'-O-methyluridine-3'-phosphorothioate
  modified_base 2: mod_base = OTHER; note = 2'-fluoroguanosine-3'-phosphorothioate
  modified_base 3: mod_base = OTHER; note = 2'-O-methyladenosine-3'-phosphate
  modified_base 4: mod_base = OTHER; note = 2'-fluorocytidine-3'-phosphate
  modified_base 5: mod_base = OTHER; note = 2'-O-methyladenosine-3'-phosphate
  modified_base 6: mod_base = OTHER; note = 2'-fluorocytidine-3'-phosphate
  modified_base 7: mod_base = OTHER; note = 2'-O-methylcytidine-3'-phosphate
  modified_base 8: mod_base = OTHER; note = 2'-fluorocytidine-3'-phosphate
  modified_base 9: mod_base = OTHER; note = 2'-O-methyladenosine-3'-phosphate
  modified_base 10: mod_base = OTHER; note = 2'-fluorouridine-3'-phosphate
  modified_base 11: mod_base = OTHER; note = 2'-O-methyluridine-3'-phosphate
  modified_base 12: mod_base = OTHER; note = 2'-O-methylguanosine-3'-phosphate
  modified_base 13: mod_base = OTHER; note = 2'-O-methyladenosine-3'-phosphate
  modified_base 14: mod_base = OTHER; note = 2'-fluoroadenosine-3'-phosphate
  modified_base 15: mod_base = OTHER; note = 2'-O-methyladenosine-3'-phosphate
  modified_base 16: mod_base = OTHER; note = 2'-fluoroadenosine-3'-phosphate
  modified_base 17: mod_base = OTHER; note = 2'-O-methylguanosine-3'-phosphate
  modified_base 18: mod_base = OTHER; note = 2'-fluorouridine-3'-phosphate
  modified_base 19: mod_base = OTHER; note = 2'-O-methylcytidine-3'-phosphate
  modified_base 20: mod_base = OTHER; note = 2'-fluoroadenosine-3'-phosphate
  modified_base 21: mod_base = OTHER; note = 2'-O-methyladenosine-3'- phosphorothioate
  modified_base 22: mod_base = OTHER; note = 2'-O-methyladenosine-3'- phosphorothioate
  modified_base 23: mod_base = OTHER; note = 2'-O-methyladenosine-3'-phosphate
tgacacccattgaaaagtcaaaa

SEQ ID NO: 103 - RNA, 23 nt, synthetic construct
  misc_feature 1..23: note = Description of Artificial Sequence: Synthetic oligonucleotide
  source 1..23: mol_type = other RNA
  modified_base 1: mod_base = OTHER; note = 2'-O-methyluridine-3'-phosphorothioate
  modified_base 2: mod_base = OTHER; note = 2'-fluoroadenosine-3'-phosphorothioate
  modified_base 3: mod_base = OTHER; note = 2'-O-methyladenosine-3'-phosphate
  modified_base 4: mod_base = OTHER; note = 2'-fluorouridine-3'-phosphate
  modified_base 5: mod_base = OTHER; note = 2'-O-methylguanosine-3'-phosphate
  modified_base 6: mod_base = OTHER; note = 2'-fluorouridine-3'-phosphate
  modified_base 7: mod_base = OTHER; note = 2'-O-methylcytidine-3'-phosphate
  modified_base 8: mod_base = OTHER; note = 2'-fluorouridine-3'-phosphate
  modified_base 9: mod_base = OTHER; note = 2'-O-methyluridine-3'-phosphate
  modified_base 10: mod_base = OTHER; note = 2'-fluoroguanosine-3'-phosphate
  modified_base 11: mod_base = OTHER; note = 2'-O-methyluridine-3'-phosphate
  modified_base 12: mod_base = OTHER; note = 2'-O-methylcytidine-3'-phosphate
  modified_base 13: mod_base = OTHER; note = 2'-O-methylguanosine-3'-phosphate
  modified_base 14: mod_base = OTHER; note = 2'-fluoroadenosine-3'-phosphate
  modified_base 15: mod_base = OTHER; note = 2'-O-methyluridine-3'-phosphate
  modified_base 16: mod_base = OTHER; note = 2'-fluoroguanosine-3'-phosphate
  modified_base 17: mod_base = OTHER; note = 2'-O-methyladenosine-3'-phosphate
  modified_base 18: mod_base = OTHER; note = 2'-fluorocytidine-3'-phosphate
  modified_base 19: mod_base = OTHER; note = 2'-O-methyluridine-3'-phosphate
  modified_base 20: mod_base = OTHER; note = 2'-fluorouridine-3'-phosphate
  modified_base 21: mod_base = OTHER; note = 2'-O-methyluridine-3'-phosphorothioate
  modified_base 22: mod_base = OTHER; note = 2'-O-methylcytidine-3'- phosphorothioate
  modified_base 23: mod_base = OTHER; note = 2'-O-methyladenosine-3'-phosphate
taatgtcttgtcgatgactttca

SEQ ID NO: 104 - RNA, 23 nt, synthetic construct
  misc_feature 1..23: note = Description of Artificial Sequence: Synthetic oligonucleotide
  source 1..23: mol_type = other RNA
  modified_base 1: mod_base = OTHER; note = 2'-O-methyluridine-3'-phosphorothioate
  modified_base 2: mod_base = OTHER; note = 2'-fluorouridine -3'-phosphorothioate
  modified_base 3: mod_base = OTHER; note = 2'-O-methylguanosine-3'-phosphate
  modified_base 4: mod_base = OTHER; note = 2'-fluoroadenosine-3'-phosphate
  modified_base 5: mod_base = OTHER; note = 2'-O-methyladenosine-3'-phosphate
  modified_base 6: mod_base = OTHER; note = 2'-fluorocytidine-3'-phosphate
  modified_base 7: mod_base = OTHER; note = 2'-O-methyladenosine-3'-phosphate
  modified_base 8: mod_base = OTHER; note = 2'-fluorocytidine-3'-phosphate
  modified_base 9: mod_base = OTHER; note = 2'-O-methylcytidine-3'-phosphate
  modified_base 10: mod_base = OTHER; note = 2'-fluorouridine-3'-phosphate
  modified_base 11: mod_base = OTHER; note = 2'-O-methyluridine-3'-phosphate
  modified_base 12: mod_base = OTHER; note = 2'-O-methyluridine-3'-phosphate
  modified_base 13: mod_base = OTHER; note = 2'-O-methylcytidine-3'-phosphate
  modified_base 14: mod_base = OTHER; note = 2'-fluorouridine-3'-phosphate
  modified_base 15: mod_base = OTHER; note = 2'-O-methylcytidine-3'-phosphate
  modified_base 16: mod_base = OTHER; note = 2'-fluorocytidine-3'-phosphate
  modified_base 17: mod_base = OTHER; note = 2'-O-methylcytidine-3'-phosphate
  modified_base 18: mod_base = OTHER; note = 2'-fluorocytidine-3'-phosphate
  modified_base 19: mod_base = OTHER; note = 2'-O-methylcytidine-3'-phosphate
  modified_base 20: mod_base = OTHER; note = 2'-fluorouridine-3'-phosphate
  modified_base 21: mod_base = OTHER; note = 2'-O-methylguanosine-3'- phosphorothioate
  modified_base 22: mod_base = OTHER; note = 2'-O-methylguanosine-3'- phosphorothioate
  modified_base 23: mod_base = OTHER; note = 2'-O-methyladenosine-3'-phosphate
ttgaacacctttctccccctgga

SEQ ID NO: 105 - RNA, 23 nt, synthetic construct
  misc_feature 1..23: note = Description of Artificial Sequence: Synthetic oligonucleotide
  source 1..23: mol_type = other RNA
  modified_base 1: mod_base = OTHER; note = 2'-O-methyladenosine-3'- phosphorothioate
  modified_base 2: mod_base = OTHER; note = 2'-fluoroadenosine-3'-phosphorothioate
  modified_base 3: mod_base = OTHER; note = 2'-O-methylguanosine-3'-phosphate
  modified_base 4: mod_base = OTHER; note = 2'-fluoroguanosine-3'-phosphate
  modified_base 5: mod_base = OTHER; note = 2'-O-methyladenosine-3'-phosphate
  modified_base 6: mod_base = OTHER; note = 2'-fluorouridine-3'-phosphate
  modified_base 7: mod_base = OTHER; note = 2'-O-methyluridine-3'-phosphate
  modified_base 8: mod_base = OTHER; note = 2'-fluorouridine-3'-phosphate
  modified_base 9: mod_base = OTHER; note = 2'-O-methyluridine-3'-phosphate
  modified_base 10: mod_base = OTHER; note = 2'-fluorouridine-3'-phosphate
  modified_base 11: mod_base = OTHER; note = 2'-O-methylcytidine-3'-phosphate
  modified_base 12: mod_base = OTHER; note = 2'-O-methylcytidine-3'-phosphate
  modified_base 13: mod_base = OTHER; note = 2'-O-methyluridine-3'-phosphate
  modified_base 14: mod_base = OTHER; note = 2'-fluorocytidine-3'-phosphate
  modified_base 15: mod_base = OTHER; note = 2'-O-methyladenosine-3'-phosphate
  modified_base 16: mod_base = OTHER; note = 2'-fluorocytidine-3'-phosphate
  modified_base 17: mod_base = OTHER; note = 2'-O-methylcytidine-3'-phosphate
  modified_base 18: mod_base = OTHER; note = 2'-fluoroadenosine-3'-phosphate
  modified_base 19: mod_base = OTHER; note = 2'-O-methyladenosine-3'-phosphate
  modified_base 20: mod_base = OTHER; note = 2'-fluorouridine-3'-phosphate
  modified_base 21: mod_base = OTHER; note = 2'-O-methylguanosine-3'- phosphorothioate
  modified_base 22: mod_base = OTHER; note = 2'-O-methyluridine-3'-phosphorothioate
  modified_base 23: mod_base = OTHER; note = 2'-O-methylcytidine-3'-phosphate
aaggatttttcctcaccaatgtc

SEQ ID NO: 106 - RNA, 23 nt, synthetic construct
  misc_feature 1..23: note = Description of Artificial Sequence: Synthetic oligonucleotide
  source 1..23: mol_type = other RNA
  modified_base 1: mod_base = OTHER; note = 2'-O-methyladenosine-3'- phosphorothioate
  modified_base 2: mod_base = OTHER; note = 2'-fluoroguanosine-3'-phosphorothioate
  modified_base 3: mod_base = OTHER; note = 2'-O-methylguanosine-3'-phosphate
  modified_base 4: mod_base = OTHER; note = 2'-fluoroadenosine-3'-phosphate
  modified_base 5: mod_base = OTHER; note = 2'-O-methyluridine-3'-phosphate
  modified_base 6: mod_base = OTHER; note = 2'-fluorouridine-3'-phosphate
  modified_base 7: mod_base = OTHER; note = 2'-O-methyluridine-3'-phosphate
  modified_base 8: mod_base = OTHER; note = 2'-fluorouridine-3'-phosphate
  modified_base 9: mod_base = OTHER; note = 2'-O-methyluridine-3'-phosphate
  modified_base 10: mod_base = OTHER; note = 2'-fluorocytidine-3'-phosphate
  modified_base 11: mod_base = OTHER; note = 2'-O-methylcytidine-3'-phosphate
  modified_base 12: mod_base = OTHER; note = 2'-O-methyluridine-3'-phosphate
  modified_base 13: mod_base = OTHER; note = 2'-O-methylcytidine-3'-phosphate
  modified_base 14: mod_base = OTHER; note = 2'-fluoroadenosine-3'-phosphate
  modified_base 15: mod_base = OTHER; note = 2'-O-methylcytidine-3'-phosphate
  modified_base 16: mod_base = OTHER; note = 2'-fluorocytidine-3'-phosphate
  modified_base 17: mod_base = OTHER; note = 2'-O-methyladenosine-3'-phosphate
  modified_base 18: mod_base = OTHER; note = 2'-fluoroadenosine-3'-phosphate
  modified_base 19: mod_base = OTHER; note = 2'-O-methyluridine-3'-phosphate
  modified_base 20: mod_base = OTHER; note = 2'-fluoroguanosine-3'-phosphate
  modified_base 21: mod_base = OTHER; note = 2'-O-methyluridine-3'-phosphorothioate
  modified_base 22: mod_base = OTHER; note = 2'-O-methylcytidine-3'- phosphorothioate
  modified_base 23: mod_base = OTHER; note = 2'-O-methyluridine-3'-phosphate
aggatttttcctcaccaatgtct

SEQ ID NO: 107 - RNA, 23 nt, synthetic construct
  misc_feature 1..23: note = Description of Artificial Sequence: Synthetic oligonucleotide
  source 1..23: mol_type = other RNA
  modified_base 1: mod_base = OTHER; note = 2'-O-methyluridine-3'-phosphorothioate
  modified_base 2: mod_base = OTHER; note = 2'-fluorouridine -3'-phosphorothioate
  modified_base 3: mod_base = OTHER; note = 2'-O-methyluridine-3'-phosphate
  modified_base 4: mod_base = OTHER; note = 2'-fluoroguanosine-3'-phosphate
  modified_base 5: mod_base = OTHER; note = 2'-O-methyladenosine-3'-phosphate
  modified_base 6: mod_base = OTHER; note = 2'-fluoroadenosine-3'-phosphate
  modified_base 7: mod_base = OTHER; note = 2'-O-methylcytidine-3'-phosphate
  modified_base 8: mod_base = OTHER; note = 2'-fluoroadenosine-3'-phosphate
  modified_base 9: mod_base = OTHER; note = 2'-O-methylcytidine-3'-phosphate
  modified_base 10: mod_base = OTHER; note = 2'-fluorocytidine-3'-phosphate
  modified_base 11: mod_base = OTHER; note = 2'-O-methyluridine-3'-phosphate
  modified_base 12: mod_base = OTHER; note = 2'-O-methyluridine-3'-phosphate
  modified_base 13: mod_base = OTHER; note = 2'-O-methyluridine-3'-phosphate
  modified_base 14: mod_base = OTHER; note = 2'-fluorocytidine-3'-phosphate
  modified_base 15: mod_base = OTHER; note = 2'-O-methyluridine-3'-phosphate
  modified_base 16: mod_base = OTHER; note = 2'-fluorocytidine-3'-phosphate
  modified_base 17: mod_base = OTHER; note = 2'-O-methylcytidine-3'-phosphate
  modified_base 18: mod_base = OTHER; note = 2'-fluorocytidine-3'-phosphate
  modified_base 19: mod_base = OTHER; note = 2'-O-methylcytidine-3'-phosphate
  modified_base 20: mod_base = OTHER; note = 2'-fluorocytidine-3'-phosphate
  modified_base 21: mod_base = OTHER; note = 2'-O-methyluridine-3'-phosphorothioate
  modified_base 22: mod_base = OTHER; note = 2'-O-methylguanosine-3'- phosphorothioate
  modified_base 23: mod_base = OTHER; note = 2'-O-methylguanosine-3'-phosphate
tttgaacacctttctccccctgg

SEQ ID NO: 108 - RNA, 23 nt, synthetic construct
  misc_feature 1..23: note = Description of Artificial Sequence: Synthetic oligonucleotide
  source 1..23: mol_type = other RNA
  modified_base 1: mod_base = OTHER; note = 2'-O-methyladenosine-3'- phosphorothioate
  modified_base 2: mod_base = OTHER; note = 2'-fluoroadenosine-3'-phosphorothioate
  modified_base 3: mod_base = OTHER; note = 2'-O-methyladenosine-3'-phosphate
  modified_base 4: mod_base = OTHER; note = 2'-fluoroadenosine-3'-phosphate
  modified_base 5: mod_base = OTHER; note = 2'-O-methyluridine-3'-phosphate
  modified_base 6: mod_base = OTHER; note = 2'-fluorocytidine-3'-phosphate
  modified_base 7: mod_base = OTHER; note = 2'-O-methyladenosine-3'-phosphate
  modified_base 8: mod_base = OTHER; note = 2'-fluorocytidine-3'-phosphate
  modified_base 9: mod_base = OTHER; note = 2'-O-methyladenosine-3'-phosphate
  modified_base 10: mod_base = OTHER; note = 2'-fluoroadenosine-3'-phosphate
  modified_base 11: mod_base = OTHER; note = 2'-O-methyladenosine-3'-phosphate
  modified_base 12: mod_base = OTHER; note = 2'-O-methyluridine-3'-phosphate
  modified_base 13: mod_base = OTHER; note = 2'-O-methyluridine-3'-phosphate
  modified_base 14: mod_base = OTHER; note = 2'-fluoroadenosine-3'-phosphate
  modified_base 15: mod_base = OTHER; note = 2'-O-methylcytidine-3'-phosphate
  modified_base 16: mod_base = OTHER; note = 2'-fluorocytidine-3'-phosphate
  modified_base 17: mod_base = OTHER; note = 2'-O-methyladenosine-3'-phosphate
  modified_base 18: mod_base = OTHER; note = 2'-fluorocytidine-3'-phosphate
  modified_base 19: mod_base = OTHER; note = 2'-O-methylcytidine-3'-phosphate
  modified_base 20: mod_base = OTHER; note = 2'-fluoroadenosine-3'-phosphate
  modified_base 21: mod_base = OTHER; note = 2'-O-methyluridine-3'-phosphorothioate
  modified_base 22: mod_base = OTHER; note = 2'-O-methylcytidine-3'- phosphorothioate
  modified_base 23: mod_base = OTHER; note = 2'-O-methylcytidine-3'-phosphate
aaaatcacaaattaccaccatcc

SEQ ID NO: 109 - RNA, 23 nt, synthetic construct
  misc_feature 1..23: note = Description of Artificial Sequence: Synthetic oligonucleotide
  source 1..23: mol_type = other RNA
  modified_base 1: mod_base = OTHER; note = 2'-O-methyluridine-3'-phosphorothioate
  modified_base 2: mod_base = OTHER; note = 2'-fluoroadenosine-3'-phosphorothioate
  modified_base 3: mod_base = OTHER; note = 2'-O-methyluridine-3'-phosphate
  modified_base 4: mod_base = OTHER; note = 2'-fluoroadenosine-3'-phosphate
  modified_base 5: mod_base = OTHER; note = 2'-O-methyluridine-3'-phosphate
  modified_base 6: mod_base = OTHER; note = 2'-fluorouridine-3'-phosphate
  modified_base 7: mod_base = OTHER; note = 2'-O-methyluridine-3'-phosphate
  modified_base 8: mod_base = OTHER; note = 2'-fluorocytidine-3'-phosphate
  modified_base 9: mod_base = OTHER; note = 2'-O-methylcytidine-3'-phosphate
  modified_base 10: mod_base = OTHER; note = 2'-fluoroadenosine-3'-phosphate
  modified_base 11: mod_base = OTHER; note = 2'-O-methylguanosine-3'-phosphate
  modified_base 12: mod_base = OTHER; note = 2'-O-methylguanosine-3'-phosphate
  modified_base 13: mod_base = OTHER; note = 2'-O-methyladenosine-3'-phosphate
  modified_base 14: mod_base = OTHER; note = 2'-fluorouridine-3'-phosphate
  modified_base 15: mod_base = OTHER; note = 2'-O-methylguanosine-3'-phosphate
  modified_base 16: mod_base = OTHER; note = 2'-fluorocytidine-3'-phosphate
  modified_base 17: mod_base = OTHER; note = 2'-O-methyladenosine-3'-phosphate
  modified_base 18: mod_base = OTHER; note = 2'-fluoroadenosine-3'-phosphate
  modified_base 19: mod_base = OTHER; note = 2'-O-methylguanosine-3'-phosphate
  modified_base 20: mod_base = OTHER; note = 2'-fluorouridine-3'-phosphate
  modified_base 21: mod_base = OTHER; note = 2'-O-methylcytidine-3'- phosphorothioate
  modified_base 22: mod_base = OTHER; note = 2'-O-methylcytidine-3'- phosphorothioate
  modified_base 23: mod_base = OTHER; note = 2'-O-methyladenosine-3'-phosphate
tatatttccaggatgcaagtcca

SEQ ID NO: 110 - RNA, 23 nt, synthetic construct
  misc_feature 1..23: note = Description of Artificial Sequence: Synthetic oligonucleotide
  source 1..23: mol_type = other RNA
  modified_base 1: mod_base = OTHER; note = 2'-O-methyladenosine-3'- phosphorothioate
  modified_base 2: mod_base = OTHER; note = 2'-fluoroadenosine-3'-phosphorothioate
  modified_base 3: mod_base = OTHER; note = 2'-O-methylguanosine-3'-phosphate
  modified_base 4: mod_base = OTHER; note = 2'-fluoroadenosine-3'-phosphate
  modified_base 5: mod_base = OTHER; note = 2'-O-methylcytidine-3'-phosphate
  modified_base 6: mod_base = OTHER; note = 2'-fluorouridine-3'-phosphate
  modified_base 7: mod_base = OTHER; note = 2'-O-methyluridine-3'-phosphate
  modified_base 8: mod_base = OTHER; note = 2'-fluorocytidine-3'-phosphate
  modified_base 9: mod_base = OTHER; note = 2'-O-methyluridine-3'-phosphate
  modified_base 10: mod_base = OTHER; note = 2'-fluoroadenosine-3'-phosphate
  modified_base 11: mod_base = OTHER; note = 2'-O-methylcytidine-3'-phosphate
  modified_base 12: mod_base = OTHER; note = 2'-O-methylcytidine-3'-phosphate
  modified_base 13: mod_base = OTHER; note = 2'-O-methyluridine-3'-phosphate
  modified_base 14: mod_base = OTHER; note = 2'-fluorouridine-3'-phosphate
  modified_base 15: mod_base = OTHER; note = 2'-O-methylcytidine-3'-phosphate
  modified_base 16: mod_base = OTHER; note = 2'-fluorocytidine-3'-phosphate
  modified_base 17: mod_base = OTHER; note = 2'-O-methylcytidine-3'-phosphate
  modified_base 18: mod_base = OTHER; note = 2'-fluorouridine-3'-phosphate
  modified_base 19: mod_base = OTHER; note = 2'-O-methyluridine-3'-phosphate
  modified_base 20: mod_base = OTHER; note = 2'-fluorocytidine-3'-phosphate
  modified_base 21: mod_base = OTHER; note = 2'-O-methylcytidine-3'- phosphorothioate
  modified_base 22: mod_base = OTHER; note = 2'-O-methyladenosine-3'- phosphorothioate
  modified_base 23: mod_base = OTHER; note = 2'-O-methylcytidine-3'-phosphate
aagacttctaccttcccttccac

SEQ ID NO: 111 - RNA, 23 nt, synthetic construct
  misc_feature 1..23: note = Description of Artificial Sequence: Synthetic oligonucleotide
  source 1..23: mol_type = other RNA
  modified_base 1: mod_base = OTHER; note = 2'-O-methyladenosine-3'- phosphorothioate
  modified_base 2: mod_base = OTHER; note = 2'-fluoroguanosine-3'-phosphorothioate
  modified_base 3: mod_base = OTHER; note = 2'-O-methylguanosine-3'-phosphate
  modified_base 4: mod_base = OTHER; note = 2'-fluoroadenosine-3'-phosphate
  modified_base 5: mod_base = OTHER; note = 2'-O-methyladenosine-3'-phosphate
  modified_base 6: mod_base = OTHER; note = 2'-fluoroadenosine-3'-phosphate
  modified_base 7: mod_base = OTHER; note = 2'-O-methyluridine-3'-phosphate
  modified_base 8: mod_base = OTHER; note = 2'-fluorocytidine-3'-phosphate
  modified_base 9: mod_base = OTHER; note = 2'-O-methyluridine-3'-phosphate
  modified_base 10: mod_base = OTHER; note = 2'-fluoroadenosine-3'-phosphate
  modified_base 11: mod_base = OTHER; note = 2'-O-methyladenosine-3'-phosphate
  modified_base 12: mod_base = OTHER; note = 2'-O-methyladenosine-3'-phosphate
  modified_base 13: mod_base = OTHER; note = 2'-O-methylcytidine-3'-phosphate
  modified_base 14: mod_base = OTHER; note = 2'-fluoroadenosine-3'-phosphate
  modified_base 15: mod_base = OTHER; note = 2'-O-methylguanosine-3'-phosphate
  modified_base 16: mod_base = OTHER; note = 2'-fluoroadenosine-3'-phosphate
  modified_base 17: mod_base = OTHER; note = 2'-O-methyladenosine-3'-phosphate
  modified_base 18: mod_base = OTHER; note = 2'-fluoroguanosine-3'-phosphate
  modified_base 19: mod_base = OTHER; note = 2'-O-methyladenosine-3'-phosphate
  modified_base 20: mod_base = OTHER; note = 2'-fluorocytidine-3'-phosphate
  modified_base 21: mod_base = OTHER; note = 2'-O-methyladenosine-3'- phosphorothioate
  modified_base 22: mod_base = OTHER; note = 2'-O-methylguanosine-3'- phosphorothioate
  modified_base 23: mod_base = OTHER; note = 2'-O-methylguanosine-3'-phosphate
aggaaatctaaacagaagacagg

SEQ ID NO: 112 - RNA, 23 nt, synthetic construct
  misc_feature 1..23: note = Description of Artificial Sequence: Synthetic oligonucleotide
  source 1..23: mol_type = other RNA
  modified_base 1: mod_base = OTHER; note = 2'-O-methyladenosine-3'- phosphorothioate
  modified_base 2: mod_base = OTHER; note = 2'-fluoroguanosine-3'-phosphorothioate
  modified_base 3: mod_base = OTHER; note = 2'-O-methyladenosine-3'-phosphate
  modified_base 4: mod_base = OTHER; note = 2'-fluorouridine-3'-phosphate
  modified_base 5: mod_base = OTHER; note = 2'-O-methylcytidine-3'-phosphate
  modified_base 6: mod_base = OTHER; note = 2'-fluorouridine-3'-phosphate
  modified_base 7: mod_base = OTHER; note = 2'-O-methyluridine-3'-phosphate
  modified_base 8: mod_base = OTHER; note = 2'-fluoroguanosine-3'-phosphate
  modified_base 9: mod_base = OTHER; note = 2'-O-methylguanosine-3'-phosphate
  modified_base 10: mod_base = OTHER; note = 2'-fluoroadenosine-3'-phosphate
  modified_base 11: mod_base = OTHER; note = 2'-O-methyladenosine-3'-phosphate
  modified_base 12: mod_base = OTHER; note = 2'-O-methyladenosine-3'-phosphate
  modified_base 13: mod_base = OTHER; note = 2'-O-methylcytidine-3'-phosphate
  modified_base 14: mod_base = OTHER; note = 2'-fluoroadenosine-3'-phosphate
  modified_base 15: mod_base = OTHER; note = 2'-O-methylguanosine-3'-phosphate
  modified_base 16: mod_base = OTHER; note = 2'-fluorocytidine-3'-phosphate
  modified_base 17: mod_base = OTHER; note = 2'-O-methylcytidine-3'-phosphate
  modified_base 18: mod_base = OTHER; note = 2'-fluoroadenosine-3'-phosphate
  modified_base 19: mod_base = OTHER; note = 2'-O-methyladenosine-3'-phosphate
  modified_base 20: mod_base = OTHER; note = 2'-fluoroadenosine-3'-phosphate
  modified_base 21: mod_base = OTHER; note = 2'-O-methylguanosine-3'- phosphorothioate
  modified_base 22: mod_base = OTHER; note = 2'-O-methylguanosine-3'- phosphorothioate
  modified_base 23: mod_base = OTHER; note = 2'-O-methyladenosine-3'-phosphate
agatcttggaaacagccaaagga

SEQ ID NO: 113 - RNA, 23 nt, synthetic construct
  misc_feature 1..23: note = Description of Artificial Sequence: Synthetic oligonucleotide
  source 1..23: mol_type = other RNA
  modified_base 1: mod_base = OTHER; note = 2'-O-methyladenosine-3'- phosphorothioate
  modified_base 2: mod_base = OTHER; note = 2'-fluorouridine -3'-phosphorothioate
  modified_base 3: mod_base = OTHER; note = 2'-O-methylguanosine-3'-phosphate
  modified_base 4: mod_base = OTHER; note = 2'-fluoroadenosine-3'-phosphate
  modified_base 5: mod_base = OTHER; note = 2'-O-methylcytidine-3'-phosphate
  modified_base 6: mod_base = OTHER; note = 2'-fluoroguanosine-3'-phosphate
  modified_base 7: mod_base = OTHER; note = 2'-O-methyluridine-3'-phosphate
  modified_base 8: mod_base = OTHER; note = 2'-fluorouridine-3'-phosphate
  modified_base 9: mod_base = OTHER; note = 2'-O-methylguanosine-3'-phosphate
  modified_base 10: mod_base = OTHER; note = 2'-fluorocytidine-3'-phosphate
  modified_base 11: mod_base = OTHER; note = 2'-O-methylcytidine-3'-phosphate
  modified_base 12: mod_base = OTHER; note = 2'-O-methylcytidine-3'-phosphate
  modified_base 13: mod_base = OTHER; note = 2'-O-methyladenosine-3'-phosphate
  modified_base 14: mod_base = OTHER; note = 2'-fluoroadenosine-3'-phosphate
  modified_base 15: mod_base = OTHER; note = 2'-O-methyladenosine-3'-phosphate
  modified_base 16: mod_base = OTHER; note = 2'-fluorocytidine-3'-phosphate
  modified_base 17: mod_base = OTHER; note = 2'-O-methyladenosine-3'-phosphate
  modified_base 18: mod_base = OTHER; note = 2'-fluorocytidine-3'-phosphate
  modified_base 19: mod_base = OTHER; note = 2'-O-methyladenosine-3'-phosphate
  modified_base 20: mod_base = OTHER; note = 2'-fluorouridine-3'-phosphate
  modified_base 21: mod_base = OTHER; note = 2'-O-methyluridine-3'-phosphorothioate
  modified_base 22: mod_base = OTHER; note = 2'-O-methyluridine-3'-phosphorothioate
  modified_base 23: mod_base = OTHER; note = 2'-O-methyluridine-3'-phosphate
atgacgttgcccaaacacatttt

SEQ ID NO: 114 - RNA, 23 nt, synthetic construct
  misc_feature 1..23: note = Description of Artificial Sequence: Synthetic oligonucleotide
  source 1..23: mol_type = other RNA
  modified_base 1: mod_base = OTHER; note = 2'-O-methyluridine-3'-phosphorothioate
  modified_base 2: mod_base = OTHER; note = 2'-fluoroadenosine-3'-phosphorothioate
  modified_base 3: mod_base = OTHER; note = 2'-O-methyladenosine-3'-phosphate
  modified_base 4: mod_base = OTHER; note = 2'-fluoroguanosine-3'-phosphate
  modified_base 5: mod_base = OTHER; note = 2'-O-methylguanosine-3'-phosphate
  modified_base 6: mod_base = OTHER; note = 2'-fluoroguanosine-3'-phosphate
  modified_base 7: mod_base = OTHER; note = 2'-O-methylguanosine-3'-phosphate
  modified_base 8: mod_base = OTHER; note = 2'-fluorouridine-3'-phosphate
  modified_base 9: mod_base = OTHER; note = 2'-O-methylguanosine-3'-phosphate
  modified_base 10: mod_base = OTHER; note = 2'-fluorouridine-3'-phosphate
  modified_base 11: mod_base = OTHER; note = 2'-O-methylcytidine-3'-phosphate
  modified_base 12: mod_base = OTHER; note = 2'-O-methylcytidine-3'-phosphate
  modified_base 13: mod_base = OTHER; note = 2'-O-methyladenosine-3'-phosphate
  modified_base 14: mod_base = OTHER; note = 2'-fluorocytidine-3'-phosphate
  modified_base 15: mod_base = OTHER; note = 2'-O-methyladenosine-3'-phosphate
  modified_base 16: mod_base = OTHER; note = 2'-fluoroguanosine-3'-phosphate
  modified_base 17: mod_base = OTHER; note = 2'-O-methyluridine-3'-phosphate
  modified_base 18: mod_base = OTHER; note = 2'-fluorocytidine-3'-phosphate
  modified_base 19: mod_base = OTHER; note = 2'-O-methyladenosine-3'-phosphate
  modified_base 20: mod_base = OTHER; note = 2'-fluorocytidine-3'-phosphate
  modified_base 21: mod_base = OTHER; note = 2'-O-methyladenosine-3'- phosphorothioate
  modified_base 22: mod_base = OTHER; note = 2'-O-methyladenosine-3'- phosphorothioate
  modified_base 23: mod_base = OTHER; note = 2'-O-methyladenosine-3'-phosphate
taaggggtgtccacagtcacaaa

SEQ ID NO: 115 - RNA, 23 nt, synthetic construct
  misc_feature 1..23: note = Description of Artificial Sequence: Synthetic oligonucleotide
  source 1..23: mol_type = other RNA
  modified_base 1: mod_base = OTHER; note = 2'-O-methyladenosine-3'- phosphorothioate
  modified_base 2: mod_base = OTHER; note = 2'-fluoroadenosine-3'-phosphorothioate
  modified_base 3: mod_base = OTHER; note = 2'-O-methyluridine-3'-phosphate
  modified_base 4: mod_base = OTHER; note = 2'-fluoroadenosine-3'-phosphate
  modified_base 5: mod_base = OTHER; note = 2'-O-methylguanosine-3'-phosphate
  modified_base 6: mod_base = OTHER; note = 2'-fluorouridine-3'-phosphate
  modified_base 7: mod_base = OTHER; note = 2'-O-methyladenosine-3'-phosphate
  modified_base 8: mod_base = OTHER; note = 2'-fluoroguanosine-3'-phosphate
  modified_base 9: mod_base = OTHER; note = 2'-O-methylcytidine-3'-phosphate
  modified_base 10: mod_base = OTHER; note = 2'-fluorouridine-3'-phosphate
  modified_base 11: mod_base = OTHER; note = 2'-O-methylguanosine-3'-phosphate
  modified_base 12: mod_base = OTHER; note = 2'-O-methylguanosine-3'-phosphate
  modified_base 13: mod_base = OTHER; note = 2'-O-methylcytidine-3'-phosphate
  modified_base 14: mod_base = OTHER; note = 2'-fluoroadenosine-3'-phosphate
  modified_base 15: mod_base = OTHER; note = 2'-O-methylcytidine-3'-phosphate
  modified_base 16: mod_base = OTHER; note = 2'-fluorocytidine-3'-phosphate
  modified_base 17: mod_base = OTHER; note = 2'-O-methylcytidine-3'-phosphate
  modified_base 18: mod_base = OTHER; note = 2'-fluorocytidine-3'-phosphate
  modified_base 19: mod_base = OTHER; note = 2'-O-methyladenosine-3'-phosphate
  modified_base 20: mod_base = OTHER; note = 2'-fluorouridine-3'-phosphate
  modified_base 21: mod_base = OTHER; note = 2'-O-methylcytidine-3'- phosphorothioate
  modified_base 22: mod_base = OTHER; note = 2'-O-methylcytidine-3'- phosphorothioate
  modified_base 23: mod_base = OTHER; note = 2'-O-methyladenosine-3'-phosphate
aatagtagctggcaccccatcca

SEQ ID NO: 116 - RNA, 23 nt, synthetic construct
  misc_feature 1..23: note = Description of Artificial Sequence: Synthetic oligonucleotide
  source 1..23: mol_type = other RNA
  modified_base 1: mod_base = OTHER; note = 2'-O-methyladenosine-3'- phosphorothioate
  modified_base 2: mod_base = OTHER; note = 2'-fluorocytidine-3'-phosphorothioate
  modified_base 3: mod_base = OTHER; note = 2'-O-methylguanosine-3'-phosphate
  modified_base 4: mod_base = OTHER; note = 2'-fluorouridine-3'-phosphate
  modified_base 5: mod_base = OTHER; note = 2'-O-methyluridine-3'-phosphate
  modified_base 6: mod_base = OTHER; note = 2'-fluoroguanosine-3'-phosphate
  modified_base 7: mod_base = OTHER; note = 2'-O-methylcytidine-3'-phosphate
  modified_base 8: mod_base = OTHER; note = 2'-fluorocytidine-3'-phosphate
  modified_base 9: mod_base = OTHER; note = 2'-O-methylcytidine-3'-phosphate
  modified_base 10: mod_base = OTHER; note = 2'-fluoroadenosine-3'-phosphate
  modified_base 11: mod_base = OTHER; note = 2'-O-methyladenosine-3'-phosphate
  modified_base 12: mod_base = OTHER; note = 2'-O-methyladenosine-3'-phosphate
  modified_base 13: mod_base = OTHER; note = 2'-O-methylcytidine-3'-phosphate
  modified_base 14: mod_base = OTHER; note = 2'-fluoroadenosine-3'-phosphate
  modified_base 15: mod_base = OTHER; note = 2'-O-methylcytidine-3'-phosphate
  modified_base 16: mod_base = OTHER; note = 2'-fluoroadenosine-3'-phosphate
  modified_base 17: mod_base = OTHER; note = 2'-O-methyluridine-3'-phosphate
  modified_base 18: mod_base = OTHER; note = 2'-fluorouridine-3'-phosphate
  modified_base 19: mod_base = OTHER; note = 2'-O-methyluridine-3'-phosphate
  modified_base 20: mod_base = OTHER; note = 2'-fluorouridine-3'-phosphate
  modified_base 21: mod_base = OTHER; note = 2'-O-methylcytidine-3'- phosphorothioate
  modified_base 22: mod_base = OTHER; note = 2'-O-methyladenosine-3'- phosphorothioate
  modified_base 23: mod_base = OTHER; note = 2'-O-methyladenosine-3'-phosphate
acgttgcccaaacacattttcaa

SEQ ID NO: 117 - RNA, 23 nt, synthetic construct
  misc_feature 1..23: note = Description of Artificial Sequence: Synthetic oligonucleotide
  source 1..23: mol_type = other RNA
  modified_base 1: mod_base = OTHER; note = 2'-O-methyluridine-3'-phosphorothioate
  modified_base 2: mod_base = OTHER; note = 2'-fluoroguanosine-3'-phosphorothioate
  modified_base 3: mod_base = OTHER; note = 2'-O-methyluridine-3'-phosphate
  modified_base 4: mod_base = OTHER; note = 2'-fluorocytidine-3'-phosphate
  modified_base 5: mod_base = OTHER; note = 2'-O-methyladenosine-3'-phosphate
  modified_base 6: mod_base = OTHER; note = 2'-fluoroguanosine-3'-phosphate
  modified_base 7: mod_base = OTHER; note = 2'-O-methyladenosine-3'-phosphate
  modified_base 8: mod_base = OTHER; note = 2'-fluorouridine-3'-phosphate
  modified_base 9: mod_base = OTHER; note = 2'-O-methylcytidine-3'-phosphate
  modified_base 10: mod_base = OTHER; note = 2'-fluorouridine-3'-phosphate
  modified_base 11: mod_base = OTHER; note = 2'-O-methyluridine-3'-phosphate
  modified_base 12: mod_base = OTHER; note = 2'-O-methylguanosine-3'-phosphate
  modified_base 13: mod_base = OTHER; note = 2'-O-methylguanosine-3'-phosphate
  modified_base 14: mod_base = OTHER; note = 2'-fluoroadenosine-3'-phosphate
  modified_base 15: mod_base = OTHER; note = 2'-O-methyladenosine-3'-phosphate
  modified_base 16: mod_base = OTHER; note = 2'-fluoroadenosine-3'-phosphate
  modified_base 17: mod_base = OTHER; note = 2'-O-methylcytidine-3'-phosphate
  modified_base 18: mod_base = OTHER; note = 2'-fluoroadenosine-3'-phosphate
  modified_base 19: mod_base = OTHER; note = 2'-O-methylguanosine-3'-phosphate
  modified_base 20: mod_base = OTHER; note = 2'-fluorocytidine-3'-phosphate
  modified_base 21: mod_base = OTHER; note = 2'-O-methylcytidine-3'- phosphorothioate
  modified_base 22: mod_base = OTHER; note = 2'-O-methyladenosine-3'- phosphorothioate
  modified_base 23: mod_base = OTHER; note = 2'-O-methyladenosine-3'-phosphate
tgtcagatcttggaaacagccaa

SEQ ID NO: 118 - RNA, 23 nt, synthetic construct
  misc_feature 1..23: note = Description of Artificial Sequence: Synthetic oligonucleotide
  source 1..23: mol_type = other RNA
  modified_base 1: mod_base = OTHER; note = 2'-O-methyladenosine-3'- phosphorothioate
  modified_base 2: mod_base = OTHER; note = 2'-fluoroguanosine-3'-phosphorothioate
  modified_base 3: mod_base = OTHER; note = 2'-O-methylguanosine-3'-phosphate
  modified_base 4: mod_base = OTHER; note = 2'-fluoroguanosine-3'-phosphate
  modified_base 5: mod_base = OTHER; note = 2'-O-methylguanosine-3'-phosphate
  modified_base 6: mod_base = OTHER; note = 2'-fluorouridine-3'-phosphate
  modified_base 7: mod_base = OTHER; note = 2'-O-methylguanosine-3'-phosphate
  modified_base 8: mod_base = OTHER; note = 2'-fluoroguanosine-3'-phosphate
  modified_base 9: mod_base = OTHER; note = 2'-O-methylcytidine-3'-phosphate
  modified_base 10: mod_base = OTHER; note = 2'-fluorouridine-3'-phosphate
  modified_base 11: mod_base = OTHER; note = 2'-O-methyladenosine-3'-phosphate
  modified_base 12: mod_base = OTHER; note = 2'-O-methyluridine-3'-phosphate
  modified_base 13: mod_base = OTHER; note = 2'-O-methyluridine-3'-phosphate
  modified_base 14: mod_base = OTHER; note = 2'-fluorouridine-3'-phosphate
  modified_base 15: mod_base = OTHER; note = 2'-O-methyluridine-3'-phosphate
  modified_base 16: mod_base = OTHER; note = 2'-fluoroguanosine-3'-phosphate
  modified_base 17: mod_base = OTHER; note = 2'-O-methyluridine-3'-phosphate
  modified_base 18: mod_base = OTHER; note = 2'-fluorouridine-3'-phosphate
  modified_base 19: mod_base = OTHER; note = 2'-O-methylguanosine-3'-phosphate
  modified_base 20: mod_base = OTHER; note = 2'-fluoroguanosine-3'-phosphate
  modified_base 21: mod_base = OTHER; note = 2'-O-methyladenosine-3'- phosphorothioate
  modified_base 22: mod_base = OTHER; note = 2'-O-methyladenosine-3'- phosphorothioate
  modified_base 23: mod_base = OTHER; note = 2'-O-methyladenosine-3'-phosphate
aggggtggctattttgttggaaa

SEQ ID NO: 119 - RNA, 23 nt, synthetic construct
  misc_feature 1..23: note = Description of Artificial Sequence: Synthetic oligonucleotide
  source 1..23: mol_type = other RNA
  modified_base 1: mod_base = OTHER; note = 2'-O-methyladenosine-3'- phosphorothioate
  modified_base 2: mod_base = OTHER; note = 2'-fluoroadenosine-3'-phosphorothioate
  modified_base 3: mod_base = OTHER; note = 2'-O-methylguanosine-3'-phosphate
  modified_base 4: mod_base = OTHER; note = 2'-fluoroguanosine-3'-phosphate
  modified_base 5: mod_base = OTHER; note = 2'-O-methyladenosine-3'-phosphate
  modified_base 6: mod_base = OTHER; note = 2'-fluoroadenosine-3'-phosphate
  modified_base 7: mod_base = OTHER; note = 2'-O-methyladenosine-3'-phosphate
  modified_base 8: mod_base = OTHER; note = 2'-fluorouridine-3'-phosphate
  modified_base 9: mod_base = OTHER; note = 2'-O-methylcytidine-3'-phosphate
  modified_base 10: mod_base = OTHER; note = 2'-fluorouridine-3'-phosphate
  modified_base 11: mod_base = OTHER; note = 2'-O-methyladenosine-3'-phosphate
  modified_base 12: mod_base = OTHER; note = 2'-O-methyladenosine-3'-phosphate
  modified_base 13: mod_base = OTHER; note = 2'-O-methyladenosine-3'-phosphate
  modified_base 14: mod_base = OTHER; note = 2'-fluorocytidine-3'-phosphate
  modified_base 15: mod_base = OTHER; note = 2'-O-methyladenosine-3'-phosphate
  modified_base 16: mod_base = OTHER; note = 2'-fluoroguanosine-3'-phosphate
  modified_base 17: mod_base = OTHER; note = 2'-O-methyladenosine-3'-phosphate
  modified_base 18: mod_base = OTHER; note = 2'-fluoroadenosine-3'-phosphate
  modified_base 19: mod_base = OTHER; note = 2'-O-methylguanosine-3'-phosphate
  modified_base 20: mod_base = OTHER; note = 2'-fluoroadenosine-3'-phosphate
  modified_base 21: mod_base = OTHER; note = 2'-O-methylcytidine-3'- phosphorothioate
  modified_base 22: mod_base = OTHER; note = 2'-O-methyladenosine-3'- phosphorothioate
  modified_base 23: mod_base = OTHER; note = 2'-O-methylguanosine-3'-phosphate
aaggaaatctaaacagaagacag

SEQ ID NO: 120 - RNA, 23 nt, synthetic construct
  misc_feature 1..23: note = Description of Artificial Sequence: Synthetic oligonucleotide
  source 1..23: mol_type = other RNA
  modified_base 1: mod_base = OTHER; note = 2'-O-methyladenosine-3'- phosphorothioate
  modified_base 2: mod_base = OTHER; note = 2'-fluoroguanosine-3'-phosphorothioate
  modified_base 3: mod_base = OTHER; note = 2'-O-methyladenosine-3'-phosphate
  modified_base 4: mod_base = OTHER; note = 2'-fluorocytidine-3'-phosphate
  modified_base 5: mod_base = OTHER; note = 2'-O-methyluridine-3'-phosphate
  modified_base 6: mod_base = OTHER; note = 2'-fluorouridine-3'-phosphate
  modified_base 7: mod_base = OTHER; note = 2'-O-methylcytidine-3'-phosphate
  modified_base 8: mod_base = OTHER; note = 2'-fluorouridine-3'-phosphate
  modified_base 9: mod_base = OTHER; note = 2'-O-methyladenosine-3'-phosphate
  modified_base 10: mod_base = OTHER; note = 2'-fluorocytidine-3'-phosphate
  modified_base 11: mod_base = OTHER; note = 2'-O-methylcytidine-3'-phosphate
  modified_base 12: mod_base = OTHER; note = 2'-O-methyluridine-3'-phosphate
  modified_base 13: mod_base = OTHER; note = 2'-O-methyluridine-3'-phosphate
  modified_base 14: mod_base = OTHER; note = 2'-fluorocytidine-3'-phosphate
  modified_base 15: mod_base = OTHER; note = 2'-O-methylcytidine-3'-phosphate
  modified_base 16: mod_base = OTHER; note = 2'-fluorocytidine-3'-phosphate
  modified_base 17: mod_base = OTHER; note = 2'-O-methyluridine-3'-phosphate
  modified_base 18: mod_base = OTHER; note = 2'-fluorouridine-3'-phosphate
  modified_base 19: mod_base = OTHER; note = 2'-O-methylcytidine-3'-phosphate
  modified_base 20: mod_base = OTHER; note = 2'-fluorocytidine-3'-phosphate
  modified_base 21: mod_base = OTHER; note = 2'-O-methyladenosine-3'- phosphorothioate
  modified_base 22: mod_base = OTHER; note = 2'-O-methylcytidine-3'- phosphorothioate
  modified_base 23: mod_base = OTHER; note = 2'-O-methyladenosine-3'-phosphate
agacttctaccttcccttccaca

SEQ ID NO: 121 - RNA, 23 nt, synthetic construct
  misc_feature 1..23: note = Description of Artificial Sequence: Synthetic oligonucleotide
  source 1..23: mol_type = other RNA
  modified_base 1: mod_base = OTHER; note = 2'-O-methyladenosine-3'- phosphorothioate
  modified_base 2: mod_base = OTHER; note = 2'-fluorouridine -3'-phosphorothioate
  modified_base 3: mod_base = OTHER; note = 2'-O-methylcytidine-3'-phosphate
  modified_base 4: mod_base = OTHER; note = 2'-fluorouridine-3'-phosphate
  modified_base 5: mod_base = OTHER; note = 2'-O-methyluridine-3'-phosphate
  modified_base 6: mod_base = OTHER; note = 2'-fluoroguanosine-3'-phosphate
  modified_base 7: mod_base = OTHER; note = 2'-O-methylguanosine-3'-phosphate
  modified_base 8: mod_base = OTHER; note = 2'-fluoroadenosine-3'-phosphate
  modified_base 9: mod_base = OTHER; note = 2'-O-methyladenosine-3'-phosphate
  modified_base 10: mod_base = OTHER; note = 2'-fluoroadenosine-3'-phosphate
  modified_base 11: mod_base = OTHER; note = 2'-O-methylcytidine-3'-phosphate
  modified_base 12: mod_base = OTHER; note = 2'-O-methyladenosine-3'-phosphate
  modified_base 13: mod_base = OTHER; note = 2'-O-methylguanosine-3'-phosphate
  modified_base 14: mod_base = OTHER; note = 2'-fluorocytidine-3'-phosphate
  modified_base 15: mod_base = OTHER; note = 2'-O-methylcytidine-3'-phosphate
  modified_base 16: mod_base = OTHER; note = 2'-fluoroadenosine-3'-phosphate
  modified_base 17: mod_base = OTHER; note = 2'-O-methyladenosine-3'-phosphate
  modified_base 18: mod_base = OTHER; note = 2'-fluoroadenosine-3'-phosphate
  modified_base 19: mod_base = OTHER; note = 2'-O-methylguanosine-3'-phosphate
  modified_base 20: mod_base = OTHER; note = 2'-fluoroguanosine-3'-phosphate
  modified_base 21: mod_base = OTHER; note = 2'-O-methyladenosine-3'- phosphorothioate
  modified_base 22: mod_base = OTHER; note = 2'-O-methyluridine-3'-phosphorothioate
  modified_base 23: mod_base = OTHER; note = 2'-O-methyluridine-3'-phosphate
atcttggaaacagccaaaggatt

SEQ ID NO: 122 - RNA, 23 nt, synthetic construct
  misc_feature 1..23: note = Description of Artificial Sequence: Synthetic oligonucleotide
  source 1..23: mol_type = other RNA
  modified_base 1: mod_base = OTHER; note = 2'-O-methyluridine-3'-phosphorothioate
  modified_base 2: mod_base = OTHER; note = 2'-fluoroadenosine-3'-phosphorothioate
  modified_base 3: mod_base = OTHER; note = 2'-O-methyluridine-3'-phosphate
  modified_base 4: mod_base = OTHER; note = 2'-fluorocytidine-3'-phosphate
  modified_base 5: mod_base = OTHER; note = 2'-O-methyladenosine-3'-phosphate
  modified_base 6: mod_base = OTHER; note = 2'-fluorouridine-3'-phosphate
  modified_base 7: mod_base = OTHER; note = 2'-O-methylcytidine-3'-phosphate
  modified_base 8: mod_base = OTHER; note = 2'-fluorocytidine-3'-phosphate
  modified_base 9: mod_base = OTHER; note = 2'-O-methylcytidine-3'-phosphate
  modified_base 10: mod_base = OTHER; note = 2'-fluoroadenosine-3'-phosphate
  modified_base 11: mod_base = OTHER; note = 2'-O-methylguanosine-3'-phosphate
  modified_base 12: mod_base = OTHER; note = 2'-O-methylcytidine-3'-phosphate
  modified_base 13: mod_base = OTHER; note = 2'-O-methyluridine-3'-phosphate
  modified_base 14: mod_base = OTHER; note = 2'-fluoroguanosine-3'-phosphate
  modified_base 15: mod_base = OTHER; note = 2'-O-methyladenosine-3'-phosphate
  modified_base 16: mod_base = OTHER; note = 2'-fluoroguanosine-3'-phosphate
  modified_base 17: mod_base = OTHER; note = 2'-O-methyladenosine-3'-phosphate
  modified_base 18: mod_base = OTHER; note = 2'-fluoroguanosine-3'-phosphate
  modified_base 19: mod_base = OTHER; note = 2'-O-methyladenosine-3'-phosphate
  modified_base 20: mod_base = OTHER; note = 2'-fluorouridine-3'-phosphate
  modified_base 21: mod_base = OTHER; note = 2'-O-methylguanosine-3'- phosphorothioate
  modified_base 22: mod_base = OTHER; note = 2'-O-methylguanosine-3'- phosphorothioate
  modified_base 23: mod_base = OTHER; note = 2'-O-methylguanosine-3'-phosphate
tatcatcccagctgagagatggg

SEQ ID NO: 123 - RNA, 23 nt, synthetic construct
  misc_feature 1..23: note = Description of Artificial Sequence: Synthetic oligonucleotide
  source 1..23: mol_type = other RNA
  modified_base 1: mod_base = OTHER; note = 2'-O-methyladenosine-3'- phosphorothioate
  modified_base 2: mod_base = OTHER; note = 2'-fluorouridine -3'-phosphorothioate
  modified_base 3: mod_base = OTHER; note = 2'-O-methylcytidine-3'-phosphate
  modified_base 4: mod_base = OTHER; note = 2'-fluoroadenosine-3'-phosphate
  modified_base 5: mod_base = OTHER; note = 2'-O-methyladenosine-3'-phosphate
  modified_base 6: mod_base = OTHER; note = 2'-fluorouridine-3'-phosphate
  modified_base 7: mod_base = OTHER; note = 2'-O-methyladenosine-3'-phosphate
  modified_base 8: mod_base = OTHER; note = 2'-fluoroguanosine-3'-phosphate
  modified_base 9: mod_base = OTHER; note = 2'-O-methyluridine-3'-phosphate
  modified_base 10: mod_base = OTHER; note = 2'-fluoroadenosine-3'-phosphate
  modified_base 11: mod_base = OTHER; note = 2'-O-methylguanosine-3'-phosphate
  modified_base 12: mod_base = OTHER; note = 2'-O-methylcytidine-3'-phosphate
  modified_base 13: mod_base = OTHER; note = 2'-O-methyluridine-3'-phosphate
  modified_base 14: mod_base = OTHER; note = 2'-fluoroguanosine-3'-phosphate
  modified_base 15: mod_base = OTHER; note = 2'-O-methylguanosine-3'-phosphate
  modified_base 16: mod_base = OTHER; note = 2'-fluorocytidine-3'-phosphate
  modified_base 17: mod_base = OTHER; note = 2'-O-methyladenosine-3'-phosphate
  modified_base 18: mod_base = OTHER; note = 2'-fluorocytidine-3'-phosphate
  modified_base 19: mod_base = OTHER; note = 2'-O-methylcytidine-3'-phosphate
  modified_base 20: mod_base = OTHER; note = 2'-fluorocytidine-3'-phosphate
  modified_base 21: mod_base = OTHER; note = 2'-O-methylcytidine-3'- phosphorothioate
  modified_base 22: mod_base = OTHER; note = 2'-O-methyladenosine-3'- phosphorothioate
  modified_base 23: mod_base = OTHER; note = 2'-O-methyluridine-3'-phosphate
atcaatagtagctggcaccccat

SEQ ID NO: 124 - RNA, 23 nt, synthetic construct
  misc_feature 1..23: note = Description of Artificial Sequence: Synthetic oligonucleotide
  source 1..23: mol_type = other RNA
  modified_base 1: mod_base = OTHER; note = 2'-O-methyluridine-3'-phosphorothioate
  modified_base 2: mod_base = OTHER; note = 2'-fluoroadenosine-3'-phosphorothioate
  modified_base 3: mod_base = OTHER; note = 2'-O-methyluridine-3'-phosphate
  modified_base 4: mod_base = OTHER; note = 2'-fluoroguanosine-3'-phosphate
  modified_base 5: mod_base = OTHER; note = 2'-O-methyladenosine-3'-phosphate
  modified_base 6: mod_base = OTHER; note = 2'-fluorocytidine-3'-phosphate
  modified_base 7: mod_base = OTHER; note = 2'-O-methylguanosine-3'-phosphate
  modified_base 8: mod_base = OTHER; note = 2'-fluorouridine-3'-phosphate
  modified_base 9: mod_base = OTHER; note = 2'-O-methyluridine-3'-phosphate
  modified_base 10: mod_base = OTHER; note = 2'-fluoroguanosine-3'-phosphate
  modified_base 11: mod_base = OTHER; note = 2'-O-methylcytidine-3'-phosphate
  modified_base 12: mod_base = OTHER; note = 2'-O-methylcytidine-3'-phosphate
  modified_base 13: mod_base = OTHER; note = 2'-O-methylcytidine-3'-phosphate
  modified_base 14: mod_base = OTHER; note = 2'-fluoroadenosine-3'-phosphate
  modified_base 15: mod_base = OTHER; note = 2'-O-methyladenosine-3'-phosphate
  modified_base 16: mod_base = OTHER; note = 2'-fluoroadenosine-3'-phosphate
  modified_base 17: mod_base = OTHER; note = 2'-O-methylcytidine-3'-phosphate
  modified_base 18: mod_base = OTHER; note = 2'-fluoroadenosine-3'-phosphate
  modified_base 19: mod_base = OTHER; note = 2'-O-methylcytidine-3'-phosphate
  modified_base 20: mod_base = OTHER; note = 2'-fluoroadenosine-3'-phosphate
  modified_base 21: mod_base = OTHER; note = 2'-O-methyluridine-3'-phosphorothioate
  modified_base 22: mod_base = OTHER; note = 2'-O-methyluridine-3'-phosphorothioate
  modified_base 23: mod_base = OTHER; note = 2'-O-methyluridine-3'-phosphate
tatgacgttgcccaaacacattt

SEQ ID NO: 125 - RNA, 23 nt, synthetic construct
  misc_feature 1..23: note = Description of Artificial Sequence: Synthetic oligonucleotide
  source 1..23: mol_type = other RNA
  modified_base 1: mod_base = OTHER; note = 2'-O-methyluridine-3'-phosphorothioate
  modified_base 2: mod_base = OTHER; note = 2'-fluorouridine -3'-phosphorothioate
  modified_base 3: mod_base = OTHER; note = 2'-O-methylcytidine-3'-phosphate
  modified_base 4: mod_base = OTHER; note = 2'-fluorouridine-3'-phosphate
  modified_base 5: mod_base = OTHER; note = 2'-O-methyluridine-3'-phosphate
  modified_base 6: mod_base = OTHER; note = 2'-fluoroadenosine-3'-phosphate
  modified_base 7: mod_base = OTHER; note = 2'-O-methyladenosine-3'-phosphate
  modified_base 8: mod_base = OTHER; note = 2'-fluoroguanosine-3'-phosphate
  modified_base 9: mod_base = OTHER; note = 2'-O-methylguanosine-3'-phosphate
  modified_base 10: mod_base = OTHER; note = 2'-fluoroadenosine-3'-phosphate
  modified_base 11: mod_base = OTHER; note = 2'-O-methyladenosine-3'-phosphate
  modified_base 12: mod_base = OTHER; note = 2'-O-methyladenosine-3'-phosphate
  modified_base 13: mod_base = OTHER; note = 2'-O-methyluridine-3'-phosphate
  modified_base 14: mod_base = OTHER; note = 2'-fluorocytidine-3'-phosphate
  modified_base 15: mod_base = OTHER; note = 2'-O-methyluridine-3'-phosphate
  modified_base 16: mod_base = OTHER; note = 2'-fluoroadenosine-3'-phosphate
  modified_base 17: mod_base = OTHER; note = 2'-O-methyladenosine-3'-phosphate
  modified_base 18: mod_base = OTHER; note = 2'-fluoroadenosine-3'-phosphate
  modified_base 19: mod_base = OTHER; note = 2'-O-methylcytidine-3'-phosphate
  modified_base 20: mod_base = OTHER; note = 2'-fluoroadenosine-3'-phosphate
  modified_base 21: mod_base = OTHER; note = 2'-O-methylguanosine-3'- phosphorothioate
  modified_base 22: mod_base = OTHER; note = 2'-O-methyladenosine-3'- phosphorothioate
  modified_base 23: mod_base = OTHER; note = 2'-O-methyladenosine-3'-phosphate
ttcttaaggaaatctaaacagaa

SEQ ID NO: 126 - RNA, 23 nt, synthetic construct
  misc_feature 1..23: note = Description of Artificial Sequence: Synthetic oligonucleotide
  source 1..23: mol_type = other RNA
  modified_base 1: mod_base = OTHER; note = 2'-O-methyluridine-3'-phosphorothioate
  modified_base 2: mod_base = OTHER; note = 2'-fluoroadenosine-3'-phosphorothioate
  modified_base 3: mod_base = OTHER; note = 2'-O-methyluridine-3'-phosphate
  modified_base 4: mod_base = OTHER; note = 2'-fluoroguanosine-3'-phosphate
  modified_base 5: mod_base = OTHER; note = 2'-O-methylcytidine-3'-phosphate
  modified_base 6: mod_base = OTHER; note = 2'-fluoroadenosine-3'-phosphate
  modified_base 7: mod_base = OTHER; note = 2'-O-methyladenosine-3'-phosphate
  modified_base 8: mod_base = OTHER; note = 2'-fluoroguanosine-3'-phosphate
  modified_base 9: mod_base = OTHER; note = 2'-O-methyluridine-3'-phosphate
  modified_base 10: mod_base = OTHER; note = 2'-fluorocytidine-3'-phosphate
  modified_base 11: mod_base = OTHER; note = 2'-O-methylcytidine-3'-phosphate
  modified_base 12: mod_base = OTHER; note = 2'-O-methyladenosine-3'-phosphate
  modified_base 13: mod_base = OTHER; note = 2'-O-methyluridine-3'-phosphate
  modified_base 14: mod_base = OTHER; note = 2'-fluorouridine-3'-phosphate
  modified_base 15: mod_base = OTHER; note = 2'-O-methyluridine-3'-phosphate
  modified_base 16: mod_base = OTHER; note = 2'-fluorocytidine-3'-phosphate
  modified_base 17: mod_base = OTHER; note = 2'-O-methyluridine-3'-phosphate
  modified_base 18: mod_base = OTHER; note = 2'-fluorouridine-3'-phosphate
  modified_base 19: mod_base = OTHER; note = 2'-O-methyluridine-3'-phosphate
  modified_base 20: mod_base = OTHER; note = 2'-fluorocytidine-3'-phosphate
  modified_base 21: mod_base = OTHER; note = 2'-O-methyluridine-3'-phosphorothioate
  modified_base 22: mod_base = OTHER; note = 2'-O-methyladenosine-3'- phosphorothioate
  modified_base 23: mod_base = OTHER; note = 2'-O-methylguanosine-3'-phosphate
tatgcaagtccatttctttctag

SEQ ID NO: 127 - RNA, 23 nt, synthetic construct
  misc_feature 1..23: note = Description of Artificial Sequence: Synthetic oligonucleotide
  source 1..23: mol_type = other RNA
  modified_base 1: mod_base = OTHER; note = 2'-O-methyluridine-3'-phosphorothioate
  modified_base 2: mod_base = OTHER; note = 2'-fluorouridine -3'-phosphorothioate
  modified_base 3: mod_base = OTHER; note = 2'-O-methyluridine-3'-phosphate
  modified_base 4: mod_base = OTHER; note = 2'-fluoroadenosine-3'-phosphate
  modified_base 5: mod_base = OTHER; note = 2'-O-methyladenosine-3'-phosphate
  modified_base 6: mod_base = OTHER; note = 2'-fluorouridine-3'-phosphate
  modified_base 7: mod_base = OTHER; note = 2'-O-methyladenosine-3'-phosphate
  modified_base 8: mod_base = OTHER; note = 2'-fluorouridine-3'-phosphate
  modified_base 9: mod_base = OTHER; note = 2'-O-methyladenosine-3'-phosphate
  modified_base 10: mod_base = OTHER; note = 2'-fluorouridine-3'-phosphate
  modified_base 11: mod_base = OTHER; note = 2'-O-methyluridine-3'-phosphate
  modified_base 12: mod_base = OTHER; note = 2'-O-methyluridine-3'-phosphate
  modified_base 13: mod_base = OTHER; note = 2'-O-methylcytidine-3'-phosphate
  modified_base 14: mod_base = OTHER; note = 2'-fluorocytidine-3'-phosphate
  modified_base 15: mod_base = OTHER; note = 2'-O-methyladenosine-3'-phosphate
  modified_base 16: mod_base = OTHER; note = 2'-fluoroguanosine-3'-phosphate
  modified_base 17: mod_base = OTHER; note = 2'-O-methylguanosine-3'-phosphate
  modified_base 18: mod_base = OTHER; note = 2'-fluoroadenosine-3'-phosphate
  modified_base 19: mod_base = OTHER; note = 2'-O-methyluridine-3'-phosphate
  modified_base 20: mod_base = OTHER; note = 2'-fluoroguanosine-3'-phosphate
  modified_base 21: mod_base = OTHER; note = 2'-O-methylcytidine-3'- phosphorothioate
  modified_base 22: mod_base = OTHER; note = 2'-O-methyladenosine-3'- phosphorothioate
  modified_base 23: mod_base = OTHER; note = 2'-O-methyladenosine-3'-phosphate
tttaatatatttccaggatgcaa

SEQ ID NO: 128 - RNA, 23 nt, synthetic construct
  misc_feature 1..23: note = Description of Artificial Sequence: Synthetic oligonucleotide
  source 1..23: mol_type = other RNA
  modified_base 1: mod_base = OTHER; note = 2'-O-methyluridine-3'-phosphorothioate
  modified_base 2: mod_base = OTHER; note = 2'-fluoroadenosine-3'-phosphorothioate
  modified_base 3: mod_base = OTHER; note = 2'-O-methylguanosine-3'-phosphate
  modified_base 4: mod_base = OTHER; note = 2'-fluorouridine-3'-phosphate
  modified_base 5: mod_base = OTHER; note = 2'-O-methyluridine-3'-phosphate
  modified_base 6: mod_base = OTHER; note = 2'-fluorocytidine-3'-phosphate
  modified_base 7: mod_base = OTHER; note = 2'-O-methylcytidine-3'-phosphate
  modified_base 8: mod_base = OTHER; note = 2'-fluorocytidine-3'-phosphate
  modified_base 9: mod_base = OTHER; note = 2'-O-methyladenosine-3'-phosphate
  modified_base 10: mod_base = OTHER; note = 2'-fluorouridine-3'-phosphate
  modified_base 11: mod_base = OTHER; note = 2'-O-methylguanosine-3'-phosphate
  modified_base 12: mod_base = OTHER; note = 2'-O-methylguanosine-3'-phosphate
  modified_base 13: mod_base = OTHER; note = 2'-O-methyluridine-3'-phosphate
  modified_base 14: mod_base = OTHER; note = 2'-fluorocytidine-3'-phosphate
  modified_base 15: mod_base = OTHER; note = 2'-O-methyluridine-3'-phosphate
  modified_base 16: mod_base = OTHER; note = 2'-fluoroguanosine-3'-phosphate
  modified_base 17: mod_base = OTHER; note = 2'-O-methyladenosine-3'-phosphate
  modified_base 18: mod_base = OTHER; note = 2'-fluorocytidine-3'-phosphate
  modified_base 19: mod_base = OTHER; note = 2'-O-methyladenosine-3'-phosphate
  modified_base 20: mod_base = OTHER; note = 2'-fluoroguanosine-3'-phosphate
  modified_base 21: mod_base = OTHER; note = 2'-O-methylguanosine-3'- phosphorothioate
  modified_base 22: mod_base = OTHER; note = 2'-O-methylcytidine-3'- phosphorothioate
  modified_base 23: mod_base = OTHER; note = 2'-O-methyluridine-3'-phosphate
tagttcccatggtctgacaggct

SEQ ID NO: 129 - RNA, 23 nt, synthetic construct
  misc_feature 1..23: note = Description of Artificial Sequence: Synthetic oligonucleotide
  source 1..23: mol_type = other RNA
  modified_base 1: mod_base = OTHER; note = 2'-O-methyluridine-3'-phosphorothioate
  modified_base 2: mod_base = OTHER; note = 2'-fluoroadenosine-3'-phosphorothioate
  modified_base 3: mod_base = OTHER; note = 2'-O-methyluridine-3'-phosphate
  modified_base 4: mod_base = OTHER; note = 2'-fluorocytidine-3'-phosphate
  modified_base 5: mod_base = OTHER; note = 2'-O-methylcytidine-3'-phosphate
  modified_base 6: mod_base = OTHER; note = 2'-fluorocytidine-3'-phosphate
  modified_base 7: mod_base = OTHER; note = 2'-O-methyladenosine-3'-phosphate
  modified_base 8: mod_base = OTHER; note = 2'-fluorouridine-3'-phosphate
  modified_base 9: mod_base = OTHER; note = 2'-O-methylcytidine-3'-phosphate
  modified_base 10: mod_base = OTHER; note = 2'-fluorocytidine-3'-phosphate
  modified_base 11: mod_base = OTHER; note = 2'-O-methyladenosine-3'-phosphate
  modified_base 12: mod_base = OTHER; note = 2'-O-methylcytidine-3'-phosphate
  modified_base 13: mod_base = OTHER; note = 2'-O-methyladenosine-3'-phosphate
  modified_base 14: mod_base = OTHER; note = 2'-fluorocytidine-3'-phosphate
  modified_base 15: mod_base = OTHER; note = 2'-O-methylcytidine-3'-phosphate
  modified_base 16: mod_base = OTHER; note = 2'-fluoroadenosine-3'-phosphate
  modified_base 17: mod_base = OTHER; note = 2'-O-methyluridine-3'-phosphate
  modified_base 18: mod_base = OTHER; note = 2'-fluoroguanosine-3'-phosphate
  modified_base 19: mod_base = OTHER; note = 2'-O-methyluridine-3'-phosphate
  modified_base 20: mod_base = OTHER; note = 2'-fluorouridine-3'-phosphate
  modified_base 21: mod_base = OTHER; note = 2'-O-methyluridine-3'-phosphorothioate
  modified_base 22: mod_base = OTHER; note = 2'-O-methyladenosine-3'- phosphorothioate
  modified_base 23: mod_base = OTHER; note = 2'-O-methyladenosine-3'-phosphate
tatcccatccacaccatgtttaa

SEQ ID NO: 130 - RNA, 23 nt, synthetic construct
  misc_feature 1..23: note = Description of Artificial Sequence: Synthetic oligonucleotide
  source 1..23: mol_type = other RNA
  modified_base 1: mod_base = OTHER; note = 2'-O-methyluridine-3'-phosphorothioate
  modified_base 2: mod_base = OTHER; note = 2'-fluorouridine -3'-phosphorothioate
  modified_base 3: mod_base = OTHER; note = 2'-O-methylcytidine-3'-phosphate
  modified_base 4: mod_base = OTHER; note = 2'-fluoroadenosine-3'-phosphate
  modified_base 5: mod_base = OTHER; note = 2'-O-methyladenosine-3'-phosphate
  modified_base 6: mod_base = OTHER; note = 2'-fluoroadenosine-3'-phosphate
  modified_base 7: mod_base = OTHER; note = 2'-O-methyladenosine-3'-phosphate
  modified_base 8: mod_base = OTHER; note = 2'-fluorouridine-3'-phosphate
  modified_base 9: mod_base = OTHER; note = 2'-O-methyluridine-3'-phosphate
  modified_base 10: mod_base = OTHER; note = 2'-fluorouridine-3'-phosphate
  modified_base 11: mod_base = OTHER; note = 2'-O-methyluridine-3'-phosphate
  modified_base 12: mod_base = OTHER; note = 2'-O-methyluridine-3'-phosphate
  modified_base 13: mod_base = OTHER; note = 2'-O-methylcytidine-3'-phosphate
  modified_base 14: mod_base = OTHER; note = 2'-fluoroadenosine-3'-phosphate
  modified_base 15: mod_base = OTHER; note = 2'-O-methyluridine-3'-phosphate
  modified_base 16: mod_base = OTHER; note = 2'-fluorocytidine-3'-phosphate
  modified_base 17: mod_base = OTHER; note = 2'-O-methylcytidine-3'-phosphate
  modified_base 18: mod_base = OTHER; note = 2'-fluorouridine-3'-phosphate
  modified_base 19: mod_base = OTHER; note = 2'-O-methylguanosine-3'-phosphate
  modified_base 20: mod_base = OTHER; note = 2'-fluoroadenosine-3'-phosphate
  modified_base 21: mod_base = OTHER; note = 2'-O-methylguanosine-3'- phosphorothioate
  modified_base 22: mod_base = OTHER; note = 2'-O-methyluridine-3'-phosphorothioate
  modified_base 23: mod_base = OTHER; note = 2'-O-methyluridine-3'-phosphate
ttcaaaatttttcatcctgagtt

SEQ ID NO: 131 - RNA, 23 nt, synthetic construct
  misc_feature 1..23: note = Description of Artificial Sequence: Synthetic oligonucleotide
  source 1..23: mol_type = other RNA
  modified_base 1: mod_base = OTHER; note = 2'-O-methyluridine-3'-phosphorothioate
  modified_base 2: mod_base = OTHER; note = 2'-fluorouridine -3'-phosphorothioate
  modified_base 3: mod_base = OTHER; note = 2'-O-methyluridine-3'-phosphate
  modified_base 4: mod_base = OTHER; note = 2'-fluoroguanosine-3'-phosphate
  modified_base 5: mod_base = OTHER; note = 2'-O-methyluridine-3'-phosphate
  modified_base 6: mod_base = OTHER; note = 2'-fluorocytidine-3'-phosphate
  modified_base 7: mod_base = OTHER; note = 2'-O-methyladenosine-3'-phosphate
  modified_base 8: mod_base = OTHER; note = 2'-fluoroadenosine-3'-phosphate
  modified_base 9: mod_base = OTHER; note = 2'-O-methylguanosine-3'-phosphate
  modified_base 10: mod_base = OTHER; note = 2'-fluorouridine-3'-phosphate
  modified_base 11: mod_base = OTHER; note = 2'-O-methyladenosine-3'-phosphate
  modified_base 12: mod_base = OTHER; note = 2'-O-methyladenosine-3'-phosphate
  modified_base 13: mod_base = OTHER; note = 2'-O-methyluridine-3'-phosphate
  modified_base 14: mod_base = OTHER; note = 2'-fluoroadenosine-3'-phosphate
  modified_base 15: mod_base = OTHER; note = 2'-O-methylcytidine-3'-phosphate
  modified_base 16: mod_base = OTHER; note = 2'-fluoroadenosine-3'-phosphate
  modified_base 17: mod_base = OTHER; note = 2'-O-methyluridine-3'-phosphate
  modified_base 18: mod_base = OTHER; note = 2'-fluoroguanosine-3'-phosphate
  modified_base 19: mod_base = OTHER; note = 2'-O-methylcytidine-3'-phosphate
  modified_base 20: mod_base = OTHER; note = 2'-fluorouridine-3'-phosphate
  modified_base 21: mod_base = OTHER; note = 2'-O-methylguanosine-3'- phosphorothioate
  modified_base 22: mod_base = OTHER; note = 2'-O-methyladenosine-3'- phosphorothioate
  modified_base 23: mod_base = OTHER; note = 2'-O-methyladenosine-3'-phosphate
tttgtcaagtaatacatgctgaa

SEQ ID NO: 132 - RNA, 23 nt, synthetic construct
  misc_feature 1..23: note = Description of Artificial Sequence: Synthetic oligonucleotide
  source 1..23: mol_type = other RNA
  modified_base 1: mod_base = OTHER; note = 2'-O-methyluridine-3'-phosphorothioate
  modified_base 2: mod_base = OTHER; note = 2'-fluoroguanosine-3'-phosphorothioate
  modified_base 3: mod_base = OTHER; note = 2'-O-methyladenosine-3'-phosphate
  modified_base 4: mod_base = OTHER; note = 2'-fluorouridine-3'-phosphate
  modified_base 5: mod_base = OTHER; note = 2'-O-methyluridine-3'-phosphate
  modified_base 6: mod_base = OTHER; note = 2'-fluorouridine-3'-phosphate
  modified_base 7: mod_base = OTHER; note = 2'-O-methyladenosine-3'-phosphate
  modified_base 8: mod_base = OTHER; note = 2'-fluoroguanosine-3'-phosphate
  modified_base 9: mod_base = OTHER; note = 2'-O-methylcytidine-3'-phosphate
  modified_base 10: mod_base = OTHER; note = 2'-fluoroadenosine-3'-phosphate
  modified_base 11: mod_base = OTHER; note = 2'-O-methyluridine-3'-phosphate
  modified_base 12: mod_base = OTHER; note = 2'-O-methylguanosine-3'-phosphate
  modified_base 13: mod_base = OTHER; note = 2'-O-methyluridine-3'-phosphate
  modified_base 14: mod_base = OTHER; note = 2'-fluorouridine-3'-phosphate
  modified_base 15: mod_base = OTHER; note = 2'-O-methylguanosine-3'-phosphate
  modified_base 16: mod_base = OTHER; note = 2'-fluorouridine-3'-phosphate
  modified_base 17: mod_base = OTHER; note = 2'-O-methyluridine-3'-phosphate
  modified_base 18: mod_base = OTHER; note = 2'-fluorocytidine-3'-phosphate
  modified_base 19: mod_base = OTHER; note = 2'-O-methyladenosine-3'-phosphate
  modified_base 20: mod_base = OTHER; note = 2'-fluorouridine-3'-phosphate
  modified_base 21: mod_base = OTHER; note = 2'-O-methyladenosine-3'- phosphorothioate
  modified_base 22: mod_base = OTHER; note = 2'-O-methyladenosine-3'- phosphorothioate
  modified_base 23: mod_base = OTHER; note = 2'-O-methyluridine-3'-phosphate
tgatttagcatgttgttcataat

SEQ ID NO: 133 - RNA, 23 nt, synthetic construct
  misc_feature 1..23: note = Description of Artificial Sequence: Synthetic oligonucleotide
  source 1..23: mol_type = other RNA
  modified_base 1: mod_base = OTHER; note = 2'-O-methyluridine-3'-phosphorothioate
  modified_base 2: mod_base = OTHER; note = 2'-fluorocytidine-3'-phosphorothioate
  modified_base 3: mod_base = OTHER; note = 2'-O-methylcytidine-3'-phosphate
  modified_base 4: mod_base = OTHER; note = 2'-fluorouridine-3'-phosphate
  modified_base 5: mod_base = OTHER; note = 2'-O-methyladenosine-3'-phosphate
  modified_base 6: mod_base = OTHER; note = 2'-fluoroadenosine-3'-phosphate
  modified_base 7: mod_base = OTHER; note = 2'-O-methyladenosine-3'-phosphate
  modified_base 8: mod_base = OTHER; note = 2'-fluoroadenosine-3'-phosphate
  modified_base 9: mod_base = OTHER; note = 2'-O-methylcytidine-3'-phosphate
  modified_base 10: mod_base = OTHER; note = 2'-fluoroadenosine-3'-phosphate
  modified_base 11: mod_base = OTHER; note = 2'-O-methyluridine-3'-phosphate
  modified_base 12: mod_base = OTHER; note = 2'-O-methyluridine-3'-phosphate
  modified_base 13: mod_base = OTHER; note = 2'-O-methyluridine-3'-phosphate
  modified_base 14: mod_base = OTHER; note = 2'-fluoroguanosine-3'-phosphate
  modified_base 15: mod_base = OTHER; note = 2'-O-methylguanosine-3'-phosphate
  modified_base 16: mod_base = OTHER; note = 2'-fluoroadenosine-3'-phosphate
  modified_base 17: mod_base = OTHER; note = 2'-O-methyluridine-3'-phosphate
  modified_base 18: mod_base = OTHER; note = 2'-fluoroadenosine-3'-phosphate
  modified_base 19: mod_base = OTHER; note = 2'-O-methyluridine-3'-phosphate
  modified_base 20: mod_base = OTHER; note = 2'-fluoroadenosine-3'-phosphate
  modified_base 21: mod_base = OTHER; note = 2'-O-methyluridine-3'-phosphorothioate
  modified_base 22: mod_base = OTHER; note = 2'-O-methyluridine-3'-phosphorothioate
  modified_base 23: mod_base = OTHER; note = 2'-O-methylcytidine-3'-phosphate
tcctaaaacatttggatatattc

SEQ ID NO: 134 - RNA, 23 nt, synthetic construct
  misc_feature 1..23: note = Description of Artificial Sequence: Synthetic oligonucleotide
  source 1..23: mol_type = other RNA
  modified_base 1: mod_base = OTHER; note = 2'-O-methyluridine-3'-phosphorothioate
  modified_base 2: mod_base = OTHER; note = 2'-fluorouridine -3'-phosphorothioate
  modified_base 3: mod_base = OTHER; note = 2'-O-methylguanosine-3'-phosphate
  modified_base 4: mod_base = OTHER; note = 2'-fluoroguanosine-3'-phosphate
  modified_base 5: mod_base = OTHER; note = 2'-O-methyladenosine-3'-phosphate
  modified_base 6: mod_base = OTHER; note = 2'-fluorouridine-3'-phosphate
  modified_base 7: mod_base = OTHER; note = 2'-O-methyladenosine-3'-phosphate
  modified_base 8: mod_base = OTHER; note = 2'-fluorocytidine-3'-phosphate
  modified_base 9: mod_base = OTHER; note = 2'-O-methyladenosine-3'-phosphate
  modified_base 10: mod_base = OTHER; note = 2'-fluoroguanosine-3'-phosphate
  modified_base 11: mod_base = OTHER; note = 2'-O-methylcytidine-3'-phosphate
  modified_base 12: mod_base = OTHER; note = 2'-O-methyluridine-3'-phosphate
  modified_base 13: mod_base = OTHER; note = 2'-O-methyluridine-3'-phosphate
  modified_base 14: mod_base = OTHER; note = 2'-fluorocytidine-3'-phosphate
  modified_base 15: mod_base = OTHER; note = 2'-O-methylcytidine-3'-phosphate
  modified_base 16: mod_base = OTHER; note = 2'-fluoroadenosine-3'-phosphate
  modified_base 17: mod_base = OTHER; note = 2'-O-methyluridine-3'-phosphate
  modified_base 18: mod_base = OTHER; note = 2'-fluorocytidine-3'-phosphate
  modified_base 19: mod_base = OTHER; note = 2'-O-methyluridine-3'-phosphate
  modified_base 20: mod_base = OTHER; note = 2'-fluoroguanosine-3'-phosphate
  modified_base 21: mod_base = OTHER; note = 2'-O-methylguanosine-3'- phosphorothioate
  modified_base 22: mod_base = OTHER; note = 2'-O-methyladenosine-3'- phosphorothioate
  modified_base 23: mod_base = OTHER; note = 2'-O-methyladenosine-3'-phosphate
ttggatacagcttccatctggaa

SEQ ID NO: 135 - RNA, 23 nt, synthetic construct
  misc_feature 1..23: note = Description of Artificial Sequence: Synthetic oligonucleotide
  source 1..23: mol_type = other RNA
  modified_base 1: mod_base = OTHER; note = 2'-O-methyluridine-3'-phosphorothioate
  modified_base 2: mod_base = OTHER; note = 2'-fluoroadenosine-3'-phosphorothioate
  modified_base 3: mod_base = OTHER; note = 2'-O-methyluridine-3'-phosphate
  modified_base 4: mod_base = OTHER; note = 2'-fluoroadenosine-3'-phosphate
  modified_base 5: mod_base = OTHER; note = 2'-O-methyluridine-3'-phosphate
  modified_base 6: mod_base = OTHER; note = 2'-fluorouridine-3'-phosphate
  modified_base 7: mod_base = OTHER; note = 2'-O-methyluridine-3'-phosphate
  modified_base 8: mod_base = OTHER; note = 2'-fluorocytidine-3'-phosphate
  modified_base 9: mod_base = OTHER; note = 2'-O-methylcytidine-3'-phosphate
  modified_base 10: mod_base = OTHER; note = 2'-fluoroadenosine-3'-phosphate
  modified_base 11: mod_base = OTHER; note = 2'-O-methylguanosine-3'-phosphate
  modified_base 12: mod_base = OTHER; note = 2'-O-methylguanosine-3'-phosphate
  modified_base 13: mod_base = OTHER; note = 2'-O-methyladenosine-3'-phosphate
  modified_base 14: mod_base = OTHER; note = 2'-fluorouridine-3'-phosphate
  modified_base 15: mod_base = OTHER; note = 2'-O-methylguanosine-3'-phosphate
  modified_base 16: mod_base = OTHER; note = 2'-fluoroadenosine-3'-phosphate
  modified_base 17: mod_base = OTHER; note = 2'-O-methyladenosine-3'-phosphate
  modified_base 18: mod_base = OTHER; note = 2'-fluoroadenosine-3'-phosphate
  modified_base 19: mod_base = OTHER; note = 2'-O-methylguanosine-3'-phosphate
  modified_base 20: mod_base = OTHER; note = 2'-fluorouridine-3'-phosphate
  modified_base 21: mod_base = OTHER; note = 2'-O-methylcytidine-3'- phosphorothioate
  modified_base 22: mod_base = OTHER; note = 2'-O-methylcytidine-3'- phosphorothioate
  modified_base 23: mod_base = OTHER; note = 2'-O-methyladenosine-3'-phosphate
tatatttccaggatgaaagtcca

SEQ ID NO: 136 - RNA, 23 nt, synthetic construct
  misc_feature 1..23: note = Description of Artificial Sequence: Synthetic oligonucleotide
  source 1..23: mol_type = other RNA
  modified_base 1: mod_base = OTHER; note = 2'-O-methyladenosine-3'- phosphorothioate
  modified_base 2: mod_base = OTHER; note = 2'-fluorouridine -3'-phosphorothioate
  modified_base 3: mod_base = OTHER; note = 2'-O-methyluridine-3'-phosphate
  modified_base 4: mod_base = OTHER; note = 2'-fluoroguanosine-3'-phosphate
  modified_base 5: mod_base = OTHER; note = 2'-O-methyladenosine-3'-phosphate
  modified_base 6: mod_base = OTHER; note = 2'-fluorouridine-3'-phosphate
  modified_base 7: mod_base = OTHER; note = 2'-O-methyladenosine-3'-phosphate
  modified_base 8: mod_base = OTHER; note = 2'-fluorocytidine-3'-phosphate
  modified_base 9: mod_base = OTHER; note = 2'-O-methyladenosine-3'-phosphate
  modified_base 10: mod_base = OTHER; note = 2'-fluoroadenosine-3'-phosphate
  modified_base 11: mod_base = OTHER; note = 2'-O-methyladenosine-3'-phosphate
  modified_base 12: mod_base = OTHER; note = 2'-O-methyluridine-3'-phosphate
  modified_base 13: mod_base = OTHER; note = 2'-O-methyluridine-3'-phosphate
  modified_base 14: mod_base = OTHER; note = 2'-fluoroadenosine-3'-phosphate
  modified_base 15: mod_base = OTHER; note = 2'-O-methylguanosine-3'-phosphate
  modified_base 16: mod_base = OTHER; note = 2'-fluorocytidine-3'-phosphate
  modified_base 17: mod_base = OTHER; note = 2'-O-methylcytidine-3'-phosphate
  modified_base 18: mod_base = OTHER; note = 2'-fluoroguanosine-3'-phosphate
  modified_base 19: mod_base = OTHER; note = 2'-O-methylguanosine-3'-phosphate
  modified_base 20: mod_base = OTHER; note = 2'-fluoroguanosine-3'-phosphate
  modified_base 21: mod_base = OTHER; note = 2'-O-methylguanosine-3'- phosphorothioate
  modified_base 22: mod_base = OTHER; note = 2'-O-methylguanosine-3'- phosphorothioate
  modified_base 23: mod_base = OTHER; note = 2'-O-methyladenosine-3'-phosphate
attgatacaaattagccggggga

SEQ ID NO: 137 - RNA, 23 nt, synthetic construct
  misc_feature 1..23: note = Description of Artificial Sequence: Synthetic oligonucleotide
  source 1..23: mol_type = other RNA
  modified_base 1: mod_base = OTHER; note = 2'-O-methyluridine-3'-phosphorothioate
  modified_base 2: mod_base = OTHER; note = 2'-fluorocytidine-3'-phosphorothioate
  modified_base 3: mod_base = OTHER; note = 2'-O-methylcytidine-3'-phosphate
  modified_base 4: mod_base = OTHER; note = 2'-fluorocytidine-3'-phosphate
  modified_base 5: mod_base = OTHER; note = 2'-O-methyladenosine-3'-phosphate
  modified_base 6: mod_base = OTHER; note = 2'-fluorouridine-3'-phosphate
  modified_base 7: mod_base = OTHER; note = 2'-O-methyluridine-3'-phosphate
  modified_base 8: mod_base = OTHER; note = 2'-fluorocytidine-3'-phosphate
  modified_base 9: mod_base = OTHER; note = 2'-O-methyladenosine-3'-phosphate
  modified_base 10: mod_base = OTHER; note = 2'-fluoroadenosine-3'-phosphate
  modified_base 11: mod_base = OTHER; note = 2'-O-methylguanosine-3'-phosphate
  modified_base 12: mod_base = OTHER; note = 2'-O-methylcytidine-3'-phosphate
  modified_base 13: mod_base = OTHER; note = 2'-O-methylcytidine-3'-phosphate
  modified_base 14: mod_base = OTHER; note = 2'-fluoroadenosine-3'-phosphate
  modified_base 15: mod_base = OTHER; note = 2'-O-methyluridine-3'-phosphate
  modified_base 16: mod_base = OTHER; note = 2'-fluoroguanosine-3'-phosphate
  modified_base 17: mod_base = OTHER; note = 2'-O-methyluridine-3'-phosphate
  modified_base 18: mod_base = OTHER; note = 2'-fluorouridine-3'-phosphate
  modified_base 19: mod_base = OTHER; note = 2'-O-methyluridine-3'-phosphate
  modified_base 20: mod_base = OTHER; note = 2'-fluoroadenosine-3'-phosphate
  modified_base 21: mod_base = OTHER; note = 2'-O-methyladenosine-3'- phosphorothioate
  modified_base 22: mod_base = OTHER; note = 2'-O-methylcytidine-3'- phosphorothioate
  modified_base 23: mod_base = OTHER; note = 2'-O-methyladenosine-3'-phosphate
tcccattcaagccatgtttaaca

SEQ ID NO: 138 - RNA, 23 nt, synthetic construct
  misc_feature 1..23: note = Description of Artificial Sequence: Synthetic oligonucleotide
  source 1..23: mol_type = other RNA
  modified_base 1: mod_base = OTHER; note = 2'-O-methyladenosine-3'- phosphorothioate
  modified_base 2: mod_base = OTHER; note = 2'-fluorouridine -3'-phosphorothioate
  modified_base 3: mod_base = OTHER; note = 2'-O-methylguanosine-3'-phosphate
  modified_base 4: mod_base = OTHER; note = 2'-fluoroadenosine-3'-phosphate
  modified_base 5: mod_base = OTHER; note = 2'-O-methylcytidine-3'-phosphate
  modified_base 6: mod_base = OTHER; note = 2'-fluoroguanosine-3'-phosphate
  modified_base 7: mod_base = OTHER; note = 2'-O-methyluridine-3'-phosphate
  modified_base 8: mod_base = OTHER; note = 2'-fluorouridine-3'-phosphate
  modified_base 9: mod_base = OTHER; note = 2'-O-methylguanosine-3'-phosphate
  modified_base 10: mod_base = OTHER; note = 2'-fluorouridine-3'-phosphate
  modified_base 11: mod_base = OTHER; note = 2'-O-methylcytidine-3'-phosphate
  modified_base 12: mod_base = OTHER; note = 2'-O-methyluridine-3'-phosphate
  modified_base 13: mod_base = OTHER; note = 2'-O-methyladenosine-3'-phosphate
  modified_base 14: mod_base = OTHER; note = 2'-fluoroadenosine-3'-phosphate
  modified_base 15: mod_base = OTHER; note = 2'-O-methyladenosine-3'-phosphate
  modified_base 16: mod_base = OTHER; note = 2'-fluorocytidine-3'-phosphate
  modified_base 17: mod_base = OTHER; note = 2'-O-methyladenosine-3'-phosphate
  modified_base 18: mod_base = OTHER; note = 2'-fluorocytidine-3'-phosphate
  modified_base 19: mod_base = OTHER; note = 2'-O-methyladenosine-3'-phosphate
  modified_base 20: mod_base = OTHER; note = 2'-fluorouridine-3'-phosphate
  modified_base 21: mod_base = OTHER; note = 2'-O-methyluridine-3'-phosphorothioate
  modified_base 22: mod_base = OTHER; note = 2'-O-methyluridine-3'-phosphorothioate
  modified_base 23: mod_base = OTHER; note = 2'-O-methyluridine-3'-phosphate
atgacgttgtctaaacacatttt

SEQ ID NO: 139 - RNA, 23 nt, synthetic construct
  misc_feature 1..23: note = Description of Artificial Sequence: Synthetic oligonucleotide
  source 1..23: mol_type = other RNA
  modified_base 1: mod_base = OTHER; note = 2'-O-methyladenosine-3'- phosphorothioate
  modified_base 2: mod_base = OTHER; note = 2'-fluoroadenosine-3'-phosphorothioate
  modified_base 3: mod_base = OTHER; note = 2'-O-methylcytidine-3'-phosphate
  modified_base 4: mod_base = OTHER; note = 2'-fluorocytidine-3'-phosphate
  modified_base 5: mod_base = OTHER; note = 2'-O-methylguanosine-3'-phosphate
  modified_base 6: mod_base = OTHER; note = 2'-fluoroguanosine-3'-phosphate
  modified_base 7: mod_base = OTHER; note = 2'-O-methyladenosine-3'-phosphate
  modified_base 8: mod_base = OTHER; note = 2'-fluoroadenosine-3'-phosphate
  modified_base 9: mod_base = OTHER; note = 2'-O-methyluridine-3'-phosphate
  modified_base 10: mod_base = OTHER; note = 2'-fluorouridine-3'-phosphate
  modified_base 11: mod_base = OTHER; note = 2'-O-methylcytidine-3'-phosphate
  modified_base 12: mod_base = OTHER; note = 2'-O-methyluridine-3'-phosphate
  modified_base 13: mod_base = OTHER; note = 2'-O-methyluridine-3'-phosphate
  modified_base 14: mod_base = OTHER; note = 2'-fluorocytidine-3'-phosphate
  modified_base 15: mod_base = OTHER; note = 2'-O-methylcytidine-3'-phosphate
  modified_base 16: mod_base = OTHER; note = 2'-fluorouridine-3'-phosphate
  modified_base 17: mod_base = OTHER; note = 2'-O-methyluridine-3'-phosphate
  modified_base 18: mod_base = OTHER; note = 2'-fluorouridine-3'-phosphate
  modified_base 19: mod_base = OTHER; note = 2'-O-methyladenosine-3'-phosphate
  modified_base 20: mod_base = OTHER; note = 2'-fluoroguanosine-3'-phosphate
  modified_base 21: mod_base = OTHER; note = 2'-O-methyluridine-3'-phosphorothioate
  modified_base 22: mod_base = OTHER; note = 2'-O-methyladenosine-3'- phosphorothioate
  modified_base 23: mod_base = OTHER; note = 2'-O-methyluridine-3'-phosphate
aaccggaattcttcctttagtat

SEQ ID NO: 140 - RNA, 23 nt, synthetic construct
  misc_feature 1..23: note = Description of Artificial Sequence: Synthetic oligonucleotide
  source 1..23: mol_type = other RNA
  modified_base 1: mod_base = OTHER; note = 2'-O-methyladenosine-3'- phosphorothioate
  modified_base 2: mod_base = OTHER; note = 2'-fluorouridine -3'-phosphorothioate
  modified_base 3: mod_base = OTHER; note = 2'-O-methylcytidine-3'-phosphate
  modified_base 4: mod_base = OTHER; note = 2'-fluorocytidine-3'-phosphate
  modified_base 5: mod_base = OTHER; note = 2'-O-methyluridine-3'-phosphate
  modified_base 6: mod_base = OTHER; note = 2'-fluoroadenosine-3'-phosphate
  modified_base 7: mod_base = OTHER; note = 2'-O-methyladenosine-3'-phosphate
  modified_base 8: mod_base = OTHER; note = 2'-fluoroadenosine-3'-phosphate
  modified_base 9: mod_base = OTHER; note = 2'-O-methyladenosine-3'-phosphate
  modified_base 10: mod_base = OTHER; note = 2'-fluorocytidine-3'-phosphate
  modified_base 11: mod_base = OTHER; note = 2'-O-methyladenosine-3'-phosphate
  modified_base 12: mod_base = OTHER; note = 2'-O-methyluridine-3'-phosphate
  modified_base 13: mod_base = OTHER; note = 2'-O-methyluridine-3'-phosphate
  modified_base 14: mod_base = OTHER; note = 2'-fluorouridine-3'-phosphate
  modified_base 15: mod_base = OTHER; note = 2'-O-methylguanosine-3'-phosphate
  modified_base 16: mod_base = OTHER; note = 2'-fluoroguanosine-3'-phosphate
  modified_base 17: mod_base = OTHER; note = 2'-O-methyladenosine-3'-phosphate
  modified_base 18: mod_base = OTHER; note = 2'-fluorouridine-3'-phosphate
  modified_base 19: mod_base = OTHER; note = 2'-O-methyladenosine-3'-phosphate
  modified_base 20: mod_base = OTHER; note = 2'-fluorouridine-3'-phosphate
  modified_base 21: mod_base = OTHER; note = 2'-O-methyladenosine-3'- phosphorothioate
  modified_base 22: mod_base = OTHER; note = 2'-O-methyluridine-3'-phosphorothioate
  modified_base 23: mod_base = OTHER; note = 2'-O-methyluridine-3'-phosphate
atcctaaaacatttggatatatt

SEQ ID NO: 141 - RNA, 23 nt, synthetic construct
  misc_feature 1..23: note = Description of Artificial Sequence: Synthetic oligonucleotide
  source 1..23: mol_type = other RNA
  modified_base 1: mod_base = OTHER; note = 2'-O-methyladenosine-3'- phosphorothioate
  modified_base 2: mod_base = OTHER; note = 2'-fluoroadenosine-3'-phosphorothioate
  modified_base 3: mod_base = OTHER; note = 2'-O-methylcytidine-3'-phosphate
  modified_base 4: mod_base = OTHER; note = 2'-fluoroadenosine-3'-phosphate
  modified_base 5: mod_base = OTHER; note = 2'-O-methyluridine-3'-phosphate
  modified_base 6: mod_base = OTHER; note = 2'-fluorocytidine-3'-phosphate
  modified_base 7: mod_base = OTHER; note = 2'-O-methyladenosine-3'-phosphate
  modified_base 8: mod_base = OTHER; note = 2'-fluoroguanosine-3'-phosphate
  modified_base 9: mod_base = OTHER; note = 2'-O-methyluridine-3'-phosphate
  modified_base 10: mod_base = OTHER; note = 2'-fluoroguanosine-3'-phosphate
  modified_base 11: mod_base = OTHER; note = 2'-O-methylcytidine-3'-phosphate
  modified_base 12: mod_base = OTHER; note = 2'-O-methylcytidine-3'-phosphate
  modified_base 13: mod_base = OTHER; note = 2'-O-methyluridine-3'-phosphate
  modified_base 14: mod_base = OTHER; note = 2'-fluorouridine-3'-phosphate
  modified_base 15: mod_base = OTHER; note = 2'-O-methyluridine-3'-phosphate
  modified_base 16: mod_base = OTHER; note = 2'-fluorocytidine-3'-phosphate
  modified_base 17: mod_base = OTHER; note = 2'-O-methylcytidine-3'-phosphate
  modified_base 18: mod_base = OTHER; note = 2'-fluoroguanosine-3'-phosphate
  modified_base 19: mod_base = OTHER; note = 2'-O-methylcytidine-3'-phosphate
  modified_base 20: mod_base = OTHER; note = 2'-fluoroadenosine-3'-phosphate
  modified_base 21: mod_base = OTHER; note = 2'-O-methylcytidine-3'- phosphorothioate
  modified_base 22: mod_base = OTHER; note = 2'-O-methyladenosine-3'- phosphorothioate
  modified_base 23: mod_base = OTHER; note = 2'-O-methylcytidine-3'-phosphate
aacatcagtgcctttccgcacac

SEQ ID NO: 142 - RNA, 23 nt, synthetic construct
  misc_feature 1..23: note = Description of Artificial Sequence: Synthetic oligonucleotide
  source 1..23: mol_type = other RNA
  modified_base 1: mod_base = OTHER; note = 2'-O-methyladenosine-3'- phosphorothioate
  modified_base 2: mod_base = OTHER; note = 2'-fluoroadenosine-3'-phosphorothioate
  modified_base 3: mod_base = OTHER; note = 2'-O-methyluridine-3'-phosphate
  modified_base 4: mod_base = OTHER; note = 2'-fluorouridine-3'-phosphate
  modified_base 5: mod_base = OTHER; note = 2'-O-methyluridine-3'-phosphate
  modified_base 6: mod_base = OTHER; note = 2'-fluoroadenosine-3'-phosphate
  modified_base 7: mod_base = OTHER; note = 2'-O-methyladenosine-3'-phosphate
  modified_base 8: mod_base = OTHER; note = 2'-fluoroguanosine-3'-phosphate
  modified_base 9: mod_base = OTHER; note = 2'-O-methyladenosine-3'-phosphate
  modified_base 10: mod_base = OTHER; note = 2'-fluoroadenosine-3'-phosphate
  modified_base 11: mod_base = OTHER; note = 2'-O-methylcytidine-3'-phosphate
  modified_base 12: mod_base = OTHER; note = 2'-O-methylcytidine-3'-phosphate
  modified_base 13: mod_base = OTHER; note = 2'-O-methyladenosine-3'-phosphate
  modified_base 14: mod_base = OTHER; note = 2'-fluorocytidine-3'-phosphate
  modified_base 15: mod_base = OTHER; note = 2'-O-methyluridine-3'-phosphate
  modified_base 16: mod_base = OTHER; note = 2'-fluoroguanosine-3'-phosphate
  modified_base 17: mod_base = OTHER; note = 2'-O-methyluridine-3'-phosphate
  modified_base 18: mod_base = OTHER; note = 2'-fluorouridine-3'-phosphate
  modified_base 19: mod_base = OTHER; note = 2'-O-methyluridine-3'-phosphate
  modified_base 20: mod_base = OTHER; note = 2'-fluorouridine-3'-phosphate
  modified_base 21: mod_base = OTHER; note = 2'-O-methyladenosine-3'- phosphorothioate
  modified_base 22: mod_base = OTHER; note = 2'-O-methyladenosine-3'- phosphorothioate
  modified_base 23: mod_base = OTHER; note = 2'-O-methyladenosine-3'-phosphate
aatttaagaaccactgttttaaa

SEQ ID NO: 143 - RNA, 23 nt, synthetic construct
  misc_feature 1..23: note = Description of Artificial Sequence: Synthetic oligonucleotide
  source 1..23: mol_type = other RNA
  modified_base 1: mod_base = OTHER; note = 2'-O-methyladenosine-3'- phosphorothioate
  modified_base 2: mod_base = OTHER; note = 2'-fluorocytidine-3'-phosphorothioate
  modified_base 3: mod_base = OTHER; note = 2'-O-methyluridine-3'-phosphate
  modified_base 4: mod_base = OTHER; note = 2'-fluoroguanosine-3'-phosphate
  modified_base 5: mod_base = OTHER; note = 2'-O-methylguanosine-3'-phosphate
  modified_base 6: mod_base = OTHER; note = 2'-fluorouridine-3'-phosphate
  modified_base 7: mod_base = OTHER; note = 2'-O-methyluridine-3'-phosphate
  modified_base 8: mod_base = OTHER; note = 2'-fluorouridine-3'-phosphate
  modified_base 9: mod_base = OTHER; note = 2'-O-methylcytidine-3'-phosphate
  modified_base 10: mod_base = OTHER; note = 2'-fluoroadenosine-3'-phosphate
  modified_base 11: mod_base = OTHER; note = 2'-O-methyladenosine-3'-phosphate
  modified_base 12: mod_base = OTHER; note = 2'-O-methyladenosine-3'-phosphate
  modified_base 13: mod_base = OTHER; note = 2'-O-methyladenosine-3'-phosphate
  modified_base 14: mod_base = OTHER; note = 2'-fluorouridine-3'-phosphate
  modified_base 15: mod_base = OTHER; note = 2'-O-methyluridine-3'-phosphate
  modified_base 16: mod_base = OTHER; note = 2'-fluorouridine-3'-phosphate
  modified_base 17: mod_base = OTHER; note = 2'-O-methyluridine-3'-phosphate
  modified_base 18: mod_base = OTHER; note = 2'-fluorouridine-3'-phosphate
  modified_base 19: mod_base = OTHER; note = 2'-O-methylcytidine-3'-phosphate
  modified_base 20: mod_base = OTHER; note = 2'-fluoroadenosine-3'-phosphate
  modified_base 21: mod_base = OTHER; note = 2'-O-methyluridine-3'-phosphorothioate
  modified_base 22: mod_base = OTHER; note = 2'-O-methylcytidine-3'- phosphorothioate
  modified_base 23: mod_base = OTHER; note = 2'-O-methylcytidine-3'-phosphate
actggtttcaaaatttttcatcc

SEQ ID NO: 144 - RNA, 23 nt, synthetic construct
  misc_feature 1..23: note = Description of Artificial Sequence: Synthetic oligonucleotide
  source 1..23: mol_type = other RNA
  modified_base 1: mod_base = OTHER; note = 2'-O-methyladenosine-3'- phosphorothioate
  modified_base 2: mod_base = OTHER; note = 2'-fluoroadenosine-3'-phosphorothioate
  modified_base 3: mod_base = OTHER; note = 2'-O-methyladenosine-3'-phosphate
  modified_base 4: mod_base = OTHER; note = 2'-fluoroadenosine-3'-phosphate
  modified_base 5: mod_base = OTHER; note = 2'-O-methylguanosine-3'-phosphate
  modified_base 6: mod_base = OTHER; note = 2'-fluoroguanosine-3'-phosphate
  modified_base 7: mod_base = OTHER; note = 2'-O-methylguanosine-3'-phosphate
  modified_base 8: mod_base = OTHER; note = 2'-fluoroadenosine-3'-phosphate
  modified_base 9: mod_base = OTHER; note = 2'-O-methyluridine-3'-phosphate
  modified_base 10: mod_base = OTHER; note = 2'-fluorouridine-3'-phosphate
  modified_base 11: mod_base = OTHER; note = 2'-O-methylguanosine-3'-phosphate
  modified_base 12: mod_base = OTHER; note = 2'-O-methylcytidine-3'-phosphate
  modified_base 13: mod_base = OTHER; note = 2'-O-methyluridine-3'-phosphate
  modified_base 14: mod_base = OTHER; note = 2'-fluoroadenosine-3'-phosphate
  modified_base 15: mod_base = OTHER; note = 2'-O-methyluridine-3'-phosphate
  modified_base 16: mod_base = OTHER; note = 2'-fluorouridine-3'-phosphate
  modified_base 17: mod_base = OTHER; note = 2'-O-methyluridine-3'-phosphate
  modified_base 18: mod_base = OTHER; note = 2'-fluorouridine-3'-phosphate
  modified_base 19: mod_base = OTHER; note = 2'-O-methylguanosine-3'-phosphate
  modified_base 20: mod_base = OTHER; note = 2'-fluorouridine-3'-phosphate
  modified_base 21: mod_base = OTHER; note = 2'-O-methyluridine-3'-phosphorothioate
  modified_base 22: mod_base = OTHER; note = 2'-O-methylguanosine-3'- phosphorothioate
  modified_base 23: mod_base = OTHER; note = 2'-O-methylguanosine-3'-phosphate
aaaagggattgctattttgttgg

SEQ ID NO: 145 - RNA, 23 nt, synthetic construct
  misc_feature 1..23: note = Description of Artificial Sequence: Synthetic oligonucleotide
  source 1..23: mol_type = other RNA
  modified_base 1: mod_base = OTHER; note = 2'-O-methyladenosine-3'- phosphorothioate
  modified_base 2: mod_base = OTHER; note = 2'-fluoroadenosine-3'-phosphorothioate
  modified_base 3: mod_base = OTHER; note = 2'-O-methylguanosine-3'-phosphate
  modified_base 4: mod_base = OTHER; note = 2'-fluorouridine-3'-phosphate
  modified_base 5: mod_base = OTHER; note = 2'-O-methylcytidine-3'-phosphate
  modified_base 6: mod_base = OTHER; note = 2'-fluoroguanosine-3'-phosphate
  modified_base 7: mod_base = OTHER; note = 2'-O-methyladenosine-3'-phosphate
  modified_base 8: mod_base = OTHER; note = 2'-fluorocytidine-3'-phosphate
  modified_base 9: mod_base = OTHER; note = 2'-O-methyladenosine-3'-phosphate
  modified_base 10: mod_base = OTHER; note = 2'-fluoroguanosine-3'-phosphate
  modified_base 11: mod_base = OTHER; note = 2'-O-methyladenosine-3'-phosphate
  modified_base 12: mod_base = OTHER; note = 2'-O-methyluridine-3'-phosphate
  modified_base 13: mod_base = OTHER; note = 2'-O-methylcytidine-3'-phosphate
  modified_base 14: mod_base = OTHER; note = 2'-fluorouridine-3'-phosphate
  modified_base 15: mod_base = OTHER; note = 2'-O-methylguanosine-3'-phosphate
  modified_base 16: mod_base = OTHER; note = 2'-fluorouridine-3'-phosphate
  modified_base 17: mod_base = OTHER; note = 2'-O-methyluridine-3'-phosphate
  modified_base 18: mod_base = OTHER; note = 2'-fluorouridine-3'-phosphate
  modified_base 19: mod_base = OTHER; note = 2'-O-methylcytidine-3'-phosphate
  modified_base 20: mod_base = OTHER; note = 2'-fluoroadenosine-3'-phosphate
  modified_base 21: mod_base = OTHER; note = 2'-O-methylguanosine-3'- phosphorothioate
  modified_base 22: mod_base = OTHER; note = 2'-O-methylcytidine-3'- phosphorothioate
  modified_base 23: mod_base = OTHER; note = 2'-O-methyladenosine-3'-phosphate
aagtcgacagatctgtttcagca

SEQ ID NO: 146 - RNA, 23 nt, synthetic construct
  misc_feature 1..23: note = Description of Artificial Sequence: Synthetic oligonucleotide
  source 1..23: mol_type = other RNA
  modified_base 1: mod_base = OTHER; note = 2'-O-methyluridine-3'-phosphorothioate
  modified_base 2: mod_base = OTHER; note = 2'-fluorocytidine-3'-phosphorothioate
  modified_base 3: mod_base = OTHER; note = 2'-O-methyladenosine-3'-phosphate
  modified_base 4: mod_base = OTHER; note = 2'-fluoroadenosine-3'-phosphate
  modified_base 5: mod_base = OTHER; note = 2'-O-methyladenosine-3'-phosphate
  modified_base 6: mod_base = OTHER; note = 2'-fluoroadenosine-3'-phosphate
  modified_base 7: mod_base = OTHER; note = 2'-O-methyluridine-3'-phosphate
  modified_base 8: mod_base = OTHER; note = 2'-fluoroguanosine-3'-phosphate
  modified_base 9: mod_base = OTHER; note = 2'-O-methylcytidine-3'-phosphate
  modified_base 10: mod_base = OTHER; note = 2'-fluorocytidine-3'-phosphate
  modified_base 11: mod_base = OTHER; note = 2'-O-methylcytidine-3'-phosphate
  modified_base 12: mod_base = OTHER; note = 2'-O-methyluridine-3'-phosphate
  modified_base 13: mod_base = OTHER; note = 2'-O-methyluridine-3'-phosphate
  modified_base 14: mod_base = OTHER; note = 2'-fluorouridine-3'-phosphate
  modified_base 15: mod_base = OTHER; note = 2'-O-methylguanosine-3'-phosphate
  modified_base 16: mod_base = OTHER; note = 2'-fluorocytidine-3'-phosphate
  modified_base 17: mod_base = OTHER; note = 2'-O-methyladenosine-3'-phosphate
  modified_base 18: mod_base = OTHER; note = 2'-fluoroadenosine-3'-phosphate
  modified_base 19: mod_base = OTHER; note = 2'-O-methylcytidine-3'-phosphate
  modified_base 20: mod_base = OTHER; note = 2'-fluoroadenosine-3'-phosphate
  modified_base 21: mod_base = OTHER; note = 2'-O-methyladenosine-3'- phosphorothioate
  modified_base 22: mod_base = OTHER; note = 2'-O-methyluridine-3'-phosphorothioate
  modified_base 23: mod_base = OTHER; note = 2'-O-methyluridine-3'-phosphate
tcaaaatgccctttgcaacaatt

SEQ ID NO: 147 - RNA, 23 nt, synthetic construct
  misc_feature 1..23: note = Description of Artificial Sequence: Synthetic oligonucleotide
  source 1..23: mol_type = other RNA
  modified_base 1: mod_base = OTHER; note = 2'-O-methyluridine-3'-phosphorothioate
  modified_base 2: mod_base = OTHER; note = 2'-fluoroadenosine-3'-phosphorothioate
  modified_base 3: mod_base = OTHER; note = 2'-O-methylcytidine-3'-phosphate
  modified_base 4: mod_base = OTHER; note = 2'-fluoroadenosine-3'-phosphate
  modified_base 5: mod_base = OTHER; note = 2'-O-methylguanosine-3'-phosphate
  modified_base 6: mod_base = OTHER; note = 2'-fluoroguanosine-3'-phosphate
  modified_base 7: mod_base = OTHER; note = 2'-O-methyluridine-3'-phosphate
  modified_base 8: mod_base = OTHER; note = 2'-fluorouridine-3'-phosphate
  modified_base 9: mod_base = OTHER; note = 2'-O-methyladenosine-3'-phosphate
  modified_base 10: mod_base = OTHER; note = 2'-fluoroadenosine-3'-phosphate
  modified_base 11: mod_base = OTHER; note = 2'-O-methyluridine-3'-phosphate
  modified_base 12: mod_base = OTHER; note = 2'-O-methyladenosine-3'-phosphate
  modified_base 13: mod_base = OTHER; note = 2'-O-methyladenosine-3'-phosphate
  modified_base 14: mod_base = OTHER; note = 2'-fluoroadenosine-3'-phosphate
  modified_base 15: mod_base = OTHER; note = 2'-O-methylcytidine-3'-phosphate
  modified_base 16: mod_base = OTHER; note = 2'-fluoroadenosine-3'-phosphate
  modified_base 17: mod_base = OTHER; note = 2'-O-methyladenosine-3'-phosphate
  modified_base 18: mod_base = OTHER; note = 2'-fluorouridine-3'-phosphate
  modified_base 19: mod_base = OTHER; note = 2'-O-methylguanosine-3'-phosphate
  modified_base 20: mod_base = OTHER; note = 2'-fluoroadenosine-3'-phosphate
  modified_base 21: mod_base = OTHER; note = 2'-O-methylguanosine-3'- phosphorothioate
  modified_base 22: mod_base = OTHER; note = 2'-O-methyladenosine-3'- phosphorothioate
  modified_base 23: mod_base = OTHER; note = 2'-O-methyluridine-3'-phosphate
tacaggttaataaacaatgagat

SEQ ID NO: 148 - RNA, 23 nt, synthetic construct
  misc_feature 1..23: note = Description of Artificial Sequence: Synthetic oligonucleotide
  source 1..23: mol_type = other RNA
  modified_base 1: mod_base = OTHER; note = 2'-O-methyladenosine-3'- phosphorothioate
  modified_base 2: mod_base = OTHER; note = 2'-fluoroadenosine-3'-phosphorothioate
  modified_base 3: mod_base = OTHER; note = 2'-O-methyladenosine-3'-phosphate
  modified_base 4: mod_base = OTHER; note = 2'-fluoroguanosine-3'-phosphate
  modified_base 5: mod_base = OTHER; note = 2'-O-methylguanosine-3'-phosphate
  modified_base 6: mod_base = OTHER; note = 2'-fluoroguanosine-3'-phosphate
  modified_base 7: mod_base = OTHER; note = 2'-O-methyladenosine-3'-phosphate
  modified_base 8: mod_base = OTHER; note = 2'-fluorouridine-3'-phosphate
  modified_base 9: mod_base = OTHER; note = 2'-O-methyluridine-3'-phosphate
  modified_base 10: mod_base = OTHER; note = 2'-fluoroguanosine-3'-phosphate
  modified_base 11: mod_base = OTHER; note = 2'-O-methylcytidine-3'-phosphate
  modified_base 12: mod_base = OTHER; note = 2'-O-methyluridine-3'-phosphate
  modified_base 13: mod_base = OTHER; note = 2'-O-methyladenosine-3'-phosphate
  modified_base 14: mod_base = OTHER; note = 2'-fluorouridine-3'-phosphate
  modified_base 15: mod_base = OTHER; note = 2'-O-methyluridine-3'-phosphate
  modified_base 16: mod_base = OTHER; note = 2'-fluorouridine-3'-phosphate
  modified_base 17: mod_base = OTHER; note = 2'-O-methyluridine-3'-phosphate
  modified_base 18: mod_base = OTHER; note = 2'-fluoroguanosine-3'-phosphate
  modified_base 19: mod_base = OTHER; note = 2'-O-methyluridine-3'-phosphate
  modified_base 20: mod_base = OTHER; note = 2'-fluorouridine-3'-phosphate
  modified_base 21: mod_base = OTHER; note = 2'-O-methylguanosine-3'- phosphorothioate
  modified_base 22: mod_base = OTHER; note = 2'-O-methylguanosine-3'- phosphorothioate
  modified_base 23: mod_base = OTHER; note = 2'-O-methyladenosine-3'-phosphate
aaagggattgctattttgttgga

SEQ ID NO: 149 - RNA, 23 nt, synthetic construct
  misc_feature 1..23: note = Description of Artificial Sequence: Synthetic oligonucleotide
  source 1..23: mol_type = other RNA
  modified_base 1: mod_base = OTHER; note = 2'-O-methyladenosine-3'- phosphorothioate
  modified_base 2: mod_base = OTHER; note = 2'-fluoroadenosine-3'-phosphorothioate
  modified_base 3: mod_base = OTHER; note = 2'-O-methyluridine-3'-phosphate
  modified_base 4: mod_base = OTHER; note = 2'-fluoroadenosine-3'-phosphate
  modified_base 5: mod_base = OTHER; note = 2'-O-methylcytidine-3'-phosphate
  modified_base 6: mod_base = OTHER; note = 2'-fluoroadenosine-3'-phosphate
  modified_base 7: mod_base = OTHER; note = 2'-O-methylguanosine-3'-phosphate
  modified_base 8: mod_base = OTHER; note = 2'-fluoroguanosine-3'-phosphate
  modified_base 9: mod_base = OTHER; note = 2'-O-methyluridine-3'-phosphate
  modified_base 10: mod_base = OTHER; note = 2'-fluorouridine-3'-phosphate
  modified_base 11: mod_base = OTHER; note = 2'-O-methyladenosine-3'-phosphate
  modified_base 12: mod_base = OTHER; note = 2'-O-methyladenosine-3'-phosphate
  modified_base 13: mod_base = OTHER; note = 2'-O-methyluridine-3'-phosphate
  modified_base 14: mod_base = OTHER; note = 2'-fluoroadenosine-3'-phosphate
  modified_base 15: mod_base = OTHER; note = 2'-O-methyladenosine-3'-phosphate
  modified_base 16: mod_base = OTHER; note = 2'-fluoroadenosine-3'-phosphate
  modified_base 17: mod_base = OTHER; note = 2'-O-methylcytidine-3'-phosphate
  modified_base 18: mod_base = OTHER; note = 2'-fluoroadenosine-3'-phosphate
  modified_base 19: mod_base = OTHER; note = 2'-O-methyladenosine-3'-phosphate
  modified_base 20: mod_base = OTHER; note = 2'-fluorouridine-3'-phosphate
  modified_base 21: mod_base = OTHER; note = 2'-O-methylguanosine-3'- phosphorothioate
  modified_base 22: mod_base = OTHER; note = 2'-O-methyladenosine-3'- phosphorothioate
  modified_base 23: mod_base = OTHER; note = 2'-O-methylguanosine-3'-phosphate
aatacaggttaataaacaatgag

SEQ ID NO: 150 - RNA, 23 nt, synthetic construct
  misc_feature 1..23: note = Description of Artificial Sequence: Synthetic oligonucleotide
  source 1..23: mol_type = other RNA
  modified_base 1: mod_base = OTHER; note = 2'-O-methyluridine-3'-phosphorothioate
  modified_base 2: mod_base = OTHER; note = 2'-fluorouridine -3'-phosphorothioate
  modified_base 3: mod_base = OTHER; note = 2'-O-methylguanosine-3'-phosphate
  modified_base 4: mod_base = OTHER; note = 2'-fluoroadenosine-3'-phosphate
  modified_base 5: mod_base = OTHER; note = 2'-O-methyluridine-3'-phosphate
  modified_base 6: mod_base = OTHER; note = 2'-fluoroadenosine-3'-phosphate
  modified_base 7: mod_base = OTHER; note = 2'-O-methyluridine-3'-phosphate
  modified_base 8: mod_base = OTHER; note = 2'-fluorocytidine-3'-phosphate
  modified_base 9: mod_base = OTHER; note = 2'-O-methyluridine-3'-phosphate
  modified_base 10: mod_base = OTHER; note = 2'-fluorouridine-3'-phosphate
  modified_base 11: mod_base = OTHER; note = 2'-O-methylcytidine-3'-phosphate
  modified_base 12: mod_base = OTHER; note = 2'-O-methylcytidine-3'-phosphate
  modified_base 13: mod_base = OTHER; note = 2'-O-methylcytidine-3'-phosphate
  modified_base 14: mod_base = OTHER; note = 2'-fluoroadenosine-3'-phosphate
  modified_base 15: mod_base = OTHER; note = 2'-O-methylguanosine-3'-phosphate
  modified_base 16: mod_base = OTHER; note = 2'-fluorocytidine-3'-phosphate
  modified_base 17: mod_base = OTHER; note = 2'-O-methyluridine-3'-phosphate
  modified_base 18: mod_base = OTHER; note = 2'-fluoroguanosine-3'-phosphate
  modified_base 19: mod_base = OTHER; note = 2'-O-methyladenosine-3'-phosphate
  modified_base 20: mod_base = OTHER; note = 2'-fluorouridine-3'-phosphate
  modified_base 21: mod_base = OTHER; note = 2'-O-methyladenosine-3'- phosphorothioate
  modified_base 22: mod_base = OTHER; note = 2'-O-methylguanosine-3'- phosphorothioate
  modified_base 23: mod_base = OTHER; note = 2'-O-methyladenosine-3'-phosphate
ttgatatcttcccagctgataga

SEQ ID NO: 151 - RNA, 23 nt, synthetic construct
  misc_feature 1..23: note = Description of Artificial Sequence: Synthetic oligonucleotide
  source 1..23: mol_type = other RNA
  modified_base 1: mod_base = OTHER; note = 2'-O-methyluridine-3'-phosphorothioate
  modified_base 2: mod_base = OTHER; note = 2'-fluorouridine -3'-phosphorothioate
  modified_base 3: mod_base = OTHER; note = 2'-O-methylcytidine-3'-phosphate
  modified_base 4: mod_base = OTHER; note = 2'-fluorouridine-3'-phosphate
  modified_base 5: mod_base = OTHER; note = 2'-O-methyladenosine-3'-phosphate
  modified_base 6: mod_base = OTHER; note = 2'-fluoroadenosine-3'-phosphate
  modified_base 7: mod_base = OTHER; note = 2'-O-methyladenosine-3'-phosphate
  modified_base 8: mod_base = OTHER; note = 2'-fluoroadenosine-3'-phosphate
  modified_base 9: mod_base = OTHER; note = 2'-O-methylguanosine-3'-phosphate
  modified_base 10: mod_base = OTHER; note = 2'-fluoroguanosine-3'-phosphate
  modified_base 11: mod_base = OTHER; note = 2'-O-methyluridine-3'-phosphate
  modified_base 12: mod_base = OTHER; note = 2'-O-methyluridine-3'-phosphate
  modified_base 13: mod_base = OTHER; note = 2'-O-methylcytidine-3'-phosphate
  modified_base 14: mod_base = OTHER; note = 2'-fluorocytidine-3'-phosphate
  modified_base 15: mod_base = OTHER; note = 2'-O-methyluridine-3'-phosphate
  modified_base 16: mod_base = OTHER; note = 2'-fluoroadenosine-3'-phosphate
  modified_base 17: mod_base = OTHER; note = 2'-O-methylguanosine-3'-phosphate
  modified_base 18: mod_base = OTHER; note = 2'-fluoroguanosine-3'-phosphate
  modified_base 19: mod_base = OTHER; note = 2'-O-methyladenosine-3'-phosphate
  modified_base 20: mod_base = OTHER; note = 2'-fluorocytidine-3'-phosphate
  modified_base 21: mod_base = OTHER; note = 2'-O-methyladenosine-3'- phosphorothioate
  modified_base 22: mod_base = OTHER; note = 2'-O-methylcytidine-3'- phosphorothioate
  modified_base 23: mod_base = OTHER; note = 2'-O-methylcytidine-3'-phosphate
ttctaaaaggttcctaggacacc

SEQ ID NO: 152 - RNA, 23 nt, synthetic construct
  misc_feature 1..23: note = Description of Artificial Sequence: Synthetic oligonucleotide
  source 1..23: mol_type = other RNA
  modified_base 1: mod_base = OTHER; note = 2'-O-methyladenosine-3'- phosphorothioate
  modified_base 2: mod_base = OTHER; note = 2'-fluoroguanosine-3'-phosphorothioate
  modified_base 3: mod_base = OTHER; note = 2'-O-methylguanosine-3'-phosphate
  modified_base 4: mod_base = OTHER; note = 2'-fluoroguanosine-3'-phosphate
  modified_base 5: mod_base = OTHER; note = 2'-O-methyladenosine-3'-phosphate
  modified_base 6: mod_base = OTHER; note = 2'-fluorouridine-3'-phosphate
  modified_base 7: mod_base = OTHER; note = 2'-O-methyluridine-3'-phosphate
  modified_base 8: mod_base = OTHER; note = 2'-fluoroguanosine-3'-phosphate
  modified_base 9: mod_base = OTHER; note = 2'-O-methylcytidine-3'-phosphate
  modified_base 10: mod_base = OTHER; note = 2'-fluorouridine-3'-phosphate
  modified_base 11: mod_base = OTHER; note = 2'-O-methyladenosine-3'-phosphate
  modified_base 12: mod_base = OTHER; note = 2'-O-methyluridine-3'-phosphate
  modified_base 13: mod_base = OTHER; note = 2'-O-methyluridine-3'-phosphate
  modified_base 14: mod_base = OTHER; note = 2'-fluorouridine-3'-phosphate
  modified_base 15: mod_base = OTHER; note = 2'-O-methyluridine-3'-phosphate
  modified_base 16: mod_base = OTHER; note = 2'-fluoroguanosine-3'-phosphate
  modified_base 17: mod_base = OTHER; note = 2'-O-methyluridine-3'-phosphate
  modified_base 18: mod_base = OTHER; note = 2'-fluorouridine-3'-phosphate
  modified_base 19: mod_base = OTHER; note = 2'-O-methylguanosine-3'-phosphate
  modified_base 20: mod_base = OTHER; note = 2'-fluoroguanosine-3'-phosphate
  modified_base 21: mod_base = OTHER; note = 2'-O-methyladenosine-3'- phosphorothioate
  modified_base 22: mod_base = OTHER; note = 2'-O-methyladenosine-3'- phosphorothioate
  modified_base 23: mod_base = OTHER; note = 2'-O-methyladenosine-3'-phosphate
agggattgctattttgttggaaa

SEQ ID NO: 153 - RNA, 23 nt, synthetic construct
  misc_feature 1..23: note = Description of Artificial Sequence: Synthetic oligonucleotide
  source 1..23: mol_type = other RNA
  modified_base 1: mod_base = OTHER; note = 2'-O-methyladenosine-3'- phosphorothioate
  modified_base 2: mod_base = OTHER; note = 2'-fluorouridine -3'-phosphorothioate
  modified_base 3: mod_base = OTHER; note = 2'-O-methylcytidine-3'-phosphate
  modified_base 4: mod_base = OTHER; note = 2'-fluoroadenosine-3'-phosphate
  modified_base 5: mod_base = OTHER; note = 2'-O-methylguanosine-3'-phosphate
  modified_base 6: mod_base = OTHER; note = 2'-fluorouridine-3'-phosphate
  modified_base 7: mod_base = OTHER; note = 2'-O-methylguanosine-3'-phosphate
  modified_base 8: mod_base = OTHER; note = 2'-fluorocytidine-3'-phosphate
  modified_base 9: mod_base = OTHER; note = 2'-O-methylcytidine-3'-phosphate
  modified_base 10: mod_base = OTHER; note = 2'-fluorouridine-3'-phosphate
  modified_base 11: mod_base = OTHER; note = 2'-O-methyluridine-3'-phosphate
  modified_base 12: mod_base = OTHER; note = 2'-O-methyluridine-3'-phosphate
  modified_base 13: mod_base = OTHER; note = 2'-O-methylcytidine-3'-phosphate
  modified_base 14: mod_base = OTHER; note = 2'-fluorocytidine-3'-phosphate
  modified_base 15: mod_base = OTHER; note = 2'-O-methylguanosine-3'-phosphate
  modified_base 16: mod_base = OTHER; note = 2'-fluorocytidine-3'-phosphate
  modified_base 17: mod_base = OTHER; note = 2'-O-methyladenosine-3'-phosphate
  modified_base 18: mod_base = OTHER; note = 2'-fluorocytidine-3'-phosphate
  modified_base 19: mod_base = OTHER; note = 2'-O-methyladenosine-3'-phosphate
  modified_base 20: mod_base = OTHER; note = 2'-fluorocytidine-3'-phosphate
  modified_base 21: mod_base = OTHER; note = 2'-O-methylcytidine-3'- phosphorothioate
  modified_base 22: mod_base = OTHER; note = 2'-O-methylcytidine-3'- phosphorothioate
  modified_base 23: mod_base = OTHER; note = 2'-O-methylcytidine-3'-phosphate
atcagtgcctttccgcacacccc

SEQ ID NO: 154 - RNA, 23 nt, synthetic construct
  misc_feature 1..23: note = Description of Artificial Sequence: Synthetic oligonucleotide
  source 1..23: mol_type = other RNA
  modified_base 1: mod_base = OTHER; note = 2'-O-methyladenosine-3'- phosphorothioate
  modified_base 2: mod_base = OTHER; note = 2'-fluorouridine -3'-phosphorothioate
  modified_base 3: mod_base = OTHER; note = 2'-O-methylguanosine-3'-phosphate
  modified_base 4: mod_base = OTHER; note = 2'-fluoroadenosine-3'-phosphate
  modified_base 5: mod_base = OTHER; note = 2'-O-methyluridine-3'-phosphate
  modified_base 6: mod_base = OTHER; note = 2'-fluoroadenosine-3'-phosphate
  modified_base 7: mod_base = OTHER; note = 2'-O-methyladenosine-3'-phosphate
  modified_base 8: mod_base = OTHER; note = 2'-fluoroadenosine-3'-phosphate
  modified_base 9: mod_base = OTHER; note = 2'-O-methylguanosine-3'-phosphate
  modified_base 10: mod_base = OTHER; note = 2'-fluorouridine-3'-phosphate
  modified_base 11: mod_base = OTHER; note = 2'-O-methyladenosine-3'-phosphate
  modified_base 12: mod_base = OTHER; note = 2'-O-methylcytidine-3'-phosphate
  modified_base 13: mod_base = OTHER; note = 2'-O-methyluridine-3'-phosphate
  modified_base 14: mod_base = OTHER; note = 2'-fluoroguanosine-3'-phosphate
  modified_base 15: mod_base = OTHER; note = 2'-O-methylguanosine-3'-phosphate
  modified_base 16: mod_base = OTHER; note = 2'-fluorouridine-3'-phosphate
  modified_base 17: mod_base = OTHER; note = 2'-O-methyluridine-3'-phosphate
  modified_base 18: mod_base = OTHER; note = 2'-fluorouridine-3'-phosphate
  modified_base 19: mod_base = OTHER; note = 2'-O-methylcytidine-3'-phosphate
  modified_base 20: mod_base = OTHER; note = 2'-fluoroadenosine-3'-phosphate
  modified_base 21: mod_base = OTHER; note = 2'-O-methyladenosine-3'- phosphorothioate
  modified_base 22: mod_base = OTHER; note = 2'-O-methyladenosine-3'- phosphorothioate
  modified_base 23: mod_base = OTHER; note = 2'-O-methyladenosine-3'-phosphate
atgataaagtactggtttcaaaa

SEQ ID NO: 155 - RNA, 23 nt, synthetic construct
  misc_feature 1..23: note = Description of Artificial Sequence: Synthetic oligonucleotide
  source 1..23: mol_type = other RNA
  modified_base 1: mod_base = OTHER; note = 2'-O-methyluridine-3'-phosphorothioate
  modified_base 2: mod_base = OTHER; note = 2'-fluoroadenosine-3'-phosphorothioate
  modified_base 3: mod_base = OTHER; note = 2'-O-methyluridine-3'-phosphate
  modified_base 4: mod_base = OTHER; note = 2'-fluoroadenosine-3'-phosphate
  modified_base 5: mod_base = OTHER; note = 2'-O-methyluridine-3'-phosphate
  modified_base 6: mod_base = OTHER; note = 2'-fluoroadenosine-3'-phosphate
  modified_base 7: mod_base = OTHER; note = 2'-O-methyluridine-3'-phosphate
  modified_base 8: mod_base = OTHER; note = 2'-fluoroadenosine-3'-phosphate
  modified_base 9: mod_base = OTHER; note = 2'-O-methylguanosine-3'-phosphate
  modified_base 10: mod_base = OTHER; note = 2'-fluoroadenosine-3'-phosphate
  modified_base 11: mod_base = OTHER; note = 2'-O-methylcytidine-3'-phosphate
  modified_base 12: mod_base = OTHER; note = 2'-O-methyluridine-3'-phosphate
  modified_base 13: mod_base = OTHER; note = 2'-O-methyluridine-3'-phosphate
  modified_base 14: mod_base = OTHER; note = 2'-fluorouridine-3'-phosphate
  modified_base 15: mod_base = OTHER; note = 2'-O-methylguanosine-3'-phosphate
  modified_base 16: mod_base = OTHER; note = 2'-fluoroguanosine-3'-phosphate
  modified_base 17: mod_base = OTHER; note = 2'-O-methyladenosine-3'-phosphate
  modified_base 18: mod_base = OTHER; note = 2'-fluoroadenosine-3'-phosphate
  modified_base 19: mod_base = OTHER; note = 2'-O-methylguanosine-3'-phosphate
  modified_base 20: mod_base = OTHER; note = 2'-fluorouridine-3'-phosphate
  modified_base 21: mod_base = OTHER; note = 2'-O-methyladenosine-3'- phosphorothioate
  modified_base 22: mod_base = OTHER; note = 2'-O-methylcytidine-3'- phosphorothioate
  modified_base 23: mod_base = OTHER; note = 2'-O-methyluridine-3'-phosphate
tatatatagactttggaagtact

SEQ ID NO: 156 - RNA, 23 nt, synthetic construct
  misc_feature 1..23: note = Description of Artificial Sequence: Synthetic oligonucleotide
  source 1..23: mol_type = other RNA
  modified_base 1: mod_base = OTHER; note = 2'-O-methyladenosine-3'- phosphorothioate
  modified_base 2: mod_base = OTHER; note = 2'-fluorouridine -3'-phosphorothioate
  modified_base 3: mod_base = OTHER; note = 2'-O-methyluridine-3'-phosphate
  modified_base 4: mod_base = OTHER; note = 2'-fluorouridine-3'-phosphate
  modified_base 5: mod_base = OTHER; note = 2'-O-methylcytidine-3'-phosphate
  modified_base 6: mod_base = OTHER; note = 2'-fluorouridine-3'-phosphate
  modified_base 7: mod_base = OTHER; note = 2'-O-methyladenosine-3'-phosphate
  modified_base 8: mod_base = OTHER; note = 2'-fluoroadenosine-3'-phosphate
  modified_base 9: mod_base = OTHER; note = 2'-O-methyladenosine-3'-phosphate
  modified_base 10: mod_base = OTHER; note = 2'-fluoroadenosine-3'-phosphate
  modified_base 11: mod_base = OTHER; note = 2'-O-methylguanosine-3'-phosphate
  modified_base 12: mod_base = OTHER; note = 2'-O-methylguanosine-3'-phosphate
  modified_base 13: mod_base = OTHER; note = 2'-O-methyluridine-3'-phosphate
  modified_base 14: mod_base = OTHER; note = 2'-fluorouridine-3'-phosphate
  modified_base 15: mod_base = OTHER; note = 2'-O-methylcytidine-3'-phosphate
  modified_base 16: mod_base = OTHER; note = 2'-fluorocytidine-3'-phosphate
  modified_base 17: mod_base = OTHER; note = 2'-O-methyluridine-3'-phosphate
  modified_base 18: mod_base = OTHER; note = 2'-fluoroadenosine-3'-phosphate
  modified_base 19: mod_base = OTHER; note = 2'-O-methylguanosine-3'-phosphate
  modified_base 20: mod_base = OTHER; note = 2'-fluoroguanosine-3'-phosphate
  modified_base 21: mod_base = OTHER; note = 2'-O-methyladenosine-3'- phosphorothioate
  modified_base 22: mod_base = OTHER; note = 2'-O-methylcytidine-3'- phosphorothioate
  modified_base 23: mod_base = OTHER; note = 2'-O-methyladenosine-3'-phosphate
atttctaaaaggttcctaggaca

SEQ ID NO: 157 - RNA, 23 nt, synthetic construct
  misc_feature 1..23: note = Description of Artificial Sequence: Synthetic oligonucleotide
  source 1..23: mol_type = other RNA
  modified_base 1: mod_base = OTHER; note = 2'-O-methyluridine-3'-phosphorothioate
  modified_base 2: mod_base = OTHER; note = 2'-fluorouridine -3'-phosphorothioate
  modified_base 3: mod_base = OTHER; note = 2'-O-methylcytidine-3'-phosphate
  modified_base 4: mod_base = OTHER; note = 2'-fluorocytidine-3'-phosphate
  modified_base 5: mod_base = OTHER; note = 2'-O-methyladenosine-3'-phosphate
  modified_base 6: mod_base = OTHER; note = 2'-fluoroadenosine-3'-phosphate
  modified_base 7: mod_base = OTHER; note = 2'-O-methyladenosine-3'-phosphate
  modified_base 8: mod_base = OTHER; note = 2'-fluoroadenosine-3'-phosphate
  modified_base 9: mod_base = OTHER; note = 2'-O-methyluridine-3'-phosphate
  modified_base 10: mod_base = OTHER; note = 2'-fluorouridine-3'-phosphate
  modified_base 11: mod_base = OTHER; note = 2'-O-methyluridine-3'-phosphate
  modified_base 12: mod_base = OTHER; note = 2'-O-methyluridine-3'-phosphate
  modified_base 13: mod_base = OTHER; note = 2'-O-methylcytidine-3'-phosphate
  modified_base 14: mod_base = OTHER; note = 2'-fluorocytidine-3'-phosphate
  modified_base 15: mod_base = OTHER; note = 2'-O-methyluridine-3'-phosphate
  modified_base 16: mod_base = OTHER; note = 2'-fluorocytidine-3'-phosphate
  modified_base 17: mod_base = OTHER; note = 2'-O-methyladenosine-3'-phosphate
  modified_base 18: mod_base = OTHER; note = 2'-fluoroguanosine-3'-phosphate
  modified_base 19: mod_base = OTHER; note = 2'-O-methylguanosine-3'-phosphate
  modified_base 20: mod_base = OTHER; note = 2'-fluoroadenosine-3'-phosphate
  modified_base 21: mod_base = OTHER; note = 2'-O-methylguanosine-3'- phosphorothioate
  modified_base 22: mod_base = OTHER; note = 2'-O-methyladenosine-3'- phosphorothioate
  modified_base 23: mod_base = OTHER; note = 2'-O-methyladenosine-3'-phosphate
ttccaaaattttcctcaggagaa

SEQ ID NO: 158 - RNA, 23 nt, synthetic construct
  misc_feature 1..23: note = Description of Artificial Sequence: Synthetic oligonucleotide
  source 1..23: mol_type = other RNA
  modified_base 1: mod_base = OTHER; note = 2'-O-methyladenosine-3'- phosphorothioate
  modified_base 2: mod_base = OTHER; note = 2'-fluorouridine -3'-phosphorothioate
  modified_base 3: mod_base = OTHER; note = 2'-O-methyluridine-3'-phosphate
  modified_base 4: mod_base = OTHER; note = 2'-fluorouridine-3'-phosphate
  modified_base 5: mod_base = OTHER; note = 2'-O-methylcytidine-3'-phosphate
  modified_base 6: mod_base = OTHER; note = 2'-fluoroadenosine-3'-phosphate
  modified_base 7: mod_base = OTHER; note = 2'-O-methylguanosine-3'-phosphate
  modified_base 8: mod_base = OTHER; note = 2'-fluorocytidine-3'-phosphate
  modified_base 9: mod_base = OTHER; note = 2'-O-methyladenosine-3'-phosphate
  modified_base 10: mod_base = OTHER; note = 2'-fluoroadenosine-3'-phosphate
  modified_base 11: mod_base = OTHER; note = 2'-O-methylcytidine-3'-phosphate
  modified_base 12: mod_base = OTHER; note = 2'-O-methyladenosine-3'-phosphate
  modified_base 13: mod_base = OTHER; note = 2'-O-methyluridine-3'-phosphate
  modified_base 14: mod_base = OTHER; note = 2'-fluorouridine-3'-phosphate
  modified_base 15: mod_base = OTHER; note = 2'-O-methylcytidine-3'-phosphate
  modified_base 16: mod_base = OTHER; note = 2'-fluorocytidine-3'-phosphate
  modified_base 17: mod_base = OTHER; note = 2'-O-methylguanosine-3'-phosphate
  modified_base 18: mod_base = OTHER; note = 2'-fluoroguanosine-3'-phosphate
  modified_base 19: mod_base = OTHER; note = 2'-O-methyladenosine-3'-phosphate
  modified_base 20: mod_base = OTHER; note = 2'-fluoroguanosine-3'-phosphate
  modified_base 21: mod_base = OTHER; note = 2'-O-methylcytidine-3'- phosphorothioate
  modified_base 22: mod_base = OTHER; note = 2'-O-methyladenosine-3'- phosphorothioate
  modified_base 23: mod_base = OTHER; note = 2'-O-methyluridine-3'-phosphate
atttcagcaacattccggagcat

SEQ ID NO: 159 - RNA, 23 nt, synthetic construct
  misc_feature 1..23: note = Description of Artificial Sequence: Synthetic oligonucleotide
  source 1..23: mol_type = other RNA
  modified_base 1: mod_base = OTHER; note = 2'-O-methyluridine-3'-phosphorothioate
  modified_base 2: mod_base = OTHER; note = 2'-fluoroadenosine-3'-phosphorothioate
  modified_base 3: mod_base = OTHER; note = 2'-O-methyluridine-3'-phosphate
  modified_base 4: mod_base = OTHER; note = 2'-fluorouridine-3'-phosphate
  modified_base 5: mod_base = OTHER; note = 2'-O-methylguanosine-3'-phosphate
  modified_base 6: mod_base = OTHER; note = 2'-fluoroguanosine-3'-phosphate
  modified_base 7: mod_base = OTHER; note = 2'-O-methyluridine-3'-phosphate
  modified_base 8: mod_base = OTHER; note = 2'-fluorocytidine-3'-phosphate
  modified_base 9: mod_base = OTHER; note = 2'-O-methyluridine-3'-phosphate
  modified_base 10: mod_base = OTHER; note = 2'-fluorocytidine-3'-phosphate
  modified_base 11: mod_base = OTHER; note = 2'-O-methylcytidine-3'-phosphate
  modified_base 12: mod_base = OTHER; note = 2'-O-methylcytidine-3'-phosphate
  modified_base 13: mod_base = OTHER; note = 2'-O-methylcytidine-3'-phosphate
  modified_base 14: mod_base = OTHER; note = 2'-fluoroadenosine-3'-phosphate
  modified_base 15: mod_base = OTHER; note = 2'-O-methylcytidine-3'-phosphate
  modified_base 16: mod_base = OTHER; note = 2'-fluoroadenosine-3'-phosphate
  modified_base 17: mod_base = OTHER; note = 2'-O-methyladenosine-3'-phosphate
  modified_base 18: mod_base = OTHER; note = 2'-fluoroadenosine-3'-phosphate
  modified_base 19: mod_base = OTHER; note = 2'-O-methylcytidine-3'-phosphate
  modified_base 20: mod_base = OTHER; note = 2'-fluoroadenosine-3'-phosphate
  modified_base 21: mod_base = OTHER; note = 2'-O-methylcytidine-3'- phosphorothioate
  modified_base 22: mod_base = OTHER; note = 2'-O-methyladenosine-3'- phosphorothioate
  modified_base 23: mod_base = OTHER; note = 2'-O-methylguanosine-3'-phosphate
tattggtctccccacaaacacag

SEQ ID NO: 160 - RNA, 21 nt, synthetic construct
  misc_feature 1..21: note = Description of Artificial Sequence: Synthetic oligonucleotide
  source 1..21: mol_type = other RNA
  modified_base 1: mod_base = OTHER; note = 2'-fluoroguanosine-3'-phosphorothioate
  modified_base 2: mod_base = OTHER; note = 2'-O-methyladenosine-3'- phosphorothioate
  modified_base 3: mod_base = OTHER; note = 2'-fluoroadenosine-3'-phosphate
  modified_base 4: mod_base = OTHER; note = 2'-O-methyluridine-3'-phosphate
  modified_base 5: mod_base = OTHER; note = 2'-fluoroguanosine-3'-phosphate
  modified_base 6: mod_base = OTHER; note = 2'-O-methyluridine-3'-phosphate
  modified_base 7: mod_base = OTHER; note = 2'-fluoroguanosine-3'-phosphate
  modified_base 8: mod_base = OTHER; note = 2'-O-methyladenosine-3'-phosphate
  modified_base 9: mod_base = OTHER; note = 2'-fluoroadenosine-3'-phosphate
  modified_base 10: mod_base = OTHER; note = 2'-fluoroadenosine-3'-phosphate
  modified_base 11: mod_base = OTHER; note = 2'-fluoroguanosine-3'-phosphate
  modified_base 12: mod_base = OTHER; note = 2'-O-methyluridine-3'-phosphate
  modified_base 13: mod_base = OTHER; note = 2'-fluorocytidine-3'-phosphate
  modified_base 14: mod_base = OTHER; note = 2'-O-methyladenosine-3'-phosphate
  modified_base 15: mod_base = OTHER; note = 2'-fluorouridine-3'-phosphate
  modified_base 16: mod_base = OTHER; note = 2'-O-methylcytidine-3'-phosphate
  modified_base 17: mod_base = OTHER; note = 2'-fluoroguanosine-3'-phosphate
  modified_base 18: mod_base = OTHER; note = 2'-O-methyladenosine-3'-phosphate
  modified_base 19: mod_base = OTHER; note = 2'-fluorocytidine-3'-phosphate
  modified_base 20: mod_base = OTHER; note = 2'-O-methyladenosine-3'-phosphate
  modified_base 21: mod_base = OTHER; note = 2'-fluoroadenosine-3'-phosphate attached to N-[tris(N-acetylgalactosamine-alkyl)-amidodecanoyl)]-4-hydr oxyprolinol Hyp-(N-acetylgalactosamine-alkyl)3
gaatgtgaaagtcatcgacaa

SEQ ID NO: 161 - RNA, 21 nt, synthetic construct
  misc_feature 1..21: note = Description of Artificial Sequence: Synthetic oligonucleotide
  source 1..21: mol_type = other RNA
  misc_feature 1: note = Nucleotide attached to an inverted abasic DNA (2-hydroxymethyl-tetrahydrofurane-5-phosphate) via a 5'-5' phosphodiester bond
  modified_base 1: mod_base = OTHER; note = 2'-O-methylguanosine-3'- phosphorothioate
  modified_base 2: mod_base = OTHER; note = 2'-O-methyladenosine-3'- phosphorothioate
  modified_base 3: mod_base = OTHER; note = 2'-fluoroadenosine-3'-phosphate
  modified_base 4: mod_base = OTHER; note = 2'-O-methyluridine-3'-phosphate
  modified_base 5: mod_base = OTHER; note = 2'-fluoroguanosine-3'-phosphate
  modified_base 6: mod_base = OTHER; note = 2'-O-methyluridine-3'-phosphate
  modified_base 7: mod_base = OTHER; note = 2'-fluoroguanosine-3'-phosphate
  modified_base 8: mod_base = OTHER; note = 2'-O-methyladenosine-3'-phosphate
  modified_base 9: mod_base = OTHER; note = 2'-fluoroadenosine-3'-phosphate
  modified_base 10: mod_base = OTHER; note = 2'-fluoroadenosine-3'-phosphate
  modified_base 11: mod_base = OTHER; note = 2'-fluoroguanosine-3'-phosphate
  modified_base 12: mod_base = OTHER; note = 2'-O-methyluridine-3'-phosphate
  modified_base 13: mod_base = OTHER; note = 2'-fluorocytidine-3'-phosphate
  modified_base 14: mod_base = OTHER; note = 2'-O-methyladenosine-3'-phosphate
  modified_base 15: mod_base = OTHER; note = 2'-fluorouridine-3'-phosphate
  modified_base 16: mod_base = OTHER; note = 2'-O-methylcytidine-3'-phosphate
  modified_base 17: mod_base = OTHER; note = 2'-fluoroguanosine-3'-phosphate
  modified_base 18: mod_base = OTHER; note = 2'-O-methyladenosine-3'-phosphate
  modified_base 19: mod_base = OTHER; note = 2'-fluorocytidine-3'-phosphate
  modified_base 20: mod_base = OTHER; note = 2'-O-methyladenosine-3'-phosphate
  modified_base 21: mod_base = OTHER; note = 2'-fluoroadenosine-3'-phosphate attached to N-[tris(N-acetylgalactosamine-alkyl)-amidodecanoyl)]-4-hydr oxyprolinol Hyp-(N-acetylgalactosamine-alkyl)3
gaatgtgaaagtcatcgacaa

SEQ ID NO: 162 - RNA, 21 nt, synthetic construct
  misc_feature 1..21: note = Description of Artificial Sequence: Synthetic oligonucleotide
  source 1..21: mol_type = other RNA
  modified_base 1: mod_base = OTHER; note = 2'-O-methylguanosine-3'- phosphorothioate
  modified_base 2: mod_base = OTHER; note = 2'-O-methyladenosine-3'- phosphorothioate
  modified_base 3: mod_base = OTHER; note = 2'-O-methyladenosine-3'-phosphate
  modified_base 4: mod_base = OTHER; note = 2'-O-methyluridine-3'-phosphate
  modified_base 5: mod_base = OTHER; note = 2'-O-methylguanosine-3'-phosphate
  modified_base 6: mod_base = OTHER; note = 2'-O-methyluridine-3'-phosphate
  modified_base 7: mod_base = OTHER; note = 2'-fluoroguanosine-3'-phosphate
  modified_base 8: mod_base = OTHER; note = 2'-O-methyladenosine-3'-phosphate
  modified_base 9: mod_base = OTHER; note = 2'-fluoroadenosine-3'-phosphate
  modified_base 10: mod_base = OTHER; note = 2'-fluoroadenosine-3'-phosphate
  modified_base 11: mod_base = OTHER; note = 2'-fluoroguanosine-3'-phosphate
  modified_base 12: mod_base = OTHER; note = 2'-O-methyluridine-3'-phosphate
  modified_base 13: mod_base = OTHER; note = 2'-O-methylcytidine-3'-phosphate
  modified_base 14: mod_base = OTHER; note = 2'-O-methyladenosine-3'-phosphate
  modified_base 15: mod_base = OTHER; note = 2'-O-methyluridine-3'-phosphate
  modified_base 16: mod_base = OTHER; note = 2'-fluorocytidine-3'-phosphate
  modified_base 17: mod_base = OTHER; note = 2'-O-methylguanosine-3'-phosphate
  modified_base 18: mod_base = OTHER; note = 2'-O-methyladenosine-3'-phosphate
  modified_base 19: mod_base = OTHER; note = 2'-O-methylcytidine-3'-phosphate
  modified_base 20: mod_base = OTHER; note = 2'-O-methyladenosine-3'-phosphate
  modified_base 21: mod_base = OTHER; note = 2'-O-methyladenosine-3'-phosphate attached to N-[tris(N-acetylgalactosamine-alkyl)-amidodecanoyl)]-4-hydr oxyprolinol Hyp-(N-acetylgalactosamine-alkyl)3
gaatgtgaaagtcatcgacaa

SEQ ID NO: 163 - RNA, 21 nt, synthetic construct
  misc_feature 1..21: note = Description of Artificial Sequence: Synthetic oligonucleotide
  source 1..21: mol_type = other RNA
  modified_base 1: mod_base = OTHER; note = 2'-O-methylguanosine-3'- phosphorothioate
  modified_base 2: mod_base = OTHER; note = 2'-O-methyladenosine-3'- phosphorothioate
  modified_base 3: mod_base = OTHER; note = 2'-O-methyladenosine-3'-phosphate
  modified_base 4: mod_base = OTHER; note = 2'-O-methyluridine-3'-phosphate
  modified_base 5: mod_base = OTHER; note = 2'-O-methylguanosine-3'-phosphate
  modified_base 6: mod_base = OTHER; note = 2'-O-methyluridine-3'-phosphate
  modified_base 7: mod_base = OTHER; note = 2'-fluoroguanosine-3'-phosphate
  modified_base 8: mod_base = OTHER; note = 2'-O-methyladenosine-3'-phosphate
  modified_base 9: mod_base = OTHER; note = 2'-fluoroadenosine-3'-phosphate
  modified_base 10: mod_base = OTHER; note = 2'-fluoroadenosine-3'-phosphate
  modified_base 11: mod_base = OTHER; note = 2'-fluoroguanosine-3'-phosphate
  modified_base 12: mod_base = OTHER; note = 2'-O-methyluridine-3'-phosphate
  modified_base 13: mod_base = OTHER; note = 2'-O-methylcytidine-3'-phosphate
  modified_base 14: mod_base = OTHER; note = 2'-O-methyladenosine-3'-phosphate
  modified_base 15: mod_base = OTHER; note = 2'-O-methyluridine-3'-phosphate
  modified_base 16: mod_base = OTHER; note = 2'-O-methylcytidine-3'-phosphate
  modified_base 17: mod_base = OTHER; note = 2'-O-methylguanosine-3'-phosphate
  modified_base 18: mod_base = OTHER; note = 2'-O-methyladenosine-3'-phosphate
  modified_base 19: mod_base = OTHER; note = 2'-O-methylcytidine-3'-phosphate
  modified_base 20: mod_base = OTHER; note = 2'-O-methyladenosine-3'-phosphate
  modified_base 21: mod_base = OTHER; note = 2'-O-methyladenosine-3'-phosphate attached to N-[tris(N-acetylgalactosamine-alkyl)-amidodecanoyl)]-4-hydr oxyprolinol Hyp-(N-acetylgalactosamine-alkyl)3
gaatgtgaaagtcatcgacaa

SEQ ID NO: 164 - RNA, 21 nt, synthetic construct
  misc_feature 1..21: note = Description of Artificial Sequence: Synthetic oligonucleotide
  source 1..21: mol_type = other RNA
  modified_base 1: mod_base = OTHER; note = 2'-O-methylguanosine-3'- phosphorothioate
  modified_base 2: mod_base = OTHER; note = 2'-O-methyladenosine-3'- phosphorothioate
  modified_base 3: mod_base = OTHER; note = 2'-O-methyladenosine-3'-phosphate
  modified_base 4: mod_base = OTHER; note = 2'-O-methyluridine-3'-phosphate
  modified_base 5: mod_base = OTHER; note = 2'-O-methylguanosine-3'-phosphate
  modified_base 6: mod_base = OTHER; note = 2'-O-methyluridine-3'-phosphate
  modified_base 7: mod_base = OTHER; note = 2'-fluoroguanosine-3'-phosphate
  modified_base 8: mod_base = OTHER; note = 2'-O-methyladenosine-3'-phosphate
  modified_base 9: mod_base = OTHER; note = 2'-O-methyladenosine-3'-phosphate
  modified_base 10: mod_base = OTHER; note = 2'-fluoroadenosine-3'-phosphate
  modified_base 11: mod_base = OTHER; note = 2'-fluoroguanosine-3'-phosphate
  modified_base 12: mod_base = OTHER; note = 2'-O-methyluridine-3'-phosphate
  modified_base 13: mod_base = OTHER; note = 2'-O-methylcytidine-3'-phosphate
  modified_base 14: mod_base = OTHER; note = 2'-O-methyladenosine-3'-phosphate
  modified_base 15: mod_base = OTHER; note = 2'-O-methyluridine-3'-phosphate
  modified_base 16: mod_base = OTHER; note = 2'-O-methylcytidine-3'-phosphate
  modified_base 17: mod_base = OTHER; note = 2'-O-methylguanosine-3'-phosphate
  modified_base 18: mod_base = OTHER; note = 2'-O-methyladenosine-3'-phosphate
  modified_base 19: mod_base = OTHER; note = 2'-O-methylcytidine-3'-phosphate
  modified_base 20: mod_base = OTHER; note = 2'-O-methyladenosine-3'-phosphate
  modified_base 21: mod_base = OTHER; note = 2'-O-methyladenosine-3'-phosphate attached to N-[tris(N-acetylgalactosamine-alkyl)-amidodecanoyl)]-4-hydr oxyprolinol Hyp-(N-acetylgalactosamine-alkyl)3
gaatgtgaaagtcatcgacaa

SEQ ID NO: 165 - RNA, 21 nt, synthetic construct
  misc_feature 1..21: note = Description of Artificial Sequence: Synthetic oligonucleotide
  source 1..21: mol_type = other RNA
  modified_base 1: mod_base = OTHER; note = 2'-O-methylguanosine-3'- phosphorothioate
  modified_base 2: mod_base = OTHER; note = 2'-O-methyladenosine-3'- phosphorothioate
  modified_base 3: mod_base = OTHER; note = 2'-O-methyladenosine-3'-phosphate
  modified_base 4: mod_base = OTHER; note = 2'-O-methyluridine-3'-phosphate
  modified_base 5: mod_base = OTHER; note = 2'-O-methylguanosine-3'-phosphate
  modified_base 6: mod_base = OTHER; note = 2'-O-methyluridine-3'-phosphate
  modified_base 7: mod_base = OTHER; note = 2'-fluoroguanosine-3'-phosphate
  modified_base 8: mod_base = OTHER; note = 2'-O-methyladenosine-3'-phosphate
  modified_base 9: mod_base = OTHER; note = 2'-O-methyladenosine-3'-phosphate
  modified_base 10: mod_base = OTHER; note = 2'-O-methyladenosine-3'-phosphate
  modified_base 11: mod_base = OTHER; note = 2'-fluoroguanosine-3'-phosphate
  modified_base 12: mod_base = OTHER; note = 2'-O-methyluridine-3'-phosphate
  modified_base 13: mod_base = OTHER; note = 2'-O-methylcytidine-3'-phosphate
  modified_base 14: mod_base = OTHER; note = 2'-O-methyladenosine-3'-phosphate
  modified_base 15: mod_base = OTHER; note = 2'-O-methyluridine-3'-phosphate
  modified_base 16: mod_base = OTHER; note = 2'-O-methylcytidine-3'-phosphate
  modified_base 17: mod_base = OTHER; note = 2'-fluoroguanosine-3'-phosphate
  modified_base 18: mod_base = OTHER; note = 2'-O-methyladenosine-3'-phosphate
  modified_base 19: mod_base = OTHER; note = 2'-O-methylcytidine-3'-phosphate
  modified_base 20: mod_base = OTHER; note = 2'-O-methyladenosine-3'-phosphate
  modified_base 21: mod_base = OTHER; note = 2'-O-methyladenosine-3'-phosphate attached to N-[tris(N-acetylgalactosamine-alkyl)-amidodecanoyl)]-4-hydr oxyprolinol Hyp-(N-acetylgalactosamine-alkyl)3
gaatgtgaaagtcatcgacaa

SEQ ID NO: 166 - RNA, 21 nt, synthetic construct
  misc_feature 1..21: note = Description of Artificial Sequence: Synthetic oligonucleotide
  source 1..21: mol_type = other RNA
  modified_base 1: mod_base = OTHER; note = 2'-O-methylguanosine-3'- phosphorothioate
  modified_base 2: mod_base = OTHER; note = 2'-O-methyladenosine-3'- phosphorothioate
  modified_base 3: mod_base = OTHER; note = 2'-O-methyladenosine-3'-phosphate
  modified_base 4: mod_base = OTHER; note = 2'-O-methyluridine-3'-phosphate
  modified_base 5: mod_base = OTHER; note = 2'-O-methylguanosine-3'-phosphate
  modified_base 6: mod_base = OTHER; note = 2'-O-methyluridine-3'-phosphate
  modified_base 7: mod_base = OTHER; note = 2'-O-methylguanosine-3'-phosphate
  modified_base 8: mod_base = OTHER; note = 2'-O-methyladenosine-3'-phosphate
  modified_base 9: mod_base = OTHER; note = 2'-O-methyladenosine-3'-phosphate
  modified_base 10: mod_base = OTHER; note = 2'-O-methyladenosine-3'-phosphate
  modified_base 11: mod_base = OTHER; note = 2'-fluoroguanosine-3'-phosphate
  modified_base 12: mod_base = OTHER; note = 2'-O-methyluridine-3'-phosphate
  modified_base 13: mod_base = OTHER; note = 2'-O-methylcytidine-3'-phosphate
  modified_base 14: mod_base = OTHER; note = 2'-O-methyladenosine-3'-phosphate
  modified_base 15: mod_base = OTHER; note = 2'-O-methyluridine-3'-phosphate
  modified_base 16: mod_base = OTHER; note = 2'-O-methylcytidine-3'-phosphate
  modified_base 17: mod_base = OTHER; note = 2'-fluoroguanosine-3'-phosphate
  modified_base 18: mod_base = OTHER; note = 2'-O-methyladenosine-3'-phosphate
  modified_base 19: mod_base = OTHER; note = 2'-O-methylcytidine-3'-phosphate
  modified_base 20: mod_base = OTHER; note = 2'-O-methyladenosine-3'-phosphate
  modified_base 21: mod_base = OTHER; note = 2'-O-methyladenosine-3'-phosphate attached to N-[tris(N-acetylgalactosamine-alkyl)-amidodecanoyl)]-4-hydr oxyprolinol Hyp-(N-acetylgalactosamine-alkyl)3
gaatgtgaaagtcatcgacaa

SEQ ID NO: 167 - RNA, 21 nt, synthetic construct
  misc_feature 1..21: note = Description of Artificial Sequence: Synthetic oligonucleotide
  source 1..21: mol_type = other RNA
  modified_base 1: mod_base = OTHER; note = 2'-O-methylguanosine-3'- phosphorothioate
  modified_base 2: mod_base = OTHER; note = 2'-O-methyladenosine-3'- phosphorothioate
  modified_base 3: mod_base = OTHER; note = 2'-O-methyladenosine-3'-phosphate
  modified_base 4: mod_base = OTHER; note = 2'-O-methyluridine-3'-phosphate
  modified_base 5: mod_base = OTHER; note = 2'-O-methylguanosine-3'-phosphate
  modified_base 6: mod_base = OTHER; note = 2'-O-methyluridine-3'-phosphate
  modified_base 7: mod_base = OTHER; note = 2'-fluoroguanosine-3'-phosphate
  modified_base 8: mod_base = OTHER; note = 2'-O-methyladenosine-3'-phosphate
  modified_base 9: mod_base = OTHER; note = 2'-O-methyladenosine-3'-phosphate
  modified_base 10: mod_base = OTHER; note = 2'-O-methyladenosine-3'-phosphate
  modified_base 11: mod_base = OTHER; note = 2'-fluoroguanosine-3'-phosphate
  modified_base 12: mod_base = OTHER; note = 2'-O-methyluridine-3'-phosphate
  modified_base 13: mod_base = OTHER; note = 2'-O-methylcytidine-3'-phosphate
  modified_base 14: mod_base = OTHER; note = 2'-O-methyladenosine-3'-phosphate
  modified_base 15: mod_base = OTHER; note = 2'-O-methyluridine-3'-phosphate
  modified_base 16: mod_base = OTHER; note = 2'-O-methylcytidine-3'-phosphate
  modified_base 17: mod_base = OTHER; note = 2'-O-methylguanosine-3'-phosphate
  modified_base 18: mod_base = OTHER; note = 2'-O-methyladenosine-3'-phosphate
  modified_base 19: mod_base = OTHER; note = 2'-O-methylcytidine-3'-phosphate
  modified_base 20: mod_base = OTHER; note = 2'-O-methyladenosine-3'-phosphate
  modified_base 21: mod_base = OTHER; note = 2'-O-methyladenosine-3'-phosphate attached to N-[tris(N-acetylgalactosamine-alkyl)-amidodecanoyl)]-4-hydr oxyprolinol Hyp-(N-acetylgalactosamine-alkyl)3
gaatgtgaaagtcatcgacaa

SEQ ID NO: 168 - RNA, 19 nt, synthetic construct
  misc_feature 1..19: note = Description of Artificial Sequence: Synthetic oligonucleotide
  source 1..19: mol_type = other RNA
  modified_base 1: mod_base = OTHER; note = 2'-fluoroadenosine-3'-phosphorothioate
  modified_base 2: mod_base = OTHER; note = 2'-O-methyluridine-3'-phosphorothioate
  modified_base 3: mod_base = OTHER; note = 2'-fluoroguanosine-3'-phosphate
  modified_base 4: mod_base = OTHER; note = 2'-O-methyluridine-3'-phosphate
  modified_base 5: mod_base = OTHER; note = 2'-fluoroguanosine-3'-phosphate
  modified_base 6: mod_base = OTHER; note = 2'-O-methyladenosine-3'-phosphate
  modified_base 7: mod_base = OTHER; note = 2'-fluoroadenosine-3'-phosphate
  modified_base 8: mod_base = OTHER; note = 2'-fluoroadenosine-3'-phosphate
  modified_base 9: mod_base = OTHER; note = 2'-fluoroguanosine-3'-phosphate
  modified_base 10: mod_base = OTHER; note = 2'-O-methyluridine-3'-phosphate
  modified_base 11: mod_base = OTHER; note = 2'-fluorocytidine-3'-phosphate
  modified_base 12: mod_base = OTHER; note = 2'-O-methyladenosine-3'-phosphate
  modified_base 13: mod_base = OTHER; note = 2'-fluorouridine-3'-phosphate
  modified_base 14: mod_base = OTHER; note = 2'-O-methylcytidine-3'-phosphate
  modified_base 15: mod_base = OTHER; note = 2'-fluoroguanosine-3'-phosphate
  modified_base 16: mod_base = OTHER; note = 2'-O-methyladenosine-3'-phosphate
  modified_base 17: mod_base = OTHER; note = 2'-fluorocytidine-3'-phosphate
  modified_base 18: mod_base = OTHER; note = 2'-O-methyladenosine-3'-phosphate
  modified_base 19: mod_base = OTHER; note = 2'-fluoroadenosine-3'-phosphate attached to N-[tris(N-acetylgalactosamine-alkyl)-amidodecanoyl)]-4-hydr oxyprolinol Hyp-(N-acetylgalactosamine-alkyl)3
atgtgaaagtcatcgacaa

SEQ ID NO: 169 - RNA, 19 nt, synthetic construct
  misc_feature 1..19: note = Description of Artificial Sequence: Synthetic oligonucleotide
  source 1..19: mol_type = other RNA
  modified_base 1: mod_base = OTHER; note = 2'-O-methyladenosine-3'- phosphorothioate
  modified_base 2: mod_base = OTHER; note = 2'-O-methyluridine-3'-phosphorothioate
  modified_base 3: mod_base = OTHER; note = 2'-O-methylguanosine-3'-phosphate
  modified_base 4: mod_base = OTHER; note = 2'-O-methyluridine-3'-phosphate
  modified_base 5: mod_base = OTHER; note = 2'-fluoroguanosine-3'-phosphate
  modified_base 6: mod_base = OTHER; note = 2'-O-methyladenosine-3'-phosphate
  modified_base 7: mod_base = OTHER; note = 2'-fluoroadenosine-3'-phosphate
  modified_base 8: mod_base = OTHER; note = 2'-fluoroadenosine-3'-phosphate
  modified_base 9: mod_base = OTHER; note = 2'-fluoroguanosine-3'-phosphate
  modified_base 10: mod_base = OTHER; note = 2'-O-methyluridine-3'-phosphate
  modified_base 11: mod_base = OTHER; note = 2'-O-methylcytidine-3'-phosphate
  modified_base 12: mod_base = OTHER; note = 2'-O-methyladenosine-3'-phosphate
  modified_base 13: mod_base = OTHER; note = 2'-O-methyluridine-3'-phosphate
  modified_base 14: mod_base = OTHER; note = 2'-O-methylcytidine-3'-phosphate
  modified_base 15: mod_base = OTHER; note = 2'-O-methylguanosine-3'-phosphate
  modified_base 16: mod_base = OTHER; note = 2'-O-methyladenosine-3'-phosphate
  modified_base 17: mod_base = OTHER; note = 2'-O-methylcytidine-3'-phosphate
  modified_base 18: mod_base = OTHER; note = 2'-O-methyladenosine-3'-phosphate
  modified_base 19: mod_base = OTHER; note = 2'-O-methyladenosine-3'-phosphate attached to N-[tris(N-acetylgalactosamine-alkyl)-amidodecanoyl)]-4-hydr oxyprolinol Hyp-(N-acetylgalactosamine-alkyl)3
atgtgaaagtcatcgacaa

SEQ ID NO: 170 - RNA, 21 nt, synthetic construct
  misc_feature 1..21: note = Description of Artificial Sequence: Synthetic oligonucleotide
  source 1..21: mol_type = other RNA
  modified_base 1: mod_base = OTHER; note = 2'-fluoroguanosine-3'-phosphorothioate
  modified_base 2: mod_base = OTHER; note = 2'-O-methyladenosine-3'- phosphorothioate
  modified_base 3: mod_base = OTHER; note = 2'-fluoroadenosine-3'-phosphate
  modified_base 4: mod_base = OTHER; note = 2'-O-methyluridine-3'-phosphate
  modified_base 5: mod_base = OTHER; note = 2'-fluoroguanosine-3'-phosphate
  modified_base 6: mod_base = OTHER; note = 2'-O-methyluridine-3'-phosphate
  modified_base 7: mod_base = OTHER; note = 2'-fluoroguanosine-3'-phosphate
  modified_base 8: mod_base = OTHER; note = 2'-O-methyladenosine-3'-phosphate
  modified_base 9: mod_base = OTHER; note = 2'-fluoroadenosine-3'-phosphate
  modified_base 10: mod_base = OTHER; note = 2'-fluoroadenosine-3'-phosphate
  modified_base 11: mod_base = OTHER; note = 2'-fluoroguanosine-3'-phosphate
  modified_base 12: mod_base = OTHER; note = 2'-O-methyluridine-3'-phosphate
  modified_base 13: mod_base = OTHER; note = 2'-fluorocytidine-3'-phosphate
  modified_base 14: mod_base = OTHER; note = 2'-O-methyladenosine-3'-phosphate
  modified_base 15: mod_base = OTHER; note = 2'-fluorouridine-3'-phosphate
  modified_base 16: mod_base = OTHER; note = 2'-O-methylcytidine-3'-phosphate
  modified_base 17: mod_base = OTHER; note = 2'-fluoroguanosine-3'-phosphate
  modified_base 18: mod_base = OTHER; note = 2'-O-methyladenosine-3'-phosphate
  modified_base 19: mod_base = OTHER; note = 2'-fluorocytidine-3'-phosphate
  modified_base 20: mod_base = OTHER; note = 2'-O-methyladenosine-3'-phosphate
  modified_base 21: mod_base = OTHER; note = 2'-fluoroadenosine-3'-phosphate attached to N-[tris(N-acetylgalactosamine-alkyl)-amidodecanoyl)]-4-hydr oxyprolinol Hyp-(N-acetylgalactosamine-alkyl)3
gaatgtgaaagtcatcgacaa

SEQ ID NO: 171 - RNA, 21 nt, synthetic construct
  misc_feature 1..21: note = Description of Artificial Sequence: Synthetic oligonucleotide
  source 1..21: mol_type = other RNA
  modified_base 1: mod_base = OTHER; note = 2'-fluoroguanosine-3'-phosphorothioate
  modified_base 2: mod_base = OTHER; note = 2'-O-methyladenosine-3'- phosphorothioate
  modified_base 3: mod_base = OTHER; note = 2'-fluoroadenosine-3'-phosphate
  modified_base 4: mod_base = OTHER; note = 2'-O-methyluridine-3'-phosphate
  modified_base 5: mod_base = OTHER; note = 2'-fluoroguanosine-3'-phosphate
  modified_base 6: mod_base = OTHER; note = 2'-O-methyluridine-3'-phosphate
  modified_base 7: mod_base = OTHER; note = 2'-fluoroguanosine-3'-phosphate
  modified_base 8: mod_base = OTHER; note = 2'-O-methyladenosine-3'-phosphate
  modified_base 9: mod_base = OTHER; note = 2'-fluoroadenosine-3'-phosphate
  modified_base 10: mod_base = OTHER; note = 2'-fluoroadenosine-3'-phosphate
  modified_base 11: mod_base = OTHER; note = 2'-fluoroguanosine-3'-phosphate
  modified_base 12: mod_base = OTHER; note = 2'-O-methyluridine-3'-phosphate
  modified_base 13: mod_base = OTHER; note = 2'-fluorocytidine-3'-phosphate
  modified_base 14: mod_base = OTHER; note = 2'-O-methyladenosine-3'-phosphate
  modified_base 15: mod_base = OTHER; note = 2'-fluorouridine-3'-phosphate
  modified_base 16: mod_base = OTHER; note = 2'-O-methylcytidine-3'-phosphate
  modified_base 17: mod_base = OTHER; note = 2'-fluoroguanosine-3'-phosphate
  modified_base 18: mod_base = OTHER; note = 2'-O-methyladenosine-3'-phosphate
  modified_base 19: mod_base = OTHER; note = 2'-fluorocytidine-3'-phosphate
  modified_base 20: mod_base = OTHER; note = 2'-O-methyladenosine-3'-phosphate
  modified_base 21: mod_base = OTHER; note = 2'-fluoroadenosine-3'-phosphate attached to N-[tris(N-acetylgalactosamine-alkyl)-amidodecanoyl)]-4-hydr oxyprolinol Hyp-(N-acetylgalactosamine-alkyl)3
gaatgtgaaagtcatcgacaa

SEQ ID NO: 172 - RNA, 21 nt, synthetic construct
  misc_feature 1..21: note = Description of Artificial Sequence: Synthetic oligonucleotide
  source 1..21: mol_type = other RNA
  modified_base 1: mod_base = OTHER; note = 2'-fluoroguanosine-3'-phosphorothioate
  modified_base 2: mod_base = OTHER; note = 2'-O-methyladenosine-3'- phosphorothioate
  modified_base 3: mod_base = OTHER; note = 2'-fluoroadenosine-3'-phosphate
  modified_base 4: mod_base = OTHER; note = 2'-O-methyluridine-3'-phosphate
  modified_base 5: mod_base = OTHER; note = 2'-fluoroguanosine-3'-phosphate
  modified_base 6: mod_base = OTHER; note = 2'-O-methyluridine-3'-phosphate
  modified_base 7: mod_base = OTHER; note = 2'-fluoroguanosine-3'-phosphate
  modified_base 8: mod_base = OTHER; note = 2'-O-methyladenosine-3'-phosphate
  modified_base 9: mod_base = OTHER; note = 2'-fluoroadenosine-3'-phosphate
  modified_base 10: mod_base = OTHER; note = 2'-fluoroadenosine-3'-phosphate
  modified_base 11: mod_base = OTHER; note = 2'-fluoroguanosine-3'-phosphate
  modified_base 12: mod_base = OTHER; note = 2'-O-methyluridine-3'-phosphate
  modified_base 13: mod_base = OTHER; note = 2'-fluorocytidine-3'-phosphate
  modified_base 14: mod_base = OTHER; note = 2'-O-methyladenosine-3'-phosphate
  modified_base 15: mod_base = OTHER; note = 2'-fluorouridine-3'-phosphate
  modified_base 16: mod_base = OTHER; note = 2'-O-methylcytidine-3'-phosphate
  modified_base 17: mod_base = OTHER; note = 2'-fluoroguanosine-3'-phosphate
  modified_base 18: mod_base = OTHER; note = 2'-O-methyladenosine-3'-phosphate
  modified_base 19: mod_base = OTHER; note = 2'-fluorocytidine-3'-phosphate
  modified_base 20: mod_base = OTHER; note = 2'-O-methyladenosine-3'-phosphate
  modified_base 21: mod_base = OTHER; note = 2'-fluoroadenosine-3'-phosphate attached to N-[tris(N-acetylgalactosamine-alkyl)-amidodecanoyl)]-4-hydr oxyprolinol Hyp-(N-acetylgalactosamine-alkyl)3
gaatgtgaaagtcatcgacaa

SEQ ID NO: 173 - RNA, 21 nt, synthetic construct
  misc_feature 1..21: note = Description of Artificial Sequence: Synthetic oligonucleotide
  source 1..21: mol_type = other RNA
  modified_base 1: mod_base = OTHER; note = 2'-fluoroguanosine-3'-phosphorothioate
  modified_base 2: mod_base = OTHER; note = 2'-O-methyladenosine-3'- phosphorothioate
  modified_base 3: mod_base = OTHER; note = 2'-fluoroadenosine-3'-phosphate
  modified_base 4: mod_base = OTHER; note = 2'-O-methyluridine-3'-phosphate
  modified_base 5: mod_base = OTHER; note = 2'-fluoroguanosine-3'-phosphate
  modified_base 6: mod_base = OTHER; note = 2'-O-methyluridine-3'-phosphate
  modified_base 7: mod_base = OTHER; note = 2'-fluoroguanosine-3'-phosphate
  modified_base 8: mod_base = OTHER; note = 2'-O-methyladenosine-3'-phosphate
  modified_base 9: mod_base = OTHER; note = 2'-fluoroadenosine-3'-phosphate
  modified_base 10: mod_base = OTHER; note = 2'-fluoroadenosine-3'-phosphate
  modified_base 11: mod_base = OTHER; note = 2'-fluoroguanosine-3'-phosphate
  modified_base 12: mod_base = OTHER; note = 2'-O-methyluridine-3'-phosphate
  modified_base 13: mod_base = OTHER; note = 2'-fluorocytidine-3'-phosphate
  modified_base 14: mod_base = OTHER; note = 2'-O-methyladenosine-3'-phosphate
  modified_base 15: mod_base = OTHER; note = 2'-fluorouridine-3'-phosphate
  modified_base 16: mod_base = OTHER; note = 2'-O-methylcytidine-3'-phosphate
  modified_base 17: mod_base = OTHER; note = 2'-fluoroguanosine-3'-phosphate
  modified_base 18: mod_base = OTHER; note = 2'-O-methyladenosine-3'-phosphate
  modified_base 19: mod_base = OTHER; note = 2'-fluorocytidine-3'-phosphate
  modified_base 20: mod_base = OTHER; note = 2'-O-methyladenosine-3'-phosphate
  modified_base 21: mod_base = OTHER; note = 2'-fluoroadenosine-3'-phosphate attached to N-[tris(N-acetylgalactosamine-alkyl)-amidodecanoyl)]-4-hydr oxyprolinol Hyp-(N-acetylgalactosamine-alkyl)3
gaatgtgaaagtcatcgacaa

SEQ ID NO: 174 - RNA, 21 nt, synthetic construct
  misc_feature 1..21: note = Description of Artificial Sequence: Synthetic oligonucleotide
  source 1..21: mol_type = other RNA
  modified_base 1: mod_base = OTHER; note = 2'-fluoroguanosine-3'-phosphorothioate
  modified_base 2: mod_base = OTHER; note = 2'-O-methyladenosine-3'- phosphorothioate
  modified_base 3: mod_base = OTHER; note = 2'-fluoroadenosine-3'-phosphate
  modified_base 4: mod_base = OTHER; note = 2'-O-methyluridine-3'-phosphate
  modified_base 5: mod_base = OTHER; note = 2'-fluoroguanosine-3'-phosphate
  modified_base 6: mod_base = OTHER; note = 2'-O-methyluridine-3'-phosphate
  modified_base 7: mod_base = OTHER; note = 2'-fluoroguanosine-3'-phosphate
  modified_base 8: mod_base = OTHER; note = 2'-O-methyladenosine-3'-phosphate
  modified_base 9: mod_base = OTHER; note = 2'-fluoroadenosine-3'-phosphate
  modified_base 10: mod_base = OTHER; note = 2'-fluoroadenosine-3'-phosphate
  modified_base 11: mod_base = OTHER; note = 2'-fluoroguanosine-3'-phosphate
  modified_base 12: mod_base = OTHER; note = 2'-O-methyluridine-3'-phosphate
  modified_base 13: mod_base = OTHER; note = 2'-fluorocytidine-3'-phosphate
  modified_base 14: mod_base = OTHER; note = 2'-O-methyladenosine-3'-phosphate
  modified_base 15: mod_base = OTHER; note = 2'-fluorouridine-3'-phosphate
  modified_base 16: mod_base = OTHER; note = 2'-O-methylcytidine-3'-phosphate
  modified_base 17: mod_base = OTHER; note = 2'-fluoroguanosine-3'-phosphate
  modified_base 18: mod_base = OTHER; note = 2'-O-methyladenosine-3'-phosphate
  modified_base 19: mod_base = OTHER; note = 2'-fluorocytidine-3'-phosphate
  modified_base 20: mod_base = OTHER; note = 2'-O-methyladenosine-3'-phosphate
  modified_base 21: mod_base = OTHER; note = 2'-fluoroadenosine-3'-phosphate attached to N-[tris(N-acetylgalactosamine-alkyl)-amidodecanoyl)]-4-hydr oxyprolinol Hyp-(N-acetylgalactosamine-alkyl)3
gaatgtgaaagtcatcgacaa

SEQ ID NO: 175 - RNA, 21 nt, synthetic construct
  misc_feature 1..21: note = Description of Artificial Sequence: Synthetic oligonucleotide
  source 1..21: mol_type = other RNA
  modified_base 1: mod_base = OTHER; note = 2'-O-methylguanosine-3'- phosphorothioate
  modified_base 2: mod_base = OTHER; note = 2'-O-methyladenosine-3'- phosphorothioate
  modified_base 3: mod_base = OTHER; note = 2'-O-methyladenosine-3'-phosphate
  modified_base 4: mod_base = OTHER; note = 2'-O-methyluridine-3'-phosphate
  modified_base 5: mod_base = OTHER; note = 2'-O-methylguanosine-3'-phosphate
  modified_base 6: mod_base = OTHER; note = 2'-O-methyluridine-3'-phosphate
  modified_base 7: mod_base = OTHER; note = 2'-fluoroguanosine-3'-phosphate
  modified_base 8: mod_base = OTHER; note = 2'-O-methyladenosine-3'-phosphate
  modified_base 9: mod_base = OTHER; note = 2'-fluoroadenosine-3'-phosphate
  modified_base 10: mod_base = OTHER; note = 2'-fluoroadenosine-3'-phosphate
  modified_base 11: mod_base = OTHER; note = 2'-fluoroguanosine-3'-phosphate
  modified_base 12: mod_base = OTHER; note = 2'-O-methyluridine-3'-phosphate
  modified_base 13: mod_base = OTHER; note = 2'-O-methylcytidine-3'-phosphate
  modified_base 14: mod_base = OTHER; note = 2'-O-methyladenosine-3'-phosphate
  modified_base 15: mod_base = OTHER; note = 2'-O-methyluridine-3'-phosphate
  modified_base 16: mod_base = OTHER; note = 2'-O-methylcytidine-3'-phosphate
  modified_base 17: mod_base = OTHER; note = 2'-O-methylguanosine-3'-phosphate
  modified_base 18: mod_base = OTHER; note = 2'-O-methyladenosine-3'-phosphate
  modified_base 19: mod_base = OTHER; note = 2'-O-methylcytidine-3'-phosphate
  modified_base 20: mod_base = OTHER; note = 2'-O-methyladenosine-3'-phosphate
  modified_base 21: mod_base = OTHER; note = 2'-O-methyladenosine-3'-phosphate attached to N-[tris(N-acetylgalactosamine-alkyl)-amidodecanoyl)]-4-hydr oxyprolinol Hyp-(N-acetylgalactosamine-alkyl)3
gaatgtgaaagtcatcgacaa

SEQ ID NO: 176 - RNA, 21 nt, synthetic construct
  misc_feature 1..21: note = Description of Artificial Sequence: Synthetic oligonucleotide
  source 1..21: mol_type = other RNA
  modified_base 1: mod_base = OTHER; note = 2'-O-methylguanosine-3'- phosphorothioate
  modified_base 2: mod_base = OTHER; note = 2'-O-methyladenosine-3'- phosphorothioate
  modified_base 3: mod_base = OTHER; note = 2'-O-methyladenosine-3'-phosphate
  modified_base 4: mod_base = OTHER; note = 2'-O-methyluridine-3'-phosphate
  modified_base 5: mod_base = OTHER; note = 2'-O-methylguanosine-3'-phosphate
  modified_base 6: mod_base = OTHER; note = 2'-O-methyluridine-3'-phosphate
  modified_base 7: mod_base = OTHER; note = 2'-fluoroguanosine-3'-phosphate
  modified_base 8: mod_base = OTHER; note = 2'-O-methyladenosine-3'-phosphate
  modified_base 9: mod_base = OTHER; note = 2'-fluoroadenosine-3'-phosphate
  modified_base 10: mod_base = OTHER; note = 2'-fluoroadenosine-3'-phosphate
  modified_base 11: mod_base = OTHER; note = 2'-fluoroguanosine-3'-phosphate
  modified_base 12: mod_base = OTHER; note = 2'-O-methyluridine-3'-phosphate
  modified_base 13: mod_base = OTHER; note = 2'-O-methylcytidine-3'-phosphate
  modified_base 14: mod_base = OTHER; note = 2'-O-methyladenosine-3'-phosphate
  modified_base 15: mod_base = OTHER; note = 2'-O-methyluridine-3'-phosphate
  modified_base 16: mod_base = OTHER; note = 2'-O-methylcytidine-3'-phosphate
  modified_base 17: mod_base = OTHER; note = 2'-O-methylguanosine-3'-phosphate
  modified_base 18: mod_base = OTHER; note = 2'-O-methyladenosine-3'-phosphate
  modified_base 19: mod_base = OTHER; note = 2'-O-methylcytidine-3'-phosphate
  modified_base 20: mod_base = OTHER; note = 2'-O-methyladenosine-3'-phosphate
  modified_base 21: mod_base = OTHER; note = 2'-O-methyladenosine-3'-phosphate attached to N-[tris(N-acetylgalactosamine-alkyl)-amidodecanoyl)]-4-hydr oxyprolinol Hyp-(N-acetylgalactosamine-alkyl)3
gaatgtgaaagtcatcgacaa

SEQ ID NO: 177 - RNA, 21 nt, synthetic construct
  misc_feature 1..21: note = Description of Artificial Sequence: Synthetic oligonucleotide
  source 1..21: mol_type = other RNA
  modified_base 1: mod_base = OTHER; note = 2'-O-methylguanosine-3'- phosphorothioate
  modified_base 2: mod_base = OTHER; note = 2'-O-methyladenosine-3'- phosphorothioate
  modified_base 3: mod_base = OTHER; note = 2'-O-methyladenosine-3'-phosphate
  modified_base 4: mod_base = OTHER; note = 2'-O-methyluridine-3'-phosphate
  modified_base 5: mod_base = OTHER; note = 2'-O-methylguanosine-3'-phosphate
  modified_base 6: mod_base = OTHER; note = 2'-O-methyluridine-3'-phosphate
  modified_base 7: mod_base = OTHER; note = 2'-fluoroguanosine-3'-phosphate
  modified_base 8: mod_base = OTHER; note = 2'-O-methyladenosine-3'-phosphate
  modified_base 9: mod_base = OTHER; note = 2'-O-methyladenosine-3'-phosphate
  modified_base 10: mod_base = OTHER; note = 2'-fluoroadenosine-3'-phosphate
  modified_base 11: mod_base = OTHER; note = 2'-fluoroguanosine-3'-phosphate
  modified_base 12: mod_base = OTHER; note = 2'-O-methyluridine-3'-phosphate
  modified_base 13: mod_base = OTHER; note = 2'-O-methylcytidine-3'-phosphate
  modified_base 14: mod_base = OTHER; note = 2'-O-methyladenosine-3'-phosphate
  modified_base 15: mod_base = OTHER; note = 2'-O-methyluridine-3'-phosphate
  modified_base 16: mod_base = OTHER; note = 2'-O-methylcytidine-3'-phosphate
  modified_base 17: mod_base = OTHER; note = 2'-O-methylguanosine-3'-phosphate
  modified_base 18: mod_base = OTHER; note = 2'-O-methyladenosine-3'-phosphate
  modified_base 19: mod_base = OTHER; note = 2'-O-methylcytidine-3'-phosphate
  modified_base 20: mod_base = OTHER; note = 2'-O-methyladenosine-3'-phosphate
  modified_base 21: mod_base = OTHER; note = 2'-O-methyladenosine-3'-phosphate attached to N-[tris(N-acetylgalactosamine-alkyl)-amidodecanoyl)]-4-hydr oxyprolinol Hyp-(N-acetylgalactosamine-alkyl)3
gaatgtgaaagtcatcgacaa

SEQ ID NO: 178 - RNA, 21 nt, synthetic construct
  misc_feature 1..21: note = Description of Artificial Sequence: Synthetic oligonucleotide
  source 1..21: mol_type = other RNA
  modified_base 1: mod_base = OTHER; note = 2'-O-methylguanosine-3'- phosphorothioate
  modified_base 2: mod_base = OTHER; note = 2'-O-methyladenosine-3'- phosphorothioate
  modified_base 3: mod_base = OTHER; note = 2'-O-methyladenosine-3'-phosphate
  modified_base 4: mod_base = OTHER; note = 2'-O-methyluridine-3'-phosphate
  modified_base 5: mod_base = OTHER; note = 2'-O-methylguanosine-3'-phosphate
  modified_base 6: mod_base = OTHER; note = 2'-O-methyluridine-3'-phosphate
  modified_base 7: mod_base = OTHER; note = 2'-fluoroguanosine-3'-phosphate
  modified_base 8: mod_base = OTHER; note = 2'-O-methyladenosine-3'-phosphate
  modified_base 9: mod_base = OTHER; note = 2'-O-methyladenosine-3'-phosphate
  modified_base 10: mod_base = OTHER; note = 2'-fluoroadenosine-3'-phosphate
  modified_base 11: mod_base = OTHER; note = 2'-fluoroguanosine-3'-phosphate
  modified_base 12: mod_base = OTHER; note = 2'-O-methyluridine-3'-phosphate
  modified_base 13: mod_base = OTHER; note = 2'-O-methylcytidine-3'-phosphate
  modified_base 14: mod_base = OTHER; note = 2'-O-methyladenosine-3'-phosphate
  modified_base 15: mod_base = OTHER; note = 2'-O-methyluridine-3'-phosphate
  modified_base 16: mod_base = OTHER; note = 2'-O-methylcytidine-3'-phosphate
  modified_base 17: mod_base = OTHER; note = 2'-O-methylguanosine-3'-phosphate
  modified_base 18: mod_base = OTHER; note = 2'-O-methyladenosine-3'-phosphate
  modified_base 19: mod_base = OTHER; note = 2'-O-methylcytidine-3'-phosphate
  modified_base 20: mod_base = OTHER; note = 2'-O-methyladenosine-3'-phosphate
  modified_base 21: mod_base = OTHER; note = 2'-O-methyladenosine-3'-phosphate attached to N-[tris(N-acetylgalactosamine-alkyl)-amidodecanoyl)]-4-hydr oxyprolinol Hyp-(N-acetylgalactosamine-alkyl)3
gaatgtgaaagtcatcgacaa

SEQ ID NO: 179 - RNA, 21 nt, synthetic construct
  misc_feature 1..21: note = Description of Artificial Sequence: Synthetic oligonucleotide
  source 1..21: mol_type = other RNA
  modified_base 1: mod_base = OTHER; note = 2'-O-methylguanosine-3'- phosphorothioate
  modified_base 2: mod_base = OTHER; note = 2'-O-methyladenosine-3'- phosphorothioate
  modified_base 3: mod_base = OTHER; note = 2'-O-methyladenosine-3'-phosphate
  modified_base 4: mod_base = OTHER; note = 2'-O-methyluridine-3'-phosphate
  modified_base 5: mod_base = OTHER; note = 2'-O-methylguanosine-3'-phosphate
  modified_base 6: mod_base = OTHER; note = 2'-O-methyluridine-3'-phosphate
  modified_base 7: mod_base = OTHER; note = 2'-fluoroguanosine-3'-phosphate
  modified_base 8: mod_base = OTHER; note = 2'-O-methyladenosine-3'-phosphate
  modified_base 9: mod_base = OTHER; note = 2'-O-methyladenosine-3'-phosphate
  modified_base 10: mod_base = OTHER; note = 2'-fluoroadenosine-3'-phosphate
  modified_base 11: mod_base = OTHER; note = 2'-fluoroguanosine-3'-phosphate
  modified_base 12: mod_base = OTHER; note = 2'-O-methyluridine-3'-phosphate
  modified_base 13: mod_base = OTHER; note = 2'-O-methylcytidine-3'-phosphate
  modified_base 14: mod_base = OTHER; note = 2'-O-methyladenosine-3'-phosphate
  modified_base 15: mod_base = OTHER; note = 2'-O-methyluridine-3'-phosphate
  modified_base 16: mod_base = OTHER; note = 2'-O-methylcytidine-3'-phosphate
  modified_base 17: mod_base = OTHER; note = 2'-O-methylguanosine-3'-phosphate
  modified_base 18: mod_base = OTHER; note = 2'-O-methyladenosine-3'-phosphate
  modified_base 19: mod_base = OTHER; note = 2'-O-methylcytidine-3'-phosphate
  modified_base 20: mod_base = OTHER; note = 2'-O-methyladenosine-3'-phosphate
  modified_base 21: mod_base = OTHER; note = 2'-O-methyladenosine-3'-phosphate attached to N-[tris(N-acetylgalactosamine-alkyl)-amidodecanoyl)]-4-hydr oxyprolinol Hyp-(N-acetylgalactosamine-alkyl)3
gaatgtgaaagtcatcgacaa

SEQ ID NO: 180 - RNA, 21 nt, synthetic construct
  misc_feature 1..21: note = Description of Artificial Sequence: Synthetic oligonucleotide
  source 1..21: mol_type = other RNA
  modified_base 1: mod_base = OTHER; note = 2'-O-methylguanosine-3'- phosphorothioate
  modified_base 2: mod_base = OTHER; note = 2'-O-methyladenosine-3'- phosphorothioate
  modified_base 3: mod_base = OTHER; note = 2'-O-methyladenosine-3'-phosphate
  modified_base 4: mod_base = OTHER; note = 2'-O-methyluridine-3'-phosphate
  modified_base 5: mod_base = OTHER; note = 2'-O-methylguanosine-3'-phosphate
  modified_base 6: mod_base = OTHER; note = 2'-O-methyluridine-3'-phosphate
  modified_base 7: mod_base = OTHER; note = 2'-O-methylguanosine-3'-phosphate
  modified_base 8: mod_base = OTHER; note = 2'-O-methyladenosine-3'-phosphate
  modified_base 9: mod_base = OTHER; note = 2'-O-methyladenosine-3'-phosphate
  modified_base 10: mod_base = OTHER; note = 2'-O-methyladenosine-3'-phosphate
  modified_base 11: mod_base = OTHER; note = 2'-O-methylguanosine-3'-phosphate
  modified_base 12: mod_base = OTHER; note = 2'-O-methyluridine-3'-phosphate
  modified_base 13: mod_base = OTHER; note = 2'-O-methylcytidine-3'-phosphate
  modified_base 14: mod_base = OTHER; note = 2'-O-methyladenosine-3'-phosphate
  modified_base 15: mod_base = OTHER; note = 2'-O-methyluridine-3'-phosphate
  modified_base 16: mod_base = OTHER; note = Cytidine-glycol nucleic acid (GNA)
  modified_base 17: mod_base = OTHER; note = 2'-O-methylguanosine-3'-phosphate
  modified_base 18: mod_base = OTHER; note = 2'-O-methyladenosine-3'-phosphate
  modified_base 19: mod_base = OTHER; note = 2'-O-methylcytidine-3'-phosphate
  modified_base 20: mod_base = OTHER; note = 2'-O-methyladenosine-3'-phosphate
  modified_base 21: mod_base = OTHER; note = 2'-O-methyladenosine-3'-phosphate attached to N-[tris(N-acetylgalactosamine-alkyl)-amidodecanoyl)]-4-hydr oxyprolinol Hyp-(N-acetylgalactosamine-alkyl)3
gaatgtgaaagtcatcgacaa

SEQ ID NO: 181 - DNA, 21 bp, synthetic construct
  misc_feature 1..21: note = Description of Artificial Sequence: Synthetic oligonucleotide
  source 1..21: mol_type = other DNA
  modified_base 1: mod_base = OTHER; note = 2'-O-methylguanosine-3'- phosphorothioate
  modified_base 2: mod_base = OTHER; note = 2'-O-methyladenosine-3'- phosphorothioate
  modified_base 3: mod_base = OTHER; note = 2'-O-methyladenosine-3'-phosphate
  modified_base 4: mod_base = OTHER; note = 2'-O-methyluridine-3'-phosphate
  modified_base 5: mod_base = OTHER; note = 2'-O-methylguanosine-3'-phosphate
  modified_base 7: mod_base = OTHER; note = 2'-O-methylguanosine-3'-phosphate
  modified_base 8: mod_base = OTHER; note = 2'-O-methyladenosine-3'-phosphate
  modified_base 9: mod_base = OTHER; note = 2'-O-methyladenosine-3'-phosphate
  modified_base 10: mod_base = OTHER; note = 2'-O-methyladenosine-3'-phosphate
  modified_base 11: mod_base = OTHER; note = 2'-O-methylguanosine-3'-phosphate
  modified_base 12: mod_base = OTHER; note = 2'-O-methyluridine-3'-phosphate
  modified_base 13: mod_base = OTHER; note = 2'-O-methylcytidine-3'-phosphate
  modified_base 14: mod_base = OTHER; note = 2'-O-methyladenosine-3'-phosphate
  modified_base 15: mod_base = OTHER; note = 2'-O-methyluridine-3'-phosphate
  modified_base 16: mod_base = OTHER; note = Cytidine-glycol nucleic acid (GNA)
  modified_base 17: mod_base = OTHER; note = 2'-O-methylguanosine-3'-phosphate
  modified_base 18: mod_base = OTHER; note = 2'-O-methyladenosine-3'-phosphate
  modified_base 19: mod_base = OTHER; note = 2'-O-methylcytidine-3'-phosphate
  modified_base 20: mod_base = OTHER; note = 2'-O-methyladenosine-3'-phosphate
  modified_base 21: mod_base = OTHER; note = 2'-O-methyladenosine-3'-phosphate attached to N-[tris(N-acetylgalactosamine-alkyl)-amidodecanoyl)]-4-hydr oxyprolinol Hyp-(N-acetylgalactosamine-alkyl)3
  misc_feature 1..5: note = RNA
  misc_feature 6: note = DNA
  misc_feature 7..21: note = RNA
gaatgtgaaagtcatcgacaa

SEQ ID NO: 182 - DNA, 21 bp, synthetic construct
  misc_feature 1..21: note = Description of Artificial Sequence: Synthetic oligonucleotide
  source 1..21: mol_type = other DNA
  modified_base 1: mod_base = OTHER; note = 2'-O-methylguanosine-3'- phosphorothioate
  modified_base 2: mod_base = OTHER; note = 2'-O-methyladenosine-3'- phosphorothioate
  modified_base 3: mod_base = OTHER; note = 2'-O-methyladenosine-3'-phosphate
  modified_base 4: mod_base = OTHER; note = 2'-O-methyluridine-3'-phosphate
  modified_base 6: mod_base = OTHER; note = 2'-O-methyluridine-3'-phosphate
  modified_base 7: mod_base = OTHER; note = 2'-O-methylguanosine-3'-phosphate
  modified_base 8: mod_base = OTHER; note = 2'-O-methyladenosine-3'-phosphate
  modified_base 9: mod_base = OTHER; note = 2'-O-methyladenosine-3'-phosphate
  modified_base 10: mod_base = OTHER; note = 2'-O-methyladenosine-3'-phosphate
  modified_base 12: mod_base = OTHER; note = 2'-O-methyluridine-3'-phosphate
  modified_base 13: mod_base = OTHER; note = 2'-O-methylcytidine-3'-phosphate
  modified_base 14: mod_base = OTHER; note = 2'-O-methyladenosine-3'-phosphate
  modified_base 15: mod_base = OTHER; note = 2'-O-methyluridine-3'-phosphate
  modified_base 16: mod_base = OTHER; note = Cytidine-glycol nucleic acid (GNA)
  modified_base 17: mod_base = OTHER; note = 2'-O-methylguanosine-3'-phosphate
  modified_base 18: mod_base = OTHER; note = 2'-O-methyladenosine-3'-phosphate
  modified_base 19: mod_base = OTHER; note = 2'-O-methylcytidine-3'-phosphate
  modified_base 20: mod_base = OTHER; note = 2'-O-methyladenosine-3'-phosphate
  modified_base 21: mod_base = OTHER; note = 2'-O-methyladenosine-3'-phosphate attached to N-[tris(N-acetylgalactosamine-alkyl)-amidodecanoyl)]-4-hydr oxyprolinol Hyp-(N-acetylgalactosamine-alkyl)3
  misc_feature 1..4: note = RNA
  misc_feature 5: note = DNA
  misc_feature 6..10: note = RNA
  misc_feature 11: note = DNA
  misc_feature 12..21: note = RNA
gaatgtgaaagtcatcgacaa

SEQ ID NO: 183 - DNA, 21 bp, synthetic construct
  misc_feature 1..21: note = Description of Artificial Sequence: Synthetic oligonucleotide
  source 1..21: mol_type = other DNA
  modified_base 1: mod_base = OTHER; note = 2'-O-methylguanosine-3'- phosphorothioate
  modified_base 2: mod_base = OTHER; note = 2'-O-methyladenosine-3'- phosphorothioate
  modified_base 3: mod_base = OTHER; note = 2'-O-methyladenosine-3'-phosphate
  modified_base 4: mod_base = OTHER; note = 2'-O-methyluridine-3'-phosphate
  modified_base 5: mod_base = OTHER; note = 2'-O-methylguanosine-3'-phosphate
  modified_base 7: mod_base = OTHER; note = 2'-O-methylguanosine-3'-phosphate
  modified_base 8: mod_base = OTHER; note = 2'-O-methyladenosine-3'-phosphate
  modified_base 9: mod_base = OTHER; note = 2'-O-methyladenosine-3'-phosphate
  modified_base 10: mod_base = OTHER; note = 2'-O-methyladenosine-3'-phosphate
  modified_base 12: mod_base = OTHER; note = 2'-O-methyluridine-3'-phosphate
  modified_base 13: mod_base = OTHER; note = 2'-O-methylcytidine-3'-phosphate
  modified_base 14: mod_base = OTHER; note = 2'-O-methyladenosine-3'-phosphate
  modified_base 15: mod_base = OTHER; note = 2'-O-methyluridine-3'-phosphate
  modified_base 16: mod_base = OTHER; note = Cytidine-glycol nucleic acid (GNA)
  modified_base 17: mod_base = OTHER; note = 2'-O-methylguanosine-3'-phosphate
  modified_base 18: mod_base = OTHER; note = 2'-O-methyladenosine-3'-phosphate
  modified_base 19: mod_base = OTHER; note = 2'-O-methylcytidine-3'-phosphate
  modified_base 20: mod_base = OTHER; note = 2'-O-methyladenosine-3'-phosphate
  modified_base 21: mod_base = OTHER; note = 2'-O-methyladenosine-3'-phosphate attached to N-[tris(N-acetylgalactosamine-alkyl)-amidodecanoyl)]-4-hydr oxyprolinol Hyp-(N-acetylgalactosamine-alkyl)3
  misc_feature 1..5: note = RNA
  misc_feature 6: note = DNA
  misc_feature 7..10: note = RNA
  misc_feature 11: note = DNA
  misc_feature 12..21: note = RNA
gaatgtgaaagtcatcgacaa

SEQ ID NO: 184 - DNA, 21 bp, synthetic construct
  misc_feature 1..21: note = Description of Artificial Sequence: Synthetic oligonucleotide
  source 1..21: mol_type = other DNA
  modified_base 1: mod_base = OTHER; note = 2'-O-methylguanosine-3'- phosphorothioate
  modified_base 2: mod_base = OTHER; note = 2'-O-methyladenosine-3'- phosphorothioate
  modified_base 3: mod_base = OTHER; note = 2'-O-methyladenosine-3'-phosphate
  modified_base 4: mod_base = OTHER; note = 2'-O-methyluridine-3'-phosphate
  modified_base 5: mod_base = OTHER; note = 2'-O-methylguanosine-3'-phosphate
  modified_base 6: mod_base = OTHER; note = 2'-O-methyluridine-3'-phosphate
  modified_base 8: mod_base = OTHER; note = 2'-O-methyladenosine-3'-phosphate
  modified_base 9: mod_base = OTHER; note = 2'-O-methyladenosine-3'-phosphate
  modified_base 10: mod_base = OTHER; note = 2'-O-methyladenosine-3'-phosphate
  modified_base 12: mod_base = OTHER; note = 2'-O-methyluridine-3'-phosphate
  modified_base 13: mod_base = OTHER; note = 2'-O-methylcytidine-3'-phosphate
  modified_base 14: mod_base = OTHER; note = 2'-O-methyladenosine-3'-phosphate
  modified_base 15: mod_base = OTHER; note = 2'-O-methyluridine-3'-phosphate
  modified_base 16: mod_base = OTHER; note = Cytidine-glycol nucleic acid (GNA)
  modified_base 17: mod_base = OTHER; note = 2'-O-methylguanosine-3'-phosphate
  modified_base 18: mod_base = OTHER; note = 2'-O-methyladenosine-3'-phosphate
  modified_base 19: mod_base = OTHER; note = 2'-O-methylcytidine-3'-phosphate
  modified_base 20: mod_base = OTHER; note = 2'-O-methyladenosine-3'-phosphate
  modified_base 21: mod_base = OTHER; note = 2'-O-methyladenosine-3'-phosphate attached to N-[tris(N-acetylgalactosamine-alkyl)-amidodecanoyl)]-4-hydr oxyprolinol Hyp-(N-acetylgalactosamine-alkyl)3
  misc_feature 1..6: note = RNA
  misc_feature 7: note = DNA
  misc_feature 8..10: note = RNA
  misc_feature 11: note = DNA
  misc_feature 12..21: note = RNA
gaatgtgaaagtcatcgacaa

SEQ ID NO: 185 - DNA, 21 bp, synthetic construct
  misc_feature 1..21: note = Description of Artificial Sequence: Synthetic oligonucleotide
  source 1..21: mol_type = other DNA
  modified_base 1: mod_base = OTHER; note = 2'-O-methylguanosine-3'- phosphorothioate
  modified_base 2: mod_base = OTHER; note = 2'-O-methyladenosine-3'- phosphorothioate
  modified_base 3: mod_base = OTHER; note = 2'-O-methyladenosine-3'-phosphate
  modified_base 4: mod_base = OTHER; note = 2'-O-methyluridine-3'-phosphate
  modified_base 5: mod_base = OTHER; note = 2'-O-methylguanosine-3'-phosphate
  modified_base 6: mod_base = OTHER; note = 2'-O-methyluridine-3'-phosphate
  modified_base 7: mod_base = OTHER; note = 2'-O-methylguanosine-3'-phosphate
  modified_base 8: mod_base = OTHER; note = 2'-O-methyladenosine-3'-phosphate
  modified_base 9: mod_base = OTHER; note = 2'-O-methyladenosine-3'-phosphate
  modified_base 10: mod_base = OTHER; note = 2'-O-methyladenosine-3'-phosphate
  modified_base 12: mod_base = OTHER; note = 2'-O-methyluridine-3'-phosphate
  modified_base 13: mod_base = OTHER; note = 2'-O-methylcytidine-3'-phosphate
  modified_base 14: mod_base = OTHER; note = 2'-O-methyladenosine-3'-phosphate
  modified_base 15: mod_base = OTHER; note = 2'-O-methyluridine-3'-phosphate
  modified_base 16: mod_base = OTHER; note = 2'-O-methylcytidine-3'-phosphate
  modified_base 18: mod_base = OTHER; note = 2'-O-methyladenosine-3'-phosphate
  modified_base 19: mod_base = OTHER; note = 2'-O-methylcytidine-3'-phosphate
  modified_base 20: mod_base = OTHER; note = 2'-O-methyladenosine-3'-phosphate
  modified_base 21: mod_base = OTHER; note = 2'-O-methyladenosine-3'-phosphate attached to N-[tris(N-acetylgalactosamine-alkyl)-amidodecanoyl)]-4-hydr oxyprolinol Hyp-(N-acetylgalactosamine-alkyl)3
  misc_feature 1..10: note = RNA
  misc_feature 11: note = DNA
  misc_feature 12..16: note = RNA
  misc_feature 17: note = DNA
  misc_feature 18..21: note = RNA
gaatgtgaaagtcatcgacaa

SEQ ID NO: 186 - DNA, 21 bp, synthetic construct
  misc_feature 1..21: note = Description of Artificial Sequence: Synthetic oligonucleotide
  source 1..21: mol_type = other DNA
  modified_base 1: mod_base = OTHER; note = 2'-O-methylguanosine-3'- phosphorothioate
  modified_base 2: mod_base = OTHER; note = 2'-O-methyladenosine-3'- phosphorothioate
  modified_base 3: mod_base = OTHER; note = 2'-O-methyladenosine-3'-phosphate
  modified_base 4: mod_base = OTHER; note = 2'-O-methyluridine-3'-phosphate
  modified_base 5: mod_base = OTHER; note = 2'-O-methylguanosine-3'-phosphate
  modified_base 6: mod_base = OTHER; note = 2'-O-methyluridine-3'-phosphate
  modified_base 7: mod_base = OTHER; note = 2'-O-methylguanosine-3'-phosphate
  modified_base 8: mod_base = OTHER; note = 2'-O-methyladenosine-3'-phosphate
  modified_base 9: mod_base = OTHER; note = 2'-O-methyladenosine-3'-phosphate
  modified_base 10: mod_base = OTHER; note = 2'-O-methyladenosine-3'-phosphate
  modified_base 12: mod_base = OTHER; note = 2'-O-methyluridine-3'-phosphate
  modified_base 13: mod_base = OTHER; note = 2'-O-methylcytidine-3'-phosphate
  modified_base 14: mod_base = OTHER; note = 2'-O-methyladenosine-3'-phosphate
  modified_base 15: mod_base = OTHER; note = 2'-O-methyluridine-3'-phosphate
  modified_base 16: mod_base = OTHER; note = 2'-O-methylcytidine-3'-phosphate
  modified_base 18: mod_base = OTHER; note = 2'-O-methyladenosine-3'-phosphate
  modified_base 19: mod_base = OTHER; note = 2'-O-methylcytidine-3'-phosphate
  modified_base 20: mod_base = OTHER; note = 2'-O-methyladenosine-3'-phosphate
  modified_base 21: mod_base = OTHER; note = 2'-O-methyladenosine-3'-phosphate attached to N-[tris(N-acetylgalactosamine-alkyl)-amidodecanoyl)]-4-hydr oxyprolinol Hyp-(N-acetylgalactosamine-alkyl)3
  misc_feature 1..10: note = RNA
  misc_feature 11: note = DNA
  misc_feature 12..16: note = RNA
  misc_feature 17: note = DNA
  misc_feature 18..21: note = RNA
gaatgtgaaagtcatctacaa

SEQ ID NO: 187 - DNA, 21 bp, synthetic construct
  misc_feature 1..21: note = Description of Artificial Sequence: Synthetic oligonucleotide
  source 1..21: mol_type = other DNA
  modified_base 1: mod_base = OTHER; note = 2'-O-methylguanosine-3'- phosphorothioate
  modified_base 2: mod_base = OTHER; note = 2'-O-methyladenosine-3'- phosphorothioate
  modified_base 3: mod_base = OTHER; note = 2'-O-methyladenosine-3'-phosphate
  modified_base 4: mod_base = OTHER; note = 2'-O-methyluridine-3'-phosphate
  modified_base 5: mod_base = OTHER; note = 2'-O-methylguanosine-3'-phosphate
  modified_base 6: mod_base = OTHER; note = 2'-O-methyluridine-3'-phosphate
  modified_base 7: mod_base = OTHER; note = 2'-O-methylguanosine-3'-phosphate
  modified_base 8: mod_base = OTHER; note = 2'-O-methyladenosine-3'-phosphate
  modified_base 9: mod_base = OTHER; note = 2'-O-methyladenosine-3'-phosphate
  modified_base 10: mod_base = OTHER; note = 2'-O-methyladenosine-3'-phosphate
  modified_base 12: mod_base = OTHER; note = 2'-O-methyluridine-3'-phosphate
  modified_base 13: mod_base = OTHER; note = 2'-O-methylcytidine-3'-phosphate
  modified_base 14: mod_base = OTHER; note = 2'-O-methyladenosine-3'-phosphate
  modified_base 15: mod_base = OTHER; note = 2'-O-methyluridine-3'-phosphate
  modified_base 16: mod_base = OTHER; note = 2'-O-methylcytidine-3'-phosphate
  modified_base 17: mod_base = OTHER; note 2-hydroxymethyl-tetrahydrofurane-4-methoxy-3-phosphate (abasic 2'-O-Methyl furanose)
  modified_base 18: mod_base = OTHER; note = 2'-O-methyladenosine-3'-phosphate
  modified_base 19: mod_base = OTHER; note = 2'-O-methylcytidine-3'-phosphate
  modified_base 20: mod_base = OTHER; note = 2'-O-methyladenosine-3'-phosphate
  modified_base 21: mod_base = OTHER; note = 2'-O-methyladenosine-3'-phosphate attached to N-[tris(N-acetylgalactosamine-alkyl)-amidodecanoyl)]-4-hydr oxyprolinol Hyp-(N-acetylgalactosamine-alkyl)3
  misc_feature 1..10: note = RNA
  misc_feature 11: note = DNA
  misc_feature 12..21: note = RNA
gaatgtgaaagtcatcnacaa

SEQ ID NO: 188 - DNA, 21 bp, synthetic construct
  misc_feature 1..21: note = Description of Artificial Sequence: Synthetic oligonucleotide
  source 1..21: mol_type = other DNA
  modified_base 1: mod_base = OTHER; note = 2'-O-methylguanosine-3'- phosphorothioate
  modified_base 2: mod_base = OTHER; note = 2'-O-methyladenosine-3'- phosphorothioate
  modified_base 3: mod_base = OTHER; note = 2'-O-methyladenosine-3'-phosphate
  modified_base 4: mod_base = OTHER; note = 2'-O-methyluridine-3'-phosphate
  modified_base 5: mod_base = OTHER; note = 2'-O-methylguanosine-3'-phosphate
  modified_base 6: mod_base = OTHER; note = 2'-O-methyluridine-3'-phosphate
  modified_base 7: mod_base = OTHER; note = 2'-O-methylguanosine-3'-phosphate
  modified_base 8: mod_base = OTHER; note = 2'-O-methyladenosine-3'-phosphate
  modified_base 9: mod_base = OTHER; note = 2'-O-methyladenosine-3'-phosphate
  modified_base 10: mod_base = OTHER; note = 2'-O-methyladenosine-3'-phosphate
  modified_base 12: mod_base = OTHER; note = 2'-O-methyluridine-3'-phosphate
  modified_base 13: mod_base = OTHER; note = 2'-O-methylcytidine-3'-phosphate
  modified_base 14: mod_base = OTHER; note = 2'-O-methyladenosine-3'-phosphate
  modified_base 16: mod_base = OTHER; note = 2'-O-methylcytidine-3'-phosphate
  modified_base 18: mod_base = OTHER; note = 2'-O-methyladenosine-3'-phosphate
  modified_base 19: mod_base = OTHER; note = 2'-O-methylcytidine-3'-phosphate
  modified_base 20: mod_base = OTHER; note = 2'-O-methyladenosine-3'-phosphate
  modified_base 21: mod_base = OTHER; note = 2'-O-methyladenosine-3'-phosphate attached to N-[tris(N-acetylgalactosamine-alkyl)-amidodecanoyl)]-4-hydr oxyprolinol Hyp-(N-acetylgalactosamine-alkyl)3
  misc_feature 1..10: note = RNA
  misc_feature 11: note = DNA
  misc_feature 12..14: note = RNA
  misc_feature 15: note = DNA
  misc_feature 16: note = RNA
  misc_feature 17: note = DNA
  misc_feature 18..21: note = RNA
gaatgtgaaagtcatctacaa

SEQ ID NO: 189 - DNA, 21 bp, synthetic construct
  misc_feature 1..21: note = Description of Artificial Sequence: Synthetic oligonucleotide
  source 1..21: mol_type = other DNA
  modified_base 1: mod_base = OTHER; note = 2'-O-methylguanosine-3'- phosphorothioate
  modified_base 2: mod_base = OTHER; note = 2'-O-methyladenosine-3'- phosphorothioate
  modified_base 3: mod_base = OTHER; note = 2'-O-methyladenosine-3'-phosphate
  modified_base 4: mod_base = OTHER; note = 2'-O-methyluridine-3'-phosphate
  modified_base 5: mod_base = OTHER; note = 2'-O-methylguanosine-3'-phosphate
  modified_base 6: mod_base = OTHER; note = 2'-O-methyluridine-3'-phosphate
  modified_base 7: mod_base = OTHER; note = 2'-O-methylguanosine-3'-phosphate
  modified_base 8: mod_base = OTHER; note = 2'-O-methyladenosine-3'-phosphate
  modified_base 9: mod_base = OTHER; note = 2'-O-methyladenosine-3'-phosphate
  modified_base 10: mod_base = OTHER; note = 2'-O-methyladenosine-3'-phosphate
  modified_base 12: mod_base = OTHER; note = 2'-O-methyluridine-3'-phosphate
  modified_base 13: mod_base = OTHER; note = 2'-O-methylcytidine-3'-phosphate
  modified_base 14: mod_base = OTHER; note = 2'-O-methyladenosine-3'-phosphate
  modified_base 15: mod_base = OTHER; note = 2'-O-methyluridine-3'-phosphate
  modified_base 16: mod_base = OTHER; note = 2'-O-methylcytidine-3'-phosphate
  modified_base 18: mod_base = OTHER; note = 2'-O-methyladenosine-3'-phosphate
  modified_base 20: mod_base = OTHER; note = 2'-O-methyladenosine-3'-phosphate
  modified_base 21: mod_base = OTHER; note = 2'-O-methyladenosine-3'-phosphate attached to N-[tris(N-acetylgalactosamine-alkyl)-amidodecanoyl)]-4-hydr oxyprolinol Hyp-(N-acetylgalactosamine-alkyl)3
  misc_feature 1..10: note = RNA
  misc_feature 11: note = DNA
  misc_feature 12..16: note = RNA
  misc_feature 17: note = DNA
  misc_feature 18: note = RNA
  misc_feature 19: note = DNA
  misc_feature 20..21: note = RNA
gaatgtgaaagtcatcgacaa

SEQ ID NO: 190 - DNA, 21 bp, synthetic construct
  misc_feature 1..21: note = Description of Artificial Sequence: Synthetic oligonucleotide
  source 1..21: mol_type = other DNA
  modified_base 1: mod_base = OTHER; note = 2'-O-methylguanosine-3'- phosphorothioate
  modified_base 2: mod_base = OTHER; note = 2'-O-methyladenosine-3'- phosphorothioate
  modified_base 3: mod_base = OTHER; note = 2'-O-methyladenosine-3'-phosphate
  modified_base 4: mod_base = OTHER; note = 2'-O-methyluridine-3'-phosphate
  modified_base 5: mod_base = OTHER; note = 2'-O-methylguanosine-3'-phosphate
  modified_base 6: mod_base = OTHER; note = 2'-O-methyluridine-3'-phosphate
  modified_base 7: mod_base = OTHER; note = 2'-O-methylguanosine-3'-phosphate
  modified_base 8: mod_base = OTHER; note = 2'-O-methyladenosine-3'-phosphate
  modified_base 9: mod_base = OTHER; note = 2'-O-methyladenosine-3'-phosphate
  modified_base 10: mod_base = OTHER; note = 2'-O-methyladenosine-3'-phosphate
  modified_base 12: mod_base = OTHER; note = 2'-O-methyluridine-3'-phosphate
  modified_base 13: mod_base = OTHER; note = 2'-O-methylcytidine-3'-phosphate
  modified_base 14: mod_base = OTHER; note = 2'-O-methyladenosine-3'-phosphate
  modified_base 15: mod_base = OTHER; note = 2'-O-methyluridine-3'-phosphate
  modified_base 16: mod_base = OTHER; note = 2'-O-methylcytidine-3'-phosphate
  modified_base 18: mod_base = OTHER; note = 2'-O-methyladenosine-3'-phosphate
  modified_base 20: mod_base = OTHER; note = 2'-O-methyladenosine-3'-phosphate
  modified_base 21: mod_base = OTHER; note = 2'-O-methyladenosine-3'-phosphate attached to N-[tris(N-acetylgalactosamine-alkyl)-amidodecanoyl)]-4-hydr oxyprolinol Hyp-(N-acetylgalactosamine-alkyl)3
  misc_feature 1..10: note = RNA
  misc_feature 11: note = DNA
  misc_feature 12..16: note = RNA
  misc_feature 17: note = DNA
  misc_feature 18: note = RNA
  misc_feature 19: note = DNA
  misc_feature 20..21: note = RNA
gaatgtgaaagtcatctacaa

SEQ ID NO: 191 - DNA, 21 bp, synthetic construct
  misc_feature 1..21: note = Description of Artificial Sequence: Synthetic oligonucleotide
  source 1..21: mol_type = other DNA
  modified_base 1: mod_base = OTHER; note = 2'-O-methylguanosine-3'- phosphorothioate
  modified_base 2: mod_base = OTHER; note = 2'-O-methyladenosine-3'- phosphorothioate
  modified_base 3: mod_base = OTHER; note = 2'-O-methyladenosine-3'-phosphate
  modified_base 4: mod_base = OTHER; note = 2'-O-methyluridine-3'-phosphate
  modified_base 5: mod_base = OTHER; note = 2'-O-methylguanosine-3'-phosphate
  modified_base 6: mod_base = OTHER; note = 2'-O-methyluridine-3'-phosphate
  modified_base 7: mod_base = OTHER; note = 2'-O-methylguanosine-3'-phosphate
  modified_base 8: mod_base = OTHER; note = 2'-O-methyladenosine-3'-phosphate
  modified_base 9: mod_base = OTHER; note = 2'-O-methyladenosine-3'-phosphate
  modified_base 10: mod_base = OTHER; note = 2'-O-methyladenosine-3'-phosphate
  modified_base 12: mod_base = OTHER; note = 2'-O-methyluridine-3'-phosphate
  modified_base 13: mod_base = OTHER; note = 2'-O-methylcytidine-3'-phosphate
  modified_base 14: mod_base = OTHER; note = 2'-O-methyladenosine-3'-phosphate
  modified_base 15: mod_base = OTHER; note = 2'-O-methyluridine-3'-phosphate
  modified_base 16: mod_base = OTHER; note = 2'-O-methylcytidine-3'-phosphate
  modified_base 17: mod_base = OTHER; note 2-hydroxymethyl-tetrahydrofurane-4-methoxy-3-phosphate (abasic 2'-O-Methyl furanose)
  modified_base 18: mod_base = OTHER; note = 2'-O-methyladenosine-3'-phosphate
  modified_base 20: mod_base = OTHER; note = 2'-O-methyladenosine-3'-phosphate
  modified_base 21: mod_base = OTHER; note = 2'-O-methyladenosine-3'-phosphate attached to N-[tris(N-acetylgalactosamine-alkyl)-amidodecanoyl)]-4-hydr oxyprolinol Hyp-(N-acetylgalactosamine-alkyl)3
  misc_feature 1..10: note = RNA
  misc_feature 11: note = DNA
  misc_feature 12..18: note = RNA
  misc_feature 19: note = DNA
  misc_feature 20..21: note = RNA
gaatgtgaaagtcatcnacaa

SEQ ID NO: 192 - RNA, 21 nt, synthetic construct
  misc_feature 1..21: note = Description of Artificial Sequence: Synthetic oligonucleotide
  source 1..21: mol_type = other RNA
  modified_base 1: mod_base = OTHER; note = 2'-fluoroguanosine-3'-phosphorothioate
  modified_base 2: mod_base = OTHER; note = 2'-O-methyladenosine-3'- phosphorothioate
  modified_base 3: mod_base = OTHER; note = 2'-fluoroadenosine-3'-phosphate
  modified_base 4: mod_base = OTHER; note = 2'-O-methyluridine-3'-phosphate
  modified_base 5: mod_base = OTHER; note = 2'-fluoroguanosine-3'-phosphate
  modified_base 6: mod_base = OTHER; note = 2'-O-methyluridine-3'-phosphate
  modified_base 7: mod_base = OTHER; note = 2'-fluoroguanosine-3'-phosphate
  modified_base 8: mod_base = OTHER; note = 2'-O-methyladenosine-3'-phosphate
  modified_base 9: mod_base = OTHER; note = 2'-fluoroadenosine-3'-phosphate
  modified_base 10: mod_base = OTHER; note = 2'-fluoroadenosine-3'-phosphate
  modified_base 11: mod_base = OTHER; note = 2'-fluoroguanosine-3'-phosphate
  modified_base 12: mod_base = OTHER; note = 2'-O-methyluridine-3'-phosphate
  modified_base 13: mod_base = OTHER; note = 2'-fluorocytidine-3'-phosphate
  modified_base 14: mod_base = OTHER; note = 2'-O-methyladenosine-3'-phosphate
  modified_base 15: mod_base = OTHER; note = 2'-fluorouridine-3'-phosphate
  modified_base 16: mod_base = OTHER; note = 2'-O-methylcytidine-3'-phosphate
  modified_base 17: mod_base = OTHER; note = 2'-fluoroguanosine-3'-phosphate
  modified_base 18: mod_base = OTHER; note = 2'-O-methyladenosine-3'-phosphate
  modified_base 19: mod_base = OTHER; note = 2'-fluorocytidine-3'-phosphate
  modified_base 20: mod_base = OTHER; note = 2'-O-methyladenosine-3'-phosphate
  modified_base 21: mod_base = OTHER; note = 2'-fluoroadenosine-3'-phosphate attached to N-[tris(N-acetylgalactosamine-alkyl)-amidodecanoyl)]-4-hydr oxyprolinol Hyp-(N-acetylgalactosamine-alkyl)3
gaatgtgaaagtcatcgacaa

SEQ ID NO: 193 - RNA, 21 nt, synthetic construct
  misc_feature 1..21: note = Description of Artificial Sequence: Synthetic oligonucleotide
  source 1..21: mol_type = other RNA
  modified_base 1: mod_base = OTHER; note = 2'-fluoroguanosine-3'-phosphorothioate
  modified_base 2: mod_base = OTHER; note = 2'-O-methyladenosine-3'- phosphorothioate
  modified_base 3: mod_base = OTHER; note = 2'-fluoroadenosine-3'-phosphate
  modified_base 4: mod_base = OTHER; note = 2'-O-methyluridine-3'-phosphate
  modified_base 5: mod_base = OTHER; note = 2'-fluoroguanosine-3'-phosphate
  modified_base 6: mod_base = OTHER; note = 2'-O-methyluridine-3'-phosphate
  modified_base 7: mod_base = OTHER; note = 2'-fluoroguanosine-3'-phosphate
  modified_base 8: mod_base = OTHER; note = 2'-O-methyladenosine-3'-phosphate
  modified_base 9: mod_base = OTHER; note = 2'-fluoroadenosine-3'-phosphate
  modified_base 10: mod_base = OTHER; note = 2'-fluoroadenosine-3'-phosphate
  modified_base 11: mod_base = OTHER; note = 2'-fluoroguanosine-3'-phosphate
  modified_base 12: mod_base = OTHER; note = 2'-O-methyluridine-3'-phosphate
  modified_base 13: mod_base = OTHER; note = 2'-fluorocytidine-3'-phosphate
  modified_base 14: mod_base = OTHER; note = 2'-O-methyladenosine-3'-phosphate
  modified_base 15: mod_base = OTHER; note = 2'-fluorouridine-3'-phosphate
  modified_base 16: mod_base = OTHER; note = 2'-O-methylcytidine-3'-phosphate
  modified_base 17: mod_base = OTHER; note = 2'-fluoroguanosine-3'-phosphate
  modified_base 18: mod_base = OTHER; note = 2'-O-methyladenosine-3'-phosphate
  modified_base 19: mod_base = OTHER; note = 2'-fluorocytidine-3'-phosphate
  modified_base 20: mod_base = OTHER; note = 2'-O-methyladenosine-3'-phosphate
  modified_base 21: mod_base = OTHER; note = 2'-fluoroadenosine-3'-phosphate attached to N-[tris(N-acetylgalactosamine-alkyl)-amidodecanoyl)]-4-hydr oxyprolinol Hyp-(N-acetylgalactosamine-alkyl)3
gaatgtgaaagtcatcgacaa

SEQ ID NO: 194 - RNA, 21 nt, synthetic construct
  misc_feature 1..21: note = Description of Artificial Sequence: Synthetic oligonucleotide
  source 1..21: mol_type = other RNA
  modified_base 1: mod_base = OTHER; note = 2'-fluoroguanosine-3'-phosphorothioate
  modified_base 2: mod_base = OTHER; note = 2'-O-methyladenosine-3'- phosphorothioate
  modified_base 3: mod_base = OTHER; note = 2'-fluoroadenosine-3'-phosphate
  modified_base 4: mod_base = OTHER; note = 2'-O-methyluridine-3'-phosphate
  modified_base 5: mod_base = OTHER; note = 2'-fluoroguanosine-3'-phosphate
  modified_base 6: mod_base = OTHER; note = 2'-O-methyluridine-3'-phosphate
  modified_base 7: mod_base = OTHER; note = 2'-fluoroguanosine-3'-phosphate
  modified_base 8: mod_base = OTHER; note = 2'-O-methyladenosine-3'-phosphate
  modified_base 9: mod_base = OTHER; note = 2'-fluoroadenosine-3'-phosphate
  modified_base 10: mod_base = OTHER; note = 2'-fluoroadenosine-3'-phosphate
  modified_base 11: mod_base = OTHER; note = 2'-fluoroguanosine-3'-phosphate
  modified_base 12: mod_base = OTHER; note = 2'-O-methyluridine-3'-phosphate
  modified_base 13: mod_base = OTHER; note = 2'-fluorocytidine-3'-phosphate
  modified_base 14: mod_base = OTHER; note = 2'-O-methyladenosine-3'-phosphate
  modified_base 15: mod_base = OTHER; note = 2'-fluorouridine-3'-phosphate
  modified_base 16: mod_base = OTHER; note = 2'-O-methylcytidine-3'-phosphate
  modified_base 17: mod_base = OTHER; note = 2'-fluoroguanosine-3'-phosphate
  modified_base 18: mod_base = OTHER; note = 2'-O-methyladenosine-3'-phosphate
  modified_base 19: mod_base = OTHER; note = 2'-fluorocytidine-3'-phosphate
  modified_base 20: mod_base = OTHER; note = 2'-O-methyladenosine-3'-phosphate
  modified_base 21: mod_base = OTHER; note = 2'-fluoroadenosine-3'-phosphate attached to N-[tris(N-acetylgalactosamine-alkyl)-amidodecanoyl)]-4-hydr oxyprolinol Hyp-(N-acetylgalactosamine-alkyl)3
gaatgtgaaagtcatcgacaa

SEQ ID NO: 195 - RNA, 21 nt, synthetic construct
  misc_feature 1..21: note = Description of Artificial Sequence: Synthetic oligonucleotide
  source 1..21: mol_type = other RNA
  modified_base 1: mod_base = OTHER; note = 2'-fluoroguanosine-3'-phosphorothioate
  modified_base 2: mod_base = OTHER; note = 2'-O-methyladenosine-3'- phosphorothioate
  modified_base 3: mod_base = OTHER; note = 2'-fluoroadenosine-3'-phosphate
  modified_base 4: mod_base = OTHER; note = 2'-O-methyluridine-3'-phosphate
  modified_base 5: mod_base = OTHER; note = 2'-fluoroguanosine-3'-phosphate
  modified_base 6: mod_base = OTHER; note = 2'-O-methyluridine-3'-phosphate
  modified_base 7: mod_base = OTHER; note = 2'-fluoroguanosine-3'-phosphate
  modified_base 8: mod_base = OTHER; note = 2'-O-methyladenosine-3'-phosphate
  modified_base 9: mod_base = OTHER; note = 2'-fluoroadenosine-3'-phosphate
  modified_base 10: mod_base = OTHER; note = 2'-fluoroadenosine-3'-phosphate
  modified_base 11: mod_base = OTHER; note = 2'-fluoroguanosine-3'-phosphate
  modified_base 12: mod_base = OTHER; note = 2'-O-methyluridine-3'-phosphate
  modified_base 13: mod_base = OTHER; note = 2'-fluorocytidine-3'-phosphate
  modified_base 14: mod_base = OTHER; note = 2'-O-methyladenosine-3'-phosphate
  modified_base 15: mod_base = OTHER; note = 2'-fluorouridine-3'-phosphate
  modified_base 16: mod_base = OTHER; note = 2'-O-methylcytidine-3'-phosphate
  modified_base 17: mod_base = OTHER; note = 2'-fluoroguanosine-3'-phosphate
  modified_base 18: mod_base = OTHER; note = 2'-O-methyladenosine-3'-phosphate
  modified_base 19: mod_base = OTHER; note = 2'-fluorocytidine-3'-phosphate
  modified_base 20: mod_base = OTHER; note = 2'-O-methyladenosine-3'-phosphate
  modified_base 21: mod_base = OTHER; note = 2'-fluoroadenosine-3'-phosphate attached to N-[tris(N-acetylgalactosamine-alkyl)-amidodecanoyl)]-4-hydr oxyprolinol Hyp-(N-acetylgalactosamine-alkyl)3
gaatgtgaaagtcatcgacaa

SEQ ID NO: 196 - RNA, 21 nt, synthetic construct
  misc_feature 1..21: note = Description of Artificial Sequence: Synthetic oligonucleotide
  source 1..21: mol_type = other RNA
  modified_base 1: mod_base = OTHER; note = 2'-fluoroguanosine-3'-phosphorothioate
  modified_base 2: mod_base = OTHER; note = 2'-O-methyladenosine-3'- phosphorothioate
  modified_base 3: mod_base = OTHER; note = 2'-fluoroadenosine-3'-phosphate
  modified_base 4: mod_base = OTHER; note = 2'-O-methyluridine-3'-phosphate
  modified_base 5: mod_base = OTHER; note = 2'-fluoroguanosine-3'-phosphate
  modified_base 6: mod_base = OTHER; note = 2'-O-methyluridine-3'-phosphate
  modified_base 7: mod_base = OTHER; note = 2'-fluoroguanosine-3'-phosphate
  modified_base 8: mod_base = OTHER; note = 2'-O-methyladenosine-3'-phosphate
  modified_base 9: mod_base = OTHER; note = 2'-fluoroadenosine-3'-phosphate
  modified_base 10: mod_base = OTHER; note = 2'-fluoroadenosine-3'-phosphate
  modified_base 11: mod_base = OTHER; note = 2'-fluoroguanosine-3'-phosphate
  modified_base 12: mod_base = OTHER; note = 2'-O-methyluridine-3'-phosphate
  modified_base 13: mod_base = OTHER; note = 2'-fluorocytidine-3'-phosphate
  modified_base 14: mod_base = OTHER; note = 2'-O-methyladenosine-3'-phosphate
  modified_base 15: mod_base = OTHER; note = 2'-fluorouridine-3'-phosphate
  modified_base 16: mod_base = OTHER; note = 2'-O-methylcytidine-3'-phosphate
  modified_base 17: mod_base = OTHER; note = 2'-fluoroguanosine-3'-phosphate
  modified_base 18: mod_base = OTHER; note = 2'-O-methyladenosine-3'-phosphate
  modified_base 19: mod_base = OTHER; note = 2'-fluorocytidine-3'-phosphate
  modified_base 20: mod_base = OTHER; note = 2'-O-methyladenosine-3'-phosphate
  modified_base 21: mod_base = OTHER; note = 2'-fluoroadenosine-3'-phosphate attached to N-[tris(N-acetylgalactosamine-alkyl)-amidodecanoyl)]-4-hydr oxyprolinol Hyp-(N-acetylgalactosamine-alkyl)3
gaatgtgaaagtcatcgacaa

SEQ ID NO: 197 - RNA, 21 nt, synthetic construct
  misc_feature 1..21: note = Description of Artificial Sequence: Synthetic oligonucleotide
  source 1..21: mol_type = other RNA
  modified_base 1: mod_base = OTHER; note = 2'-fluoroguanosine-3'-phosphorothioate
  modified_base 2: mod_base = OTHER; note = 2'-O-methyladenosine-3'- phosphorothioate
  modified_base 3: mod_base = OTHER; note = 2'-fluoroadenosine-3'-phosphate
  modified_base 4: mod_base = OTHER; note = 2'-O-methyluridine-3'-phosphate
  modified_base 5: mod_base = OTHER; note = 2'-fluoroguanosine-3'-phosphate
  modified_base 6: mod_base = OTHER; note = 2'-O-methyluridine-3'-phosphate
  modified_base 7: mod_base = OTHER; note = 2'-fluoroguanosine-3'-phosphate
  modified_base 8: mod_base = OTHER; note = 2'-O-methyladenosine-3'-phosphate
  modified_base 9: mod_base = OTHER; note = 2'-fluoroadenosine-3'-phosphate
  modified_base 10: mod_base = OTHER; note = 2'-fluoroadenosine-3'-phosphate
  modified_base 11: mod_base = OTHER; note = 2'-fluoroguanosine-3'-phosphate
  modified_base 12: mod_base = OTHER; note = 2'-O-methyluridine-3'-phosphate
  modified_base 13: mod_base = OTHER; note = 2'-fluorocytidine-3'-phosphate
  modified_base 14: mod_base = OTHER; note = 2'-O-methyladenosine-3'-phosphate
  modified_base 15: mod_base = OTHER; note = 2'-fluorouridine-3'-phosphate
  modified_base 16: mod_base = OTHER; note = 2'-O-methylcytidine-3'-phosphate
  modified_base 17: mod_base = OTHER; note = 2'-fluoroguanosine-3'-phosphate
  modified_base 18: mod_base = OTHER; note = 2'-O-methyladenosine-3'-phosphate
  modified_base 19: mod_base = OTHER; note = 2'-fluorocytidine-3'-phosphate
  modified_base 20: mod_base = OTHER; note = 2'-O-methyladenosine-3'-phosphate
  modified_base 21: mod_base = OTHER; note = 2'-fluoroadenosine-3'-phosphate attached to N-[tris(N-acetylgalactosamine-alkyl)-amidodecanoyl)]-4-hydr oxyprolinol Hyp-(N-acetylgalactosamine-alkyl)3
gaatgtgaaagtcatcgacaa

SEQ ID NO: 198 - DNA, 21 bp, synthetic construct
  misc_feature 1..21: note = Description of Artificial Sequence: Synthetic oligonucleotide
  source 1..21: mol_type = other DNA
  modified_base 1: mod_base = OTHER; note = 2'-O-methylguanosine-3'- phosphorothioate
  modified_base 2: mod_base = OTHER; note = 2'-O-methyladenosine-3'- phosphorothioate
  modified_base 3: mod_base = OTHER; note = 2'-O-methyladenosine-3'-phosphate
  modified_base 4: mod_base = OTHER; note = 2'-O-methyluridine-3'-phosphate
  modified_base 5: mod_base = OTHER; note = 2'-O-methylguanosine-3'-phosphate
  modified_base 6: mod_base = OTHER; note = 2'-O-methyluridine-3'-phosphate
  modified_base 7: mod_base = OTHER; note = 2'-O-methylguanosine-3'-phosphate
  modified_base 8: mod_base = OTHER; note = 2'-O-methyladenosine-3'-phosphate
  modified_base 9: mod_base = OTHER; note = 2'-O-methyladenosine-3'-phosphate
  modified_base 10: mod_base = OTHER; note = 2'-O-methyladenosine-3'-phosphate
  modified_base 12: mod_base = OTHER; note = 2'-O-methyluridine-3'-phosphate
  modified_base 13: mod_base = OTHER; note = 2'-O-methylcytidine-3'-phosphate
  modified_base 14: mod_base = OTHER; note = 2'-O-methyladenosine-3'-phosphate
  modified_base 15: mod_base = OTHER; note = 2'-O-methyluridine-3'-phosphate
  modified_base 16: mod_base = OTHER; note = Cytidine-glycol nucleic acid (GNA)
  modified_base 17: mod_base = OTHER; note = 2'-O-methylguanosine-3'-phosphate
  modified_base 18: mod_base = OTHER; note = 2'-O-methyladenosine-3'-phosphate
  modified_base 19: mod_base = OTHER; note = 2'-O-methylcytidine-3'-phosphate
  modified_base 20: mod_base = OTHER; note = 2'-O-methyladenosine-3'-phosphate
  modified_base 21: mod_base = OTHER; note = 2'-O-methyladenosine-3'-phosphate attached to N-[tris(N-acetylgalactosamine-alkyl)-amidodecanoyl)]-4-hydr oxyprolinol Hyp-(N-acetylgalactosamine-alkyl)3
  misc_feature 1..10: note = RNA
  misc_feature 11: note = DNA
  misc_feature 12..21: note = RNA
gaatgtgaaagtcatcgacaa

SEQ ID NO: 199 - RNA, 21 nt, synthetic construct
  misc_feature 1..21: note = Description of Artificial Sequence: Synthetic oligonucleotide
  source 1..21: mol_type = other RNA
  modified_base 1: mod_base = OTHER; note = 2'-fluoroguanosine-3'-phosphorothioate
  modified_base 2: mod_base = OTHER; note = 2'-O-methyladenosine-3'- phosphorothioate
  modified_base 3: mod_base = OTHER; note = 2'-fluorocytidine-3'-phosphate
  modified_base 4: mod_base = OTHER; note = 2'-O-methyluridine-3'-phosphate
  modified_base 5: mod_base = OTHER; note = 2'-fluorouridine-3'-phosphate
  modified_base 6: mod_base = OTHER; note = 2'-O-methyluridine-3'-phosphate
  modified_base 7: mod_base = OTHER; note = 2'-fluorocytidine-3'-phosphate
  modified_base 8: mod_base = OTHER; note = 2'-O-methyladenosine-3'-phosphate
  modified_base 9: mod_base = OTHER; note = 2'-fluorouridine-3'-phosphate
  modified_base 10: mod_base = OTHER; note = 2'-fluorocytidine-3'-phosphate
  modified_base 11: mod_base = OTHER; note = 2'-fluorocytidine-3'-phosphate
  modified_base 12: mod_base = OTHER; note = 2'-O-methyluridine-3'-phosphate
  modified_base 13: mod_base = OTHER; note = 2'-fluoroguanosine-3'-phosphate
  modified_base 14: mod_base = OTHER; note = 2'-O-methylguanosine-3'-phosphate
  modified_base 15: mod_base = OTHER; note = 2'-fluoroadenosine-3'-phosphate
  modified_base 16: mod_base = OTHER; note = 2'-O-methyladenosine-3'-phosphate
  modified_base 17: mod_base = OTHER; note = 2'-fluoroadenosine-3'-phosphate
  modified_base 18: mod_base = OTHER; note = 2'-O-methyluridine-3'-phosphate
  modified_base 19: mod_base = OTHER; note = 2'-fluoroadenosine-3'-phosphate
  modified_base 20: mod_base = OTHER; note = 2'-O-methyluridine-3'-phosphate
  modified_base 21: mod_base = OTHER; note = 2'-fluoroadenosine-3'-phosphate attached to N-[tris(N-acetylgalactosamine-alkyl)-amidodecanoyl)]-4-hydr oxyprolinol Hyp-(N-acetylgalactosamine-alkyl)3
gactttcatcctggaaatata

SEQ ID NO: 200 - RNA, 21 nt, synthetic construct
  misc_feature 1..21: note = Description of Artificial Sequence: Synthetic oligonucleotide
  source 1..21: mol_type = other RNA
  modified_base 1: mod_base = OTHER; note = 2'-O-methylguanosine-3'- phosphorothioate
  modified_base 2: mod_base = OTHER; note = 2'-O-methyladenosine-3'- phosphorothioate
  modified_base 3: mod_base = OTHER; note = 2'-O-methylcytidine-3'-phosphate
  modified_base 4: mod_base = OTHER; note = 2'-O-methyluridine-3'-phosphate
  modified_base 5: mod_base = OTHER; note = 2'-O-methyluridine-3'-phosphate
  modified_base 6: mod_base = OTHER; note = 2'-O-methyluridine-3'-phosphate
  modified_base 7: mod_base = OTHER; note = 2'-fluorocytidine-3'-phosphate
  modified_base 8: mod_base = OTHER; note = 2'-O-methyladenosine-3'-phosphate
  modified_base 9: mod_base = OTHER; note = 2'-fluorouridine-3'-phosphate
  modified_base 10: mod_base = OTHER; note = 2'-fluorocytidine-3'-phosphate
  modified_base 11: mod_base = OTHER; note = 2'-fluorocytidine-3'-phosphate
  modified_base 12: mod_base = OTHER; note = 2'-O-methyluridine-3'-phosphate
  modified_base 13: mod_base = OTHER; note = 2'-O-methylguanosine-3'-phosphate
  modified_base 14: mod_base = OTHER; note = 2'-O-methylguanosine-3'-phosphate
  modified_base 15: mod_base = OTHER; note = 2'-O-methyladenosine-3'-phosphate
  modified_base 16: mod_base = OTHER; note = 2'-fluoroadenosine-3'-phosphate
  modified_base 17: mod_base = OTHER; note = 2'-O-methyladenosine-3'-phosphate
  modified_base 18: mod_base = OTHER; note = 2'-O-methyluridine-3'-phosphate
  modified_base 19: mod_base = OTHER; note = 2'-O-methyladenosine-3'-phosphate
  modified_base 20: mod_base = OTHER; note = 2'-O-methyluridine-3'-phosphate
  modified_base 21: mod_base = OTHER; note = 2'-O-methyladenosine-3'-phosphate attached to N-[tris(N-acetylgalactosamine-alkyl)-amidodecanoyl)]-4-hydr oxyprolinol Hyp-(N-acetylgalactosamine-alkyl)3
gactttcatcctggaaatata

SEQ ID NO: 201 - RNA, 21 nt, synthetic construct
  misc_feature 1..21: note = Description of Artificial Sequence: Synthetic oligonucleotide
  source 1..21: mol_type = other RNA
  modified_base 1: mod_base = OTHER; note = 2'-O-methylguanosine-3'- phosphorothioate
  modified_base 2: mod_base = OTHER; note = 2'-O-methyladenosine-3'- phosphorothioate
  modified_base 3: mod_base = OTHER; note = 2'-O-methylcytidine-3'-phosphate
  modified_base 4: mod_base = OTHER; note = 2'-O-methyluridine-3'-phosphate
  modified_base 5: mod_base = OTHER; note = 2'-O-methyluridine-3'-phosphate
  modified_base 6: mod_base = OTHER; note = 2'-O-methyluridine-3'-phosphate
  modified_base 7: mod_base = OTHER; note = 2'-fluorocytidine-3'-phosphate
  modified_base 8: mod_base = OTHER; note = 2'-O-methyladenosine-3'-phosphate
  modified_base 9: mod_base = OTHER; note = 2'-fluorouridine-3'-phosphate
  modified_base 10: mod_base = OTHER; note = 2'-fluorocytidine-3'-phosphate
  modified_base 11: mod_base = OTHER; note = 2'-fluorocytidine-3'-phosphate
  modified_base 12: mod_base = OTHER; note = 2'-O-methyluridine-3'-phosphate
  modified_base 13: mod_base = OTHER; note = 2'-O-methylguanosine-3'-phosphate
  modified_base 14: mod_base = OTHER; note = 2'-O-methylguanosine-3'-phosphate
  modified_base 15: mod_base = OTHER; note = 2'-O-methyladenosine-3'-phosphate
  modified_base 16: mod_base = OTHER; note = 2'-O-methyladenosine-3'-phosphate
  modified_base 17: mod_base = OTHER; note = 2'-O-methyladenosine-3'-phosphate
  modified_base 18: mod_base = OTHER; note = 2'-O-methyluridine-3'-phosphate
  modified_base 19: mod_base = OTHER; note = 2'-O-methyladenosine-3'-phosphate
  modified_base 20: mod_base = OTHER; note = 2'-O-methyluridine-3'-phosphate
  modified_base 21: mod_base = OTHER; note = 2'-O-methyladenosine-3'-phosphate attached to N-[tris(N-acetylgalactosamine-alkyl)-amidodecanoyl)]-4-hydr oxyprolinol Hyp-(N-acetylgalactosamine-alkyl)3
gactttcatcctggaaatata

SEQ ID NO: 202 - RNA, 21 nt, synthetic construct
  misc_feature 1..21: note = Description of Artificial Sequence: Synthetic oligonucleotide
  source 1..21: mol_type = other RNA
  modified_base 1: mod_base = OTHER; note = 2'-O-methylguanosine-3'- phosphorothioate
  modified_base 2: mod_base = OTHER; note = 2'-O-methyladenosine-3'- phosphorothioate
  modified_base 3: mod_base = OTHER; note = 2'-O-methylcytidine-3'-phosphate
  modified_base 4: mod_base = OTHER; note = 2'-O-methyluridine-3'-phosphate
  modified_base 5: mod_base = OTHER; note = 2'-O-methyluridine-3'-phosphate
  modified_base 6: mod_base = OTHER; note = 2'-O-methyluridine-3'-phosphate
  modified_base 7: mod_base = OTHER; note = 2'-fluorocytidine-3'-phosphate
  modified_base 8: mod_base = OTHER; note = 2'-O-methyladenosine-3'-phosphate
  modified_base 9: mod_base = OTHER; note = 2'-O-methyluridine-3'-phosphate
  modified_base 10: mod_base = OTHER; note = 2'-O-methylcytidine-3'-phosphate
  modified_base 11: mod_base = OTHER; note = 2'-fluorocytidine-3'-phosphate
  modified_base 12: mod_base = OTHER; note = 2'-O-methyluridine-3'-phosphate
  modified_base 13: mod_base = OTHER; note = 2'-O-methylguanosine-3'-phosphate
  modified_base 14: mod_base = OTHER; note = 2'-O-methylguanosine-3'-phosphate
  modified_base 15: mod_base = OTHER; note = 2'-O-methyladenosine-3'-phosphate
  modified_base 16: mod_base = OTHER; note = 2'-O-methyladenosine-3'-phosphate
  modified_base 17: mod_base = OTHER; note = 2'-fluoroadenosine-3'-phosphate
  modified_base 18: mod_base = OTHER; note = 2'-O-methyluridine-3'-phosphate
  modified_base 19: mod_base = OTHER; note = 2'-O-methyladenosine-3'-phosphate
  modified_base 20: mod_base = OTHER; note = 2'-O-methyluridine-3'-phosphate
  modified_base 21: mod_base = OTHER; note = 2'-O-methyladenosine-3'-phosphate attached to N-[tris(N-acetylgalactosamine-alkyl)-amidodecanoyl)]-4-hydr oxyprolinol Hyp-(N-acetylgalactosamine-alkyl)3
gactttcatcctggaaatata

SEQ ID NO: 203 - RNA, 21 nt, synthetic construct
  misc_feature 1..21: note = Description of Artificial Sequence: Synthetic oligonucleotide
  source 1..21: mol_type = other RNA
  modified_base 1: mod_base = OTHER; note = 2'-O-methylguanosine-3'- phosphorothioate
  modified_base 2: mod_base = OTHER; note = 2'-O-methyladenosine-3'- phosphorothioate
  modified_base 3: mod_base = OTHER; note = 2'-O-methylcytidine-3'-phosphate
  modified_base 4: mod_base = OTHER; note = 2'-O-methyluridine-3'-phosphate
  modified_base 5: mod_base = OTHER; note = 2'-O-methyluridine-3'-phosphate
  modified_base 6: mod_base = OTHER; note = 2'-O-methyluridine-3'-phosphate
  modified_base 7: mod_base = OTHER; note = 2'-O-methylcytidine-3'-phosphate
  modified_base 8: mod_base = OTHER; note = 2'-O-methyladenosine-3'-phosphate
  modified_base 9: mod_base = OTHER; note = 2'-O-methyluridine-3'-phosphate
  modified_base 10: mod_base = OTHER; note = 2'-O-methylcytidine-3'-phosphate
  modified_base 11: mod_base = OTHER; note = 2'-fluorocytidine-3'-phosphate
  modified_base 12: mod_base = OTHER; note = 2'-O-methyluridine-3'-phosphate
  modified_base 13: mod_base = OTHER; note = 2'-O-methylguanosine-3'-phosphate
  modified_base 14: mod_base = OTHER; note = 2'-O-methylguanosine-3'-phosphate
  modified_base 15: mod_base = OTHER; note = 2'-O-methyladenosine-3'-phosphate
  modified_base 16: mod_base = OTHER; note = 2'-O-methyladenosine-3'-phosphate
  modified_base 17: mod_base = OTHER; note = 2'-fluoroadenosine-3'-phosphate
  modified_base 18: mod_base = OTHER; note = 2'-O-methyluridine-3'-phosphate
  modified_base 19: mod_base = OTHER; note = 2'-O-methyladenosine-3'-phosphate
  modified_base 20: mod_base = OTHER; note = 2'-O-methyluridine-3'-phosphate
  modified_base 21: mod_base = OTHER; note = 2'-O-methyladenosine-3'-phosphate attached to N-[tris(N-acetylgalactosamine-alkyl)-amidodecanoyl)]-4-hydr oxyprolinol Hyp-(N-acetylgalactosamine-alkyl)3
gactttcatcctggaaatata

SEQ ID NO: 204 - RNA, 21 nt, synthetic construct
  misc_feature 1..21: note = Description of Artificial Sequence: Synthetic oligonucleotide
  source 1..21: mol_type = other RNA
  modified_base 1: mod_base = OTHER; note = 2'-O-methylguanosine-3'- phosphorothioate
  modified_base 2: mod_base = OTHER; note = 2'-O-methyladenosine-3'- phosphorothioate
  modified_base 3: mod_base = OTHER; note = 2'-O-methylcytidine-3'-phosphate
  modified_base 4: mod_base = OTHER; note = 2'-O-methyluridine-3'-phosphate
  modified_base 5: mod_base = OTHER; note = 2'-O-methyluridine-3'-phosphate
  modified_base 6: mod_base = OTHER; note = 2'-O-methyluridine-3'-phosphate
  modified_base 7: mod_base = OTHER; note = 2'-fluorocytidine-3'-phosphate
  modified_base 8: mod_base = OTHER; note = 2'-O-methyladenosine-3'-phosphate
  modified_base 9: mod_base = OTHER; note = 2'-O-methyluridine-3'-phosphate
  modified_base 10: mod_base = OTHER; note = 2'-O-methylcytidine-3'-phosphate
  modified_base 11: mod_base = OTHER; note = 2'-fluorocytidine-3'-phosphate
  modified_base 12: mod_base = OTHER; note = 2'-O-methyluridine-3'-phosphate
  modified_base 13: mod_base = OTHER; note = 2'-O-methylguanosine-3'-phosphate
  modified_base 14: mod_base = OTHER; note = 2'-O-methylguanosine-3'-phosphate
  modified_base 15: mod_base = OTHER; note = 2'-O-methyladenosine-3'-phosphate
  modified_base 16: mod_base = OTHER; note = 2'-O-methyladenosine-3'-phosphate
  modified_base 17: mod_base = OTHER; note = 2'-O-methyladenosine-3'-phosphate
  modified_base 18: mod_base = OTHER; note = 2'-O-methyluridine-3'-phosphate
  modified_base 19: mod_base = OTHER; note = 2'-O-methyladenosine-3'-phosphate
  modified_base 20: mod_base = OTHER; note = 2'-O-methyluridine-3'-phosphate
  modified_base 21: mod_base = OTHER; note = 2'-O-methyladenosine-3'-phosphate attached to N-[tris(N-acetylgalactosamine-alkyl)-amidodecanoyl)]-4-hydr oxyprolinol Hyp-(N-acetylgalactosamine-alkyl)3
gactttcatcctggaaatata

SEQ ID NO: 205 - RNA, 19 nt, synthetic construct
  misc_feature 1..19: note = Description of Artificial Sequence: Synthetic oligonucleotide
  source 1..19: mol_type = other RNA
  modified_base 1: mod_base = OTHER; note = 2'-fluorocytidine-3'-phosphorothioate
  modified_base 2: mod_base = OTHER; note = 2'-O-methyluridine-3'-phosphorothioate
  modified_base 3: mod_base = OTHER; note = 2'-fluorouridine-3'-phosphate
  modified_base 4: mod_base = OTHER; note = 2'-O-methyluridine-3'-phosphate
  modified_base 5: mod_base = OTHER; note = 2'-fluorocytidine-3'-phosphate
  modified_base 6: mod_base = OTHER; note = 2'-O-methyladenosine-3'-phosphate
  modified_base 7: mod_base = OTHER; note = 2'-fluorouridine-3'-phosphate
  modified_base 8: mod_base = OTHER; note = 2'-fluorocytidine-3'-phosphate
  modified_base 9: mod_base = OTHER; note = 2'-fluorocytidine-3'-phosphate
  modified_base 10: mod_base = OTHER; note = 2'-O-methyluridine-3'-phosphate
  modified_base 11: mod_base = OTHER; note = 2'-fluoroguanosine-3'-phosphate
  modified_base 12: mod_base = OTHER; note = 2'-O-methylguanosine-3'-phosphate
  modified_base 13: mod_base = OTHER; note = 2'-fluoroadenosine-3'-phosphate
  modified_base 14: mod_base = OTHER; note = 2'-O-methyladenosine-3'-phosphate
  modified_base 15: mod_base = OTHER; note = 2'-fluoroadenosine-3'-phosphate
  modified_base 16: mod_base = OTHER; note = 2'-O-methyluridine-3'-phosphate
  modified_base 17: mod_base = OTHER; note = 2'-fluoroadenosine-3'-phosphate
  modified_base 18: mod_base = OTHER; note = 2'-O-methyluridine-3'-phosphate
  modified_base 19: mod_base = OTHER; note = 2'-fluoroadenosine-3'-phosphate attached to N-[tris(N-acetylgalactosamine-alkyl)-amidodecanoyl)]-4-hydr oxyprolinol Hyp-(N-acetylgalactosamine-alkyl)3
ctttcatcctggaaatata

SEQ ID NO: 206 - RNA, 19 nt, synthetic construct
  misc_feature 1..19: note = Description of Artificial Sequence: Synthetic oligonucleotide
  source 1..19: mol_type = other RNA
  modified_base 1: mod_base = OTHER; note = 2'-O-methylcytidine-3'- phosphorothioate
  modified_base 2: mod_base = OTHER; note = 2'-O-methyluridine-3'-phosphorothioate
  modified_base 3: mod_base = OTHER; note = 2'-O-methyluridine-3'-phosphate
  modified_base 4: mod_base = OTHER; note = 2'-O-methyluridine-3'-phosphate
  modified_base 5: mod_base = OTHER; note = 2'-fluorocytidine-3'-phosphate
  modified_base 6: mod_base = OTHER; note = 2'-O-methyladenosine-3'-phosphate
  modified_base 7: mod_base = OTHER; note = 2'-fluorouridine-3'-phosphate
  modified_base 8: mod_base = OTHER; note = 2'-fluorocytidine-3'-phosphate
  modified_base 9: mod_base = OTHER; note = 2'-fluorocytidine-3'-phosphate
  modified_base 10: mod_base = OTHER; note = 2'-O-methyluridine-3'-phosphate
  modified_base 11: mod_base = OTHER; note = 2'-O-methylguanosine-3'-phosphate
  modified_base 12: mod_base = OTHER; note = 2'-O-methylguanosine-3'-phosphate
  modified_base 13: mod_base = OTHER; note = 2'-O-methyladenosine-3'-phosphate
  modified_base 14: mod_base = OTHER; note = 2'-O-methyladenosine-3'-phosphate
  modified_base 15: mod_base = OTHER; note = 2'-O-methyladenosine-3'-phosphate
  modified_base 16: mod_base = OTHER; note = 2'-O-methyluridine-3'-phosphate
  modified_base 17: mod_base = OTHER; note = 2'-O-methyladenosine-3'-phosphate
  modified_base 18: mod_base = OTHER; note = 2'-O-methyluridine-3'-phosphate
  modified_base 19: mod_base = OTHER; note = 2'-O-methyladenosine-3'-phosphate attached to N-[tris(N-acetylgalactosamine-alkyl)-amidodecanoyl)]-4-hydr oxyprolinol Hyp-(N-acetylgalactosamine-alkyl)3
ctttcatcctggaaatata

SEQ ID NO: 207 - RNA, 21 nt, synthetic construct
  misc_feature 1..21: note = Description of Artificial Sequence: Synthetic oligonucleotide
  source 1..21: mol_type = other RNA
  modified_base 1: mod_base = OTHER; note = 2'-fluoroguanosine-3'-phosphorothioate
  modified_base 2: mod_base = OTHER; note = 2'-O-methyladenosine-3'- phosphorothioate
  modified_base 3: mod_base = OTHER; note = 2'-fluorocytidine-3'-phosphate
  modified_base 4: mod_base = OTHER; note = 2'-O-methyluridine-3'-phosphate
  modified_base 5: mod_base = OTHER; note = 2'-fluorouridine-3'-phosphate
  modified_base 6: mod_base = OTHER; note = 2'-O-methyluridine-3'-phosphate
  modified_base 7: mod_base = OTHER; note = 2'-fluorocytidine-3'-phosphate
  modified_base 8: mod_base = OTHER; note = 2'-O-methyladenosine-3'-phosphate
  modified_base 9: mod_base = OTHER; note = 2'-fluorouridine-3'-phosphate
  modified_base 10: mod_base = OTHER; note = 2'-fluorocytidine-3'-phosphate
  modified_base 11: mod_base = OTHER; note = 2'-fluorocytidine-3'-phosphate
  modified_base 12: mod_base = OTHER; note = 2'-O-methyluridine-3'-phosphate
  modified_base 13: mod_base = OTHER; note = 2'-fluoroguanosine-3'-phosphate
  modified_base 14: mod_base = OTHER; note = 2'-O-methylguanosine-3'-phosphate
  modified_base 15: mod_base = OTHER; note = 2'-fluoroadenosine-3'-phosphate
  modified_base 16: mod_base = OTHER; note = 2'-O-methyladenosine-3'-phosphate
  modified_base 17: mod_base = OTHER; note = 2'-fluoroadenosine-3'-phosphate
  modified_base 18: mod_base = OTHER; note = 2'-O-methyluridine-3'-phosphate
  modified_base 19: mod_base = OTHER; note = 2'-fluoroadenosine-3'-phosphate
  modified_base 20: mod_base = OTHER; note = 2'-O-methyluridine-3'-phosphate
  modified_base 21: mod_base = OTHER; note = 2'-fluoroadenosine-3'-phosphate attached to N-[tris(N-acetylgalactosamine-alkyl)-amidodecanoyl)]-4-hydr oxyprolinol Hyp-(N-acetylgalactosamine-alkyl)3
gactttcatcctggaaatata

SEQ ID NO: 208 - RNA, 21 nt, synthetic construct
  misc_feature 1..21: note = Description of Artificial Sequence: Synthetic oligonucleotide
  source 1..21: mol_type = other RNA
  modified_base 1: mod_base = OTHER; note = 2'-fluoroguanosine-3'-phosphorothioate
  modified_base 2: mod_base = OTHER; note = 2'-O-methyladenosine-3'- phosphorothioate
  modified_base 3: mod_base = OTHER; note = 2'-fluorocytidine-3'-phosphate
  modified_base 4: mod_base = OTHER; note = 2'-O-methyluridine-3'-phosphate
  modified_base 5: mod_base = OTHER; note = 2'-fluorouridine-3'-phosphate
  modified_base 6: mod_base = OTHER; note = 2'-O-methyluridine-3'-phosphate
  modified_base 7: mod_base = OTHER; note = 2'-fluorocytidine-3'-phosphate
  modified_base 8: mod_base = OTHER; note = 2'-O-methyladenosine-3'-phosphate
  modified_base 9: mod_base = OTHER; note = 2'-fluorouridine-3'-phosphate
  modified_base 10: mod_base = OTHER; note = 2'-fluorocytidine-3'-phosphate
  modified_base 11: mod_base = OTHER; note = 2'-fluorocytidine-3'-phosphate
  modified_base 12: mod_base = OTHER; note = 2'-O-methyluridine-3'-phosphate
  modified_base 13: mod_base = OTHER; note = 2'-fluoroguanosine-3'-phosphate
  modified_base 14: mod_base = OTHER; note = 2'-O-methylguanosine-3'-phosphate
  modified_base 15: mod_base = OTHER; note = 2'-fluoroadenosine-3'-phosphate
  modified_base 16: mod_base = OTHER; note = 2'-O-methyladenosine-3'-phosphate
  modified_base 17: mod_base = OTHER; note = 2'-fluoroadenosine-3'-phosphate
  modified_base 18: mod_base = OTHER; note = 2'-O-methyluridine-3'-phosphate
  modified_base 19: mod_base = OTHER; note = 2'-fluoroadenosine-3'-phosphate
  modified_base 20: mod_base = OTHER; note = 2'-O-methyluridine-3'-phosphate
  modified_base 21: mod_base = OTHER; note = 2'-fluoroadenosine-3'-phosphate attached to N-[tris(N-acetylgalactosamine-alkyl)-amidodecanoyl)]-4-hydr oxyprolinol Hyp-(N-acetylgalactosamine-alkyl)3
gactttcatcctggaaatata

SEQ ID NO: 209 - RNA, 21 nt, synthetic construct
  misc_feature 1..21: note = Description of Artificial Sequence: Synthetic oligonucleotide
  source 1..21: mol_type = other RNA
  modified_base 1: mod_base = OTHER; note = 2'-fluoroguanosine-3'-phosphorothioate
  modified_base 2: mod_base = OTHER; note = 2'-O-methyladenosine-3'- phosphorothioate
  modified_base 3: mod_base = OTHER; note = 2'-fluorocytidine-3'-phosphate
  modified_base 4: mod_base = OTHER; note = 2'-O-methyluridine-3'-phosphate
  modified_base 5: mod_base = OTHER; note = 2'-fluorouridine-3'-phosphate
  modified_base 6: mod_base = OTHER; note = 2'-O-methyluridine-3'-phosphate
  modified_base 7: mod_base = OTHER; note = 2'-fluorocytidine-3'-phosphate
  modified_base 8: mod_base = OTHER; note = 2'-O-methyladenosine-3'-phosphate
  modified_base 9: mod_base = OTHER; note = 2'-fluorouridine-3'-phosphate
  modified_base 10: mod_base = OTHER; note = 2'-fluorocytidine-3'-phosphate
  modified_base 11: mod_base = OTHER; note = 2'-fluorocytidine-3'-phosphate
  modified_base 12: mod_base = OTHER; note = 2'-O-methyluridine-3'-phosphate
  modified_base 13: mod_base = OTHER; note = 2'-fluoroguanosine-3'-phosphate
  modified_base 14: mod_base = OTHER; note = 2'-O-methylguanosine-3'-phosphate
  modified_base 15: mod_base = OTHER; note = 2'-fluoroadenosine-3'-phosphate
  modified_base 16: mod_base = OTHER; note = 2'-O-methyladenosine-3'-phosphate
  modified_base 17: mod_base = OTHER; note = 2'-fluoroadenosine-3'-phosphate
  modified_base 18: mod_base = OTHER; note = 2'-O-methyluridine-3'-phosphate
  modified_base 19: mod_base = OTHER; note = 2'-fluoroadenosine-3'-phosphate
  modified_base 20: mod_base = OTHER; note = 2'-O-methyluridine-3'-phosphate
  modified_base 21: mod_base = OTHER; note = 2'-fluoroadenosine-3'-phosphate attached to N-[tris(N-acetylgalactosamine-alkyl)-amidodecanoyl)]-4-hydr oxyprolinol Hyp-(N-acetylgalactosamine-alkyl)3
gactttcatcctggaaatata

SEQ ID NO: 210 - RNA, 21 nt, synthetic construct
  misc_feature 1..21: note = Description of Artificial Sequence: Synthetic oligonucleotide
  source 1..21: mol_type = other RNA
  modified_base 1: mod_base = OTHER; note = 2'-fluoroguanosine-3'-phosphorothioate
  modified_base 2: mod_base = OTHER; note = 2'-O-methyladenosine-3'- phosphorothioate
  modified_base 3: mod_base = OTHER; note = 2'-fluorocytidine-3'-phosphate
  modified_base 4: mod_base = OTHER; note = 2'-O-methyluridine-3'-phosphate
  modified_base 5: mod_base = OTHER; note = 2'-fluorouridine-3'-phosphate
  modified_base 6: mod_base = OTHER; note = 2'-O-methyluridine-3'-phosphate
  modified_base 7: mod_base = OTHER; note = 2'-fluorocytidine-3'-phosphate
  modified_base 8: mod_base = OTHER; note = 2'-O-methyladenosine-3'-phosphate
  modified_base 9: mod_base = OTHER; note = 2'-fluorouridine-3'-phosphate
  modified_base 10: mod_base = OTHER; note = 2'-fluorocytidine-3'-phosphate
  modified_base 11: mod_base = OTHER; note = 2'-fluorocytidine-3'-phosphate
  modified_base 12: mod_base = OTHER; note = 2'-O-methyluridine-3'-phosphate
  modified_base 13: mod_base = OTHER; note = 2'-fluoroguanosine-3'-phosphate
  modified_base 14: mod_base = OTHER; note = 2'-O-methylguanosine-3'-phosphate
  modified_base 15: mod_base = OTHER; note = 2'-fluoroadenosine-3'-phosphate
  modified_base 16: mod_base = OTHER; note = 2'-O-methyladenosine-3'-phosphate
  modified_base 17: mod_base = OTHER; note = 2'-fluoroadenosine-3'-phosphate
  modified_base 18: mod_base = OTHER; note = 2'-O-methyluridine-3'-phosphate
  modified_base 19: mod_base = OTHER; note = 2'-fluoroadenosine-3'-phosphate
  modified_base 20: mod_base = OTHER; note = 2'-O-methyluridine-3'-phosphate
  modified_base 21: mod_base = OTHER; note = 2'-fluoroadenosine-3'-phosphate attached to N-[tris(N-acetylgalactosamine-alkyl)-amidodecanoyl)]-4-hydr oxyprolinol Hyp-(N-acetylgalactosamine-alkyl)3
gactttcatcctggaaatata

SEQ ID NO: 211 - RNA, 21 nt, synthetic construct
  misc_feature 1..21: note = Description of Artificial Sequence: Synthetic oligonucleotide
  source 1..21: mol_type = other RNA
  modified_base 1: mod_base = OTHER; note = 2'-fluoroguanosine-3'-phosphorothioate
  modified_base 2: mod_base = OTHER; note = 2'-O-methyladenosine-3'- phosphorothioate
  modified_base 3: mod_base = OTHER; note = 2'-fluorocytidine-3'-phosphate
  modified_base 4: mod_base = OTHER; note = 2'-O-methyluridine-3'-phosphate
  modified_base 5: mod_base = OTHER; note = 2'-fluorouridine-3'-phosphate
  modified_base 6: mod_base = OTHER; note = 2'-O-methyluridine-3'-phosphate
  modified_base 7: mod_base = OTHER; note = 2'-fluorocytidine-3'-phosphate
  modified_base 8: mod_base = OTHER; note = 2'-O-methyladenosine-3'-phosphate
  modified_base 9: mod_base = OTHER; note = 2'-fluorouridine-3'-phosphate
  modified_base 10: mod_base = OTHER; note = 2'-fluorocytidine-3'-phosphate
  modified_base 11: mod_base = OTHER; note = 2'-fluorocytidine-3'-phosphate
  modified_base 12: mod_base = OTHER; note = 2'-O-methyluridine-3'-phosphate
  modified_base 13: mod_base = OTHER; note = 2'-fluoroguanosine-3'-phosphate
  modified_base 14: mod_base = OTHER; note = 2'-O-methylguanosine-3'-phosphate
  modified_base 15: mod_base = OTHER; note = 2'-fluoroadenosine-3'-phosphate
  modified_base 16: mod_base = OTHER; note = 2'-O-methyladenosine-3'-phosphate
  modified_base 17: mod_base = OTHER; note = 2'-fluoroadenosine-3'-phosphate
  modified_base 18: mod_base = OTHER; note = 2'-O-methyluridine-3'-phosphate
  modified_base 19: mod_base = OTHER; note = 2'-fluoroadenosine-3'-phosphate
  modified_base 20: mod_base = OTHER; note = 2'-O-methyluridine-3'-phosphate
  modified_base 21: mod_base = OTHER; note = 2'-fluoroadenosine-3'-phosphate attached to N-[tris(N-acetylgalactosamine-alkyl)-amidodecanoyl)]-4-hydr oxyprolinol Hyp-(N-acetylgalactosamine-alkyl)3
gactttcatcctggaaatata

SEQ ID NO: 212 - RNA, 21 nt, synthetic construct
  misc_feature 1..21: note = Description of Artificial Sequence: Synthetic oligonucleotide
  source 1..21: mol_type = other RNA
  modified_base 1: mod_base = OTHER; note = 2'-O-methylguanosine-3'- phosphorothioate
  modified_base 2: mod_base = OTHER; note = 2'-O-methyladenosine-3'- phosphorothioate
  modified_base 3: mod_base = OTHER; note = 2'-O-methylcytidine-3'-phosphate
  modified_base 4: mod_base = OTHER; note = 2'-O-methyluridine-3'-phosphate
  modified_base 5: mod_base = OTHER; note = 2'-O-methyluridine-3'-phosphate
  modified_base 6: mod_base = OTHER; note = 2'-O-methyluridine-3'-phosphate
  modified_base 7: mod_base = OTHER; note = 2'-fluorocytidine-3'-phosphate
  modified_base 8: mod_base = OTHER; note = 2'-O-methyladenosine-3'-phosphate
  modified_base 9: mod_base = OTHER; note = 2'-fluorouridine-3'-phosphate
  modified_base 10: mod_base = OTHER; note = 2'-fluorocytidine-3'-phosphate
  modified_base 11: mod_base = OTHER; note = 2'-fluorocytidine-3'-phosphate
  modified_base 12: mod_base = OTHER; note = 2'-O-methyluridine-3'-phosphate
  modified_base 13: mod_base = OTHER; note = 2'-O-methylguanosine-3'-phosphate
  modified_base 14: mod_base = OTHER; note = 2'-O-methylguanosine-3'-phosphate
  modified_base 15: mod_base = OTHER; note = 2'-O-methyladenosine-3'-phosphate
  modified_base 16: mod_base = OTHER; note = 2'-O-methyladenosine-3'-phosphate
  modified_base 17: mod_base = OTHER; note = 2'-O-methyladenosine-3'-phosphate
  modified_base 18: mod_base = OTHER; note = 2'-O-methyluridine-3'-phosphate
  modified_base 19: mod_base = OTHER; note = 2'-O-methyladenosine-3'-phosphate
  modified_base 20: mod_base = OTHER; note = 2'-O-methyluridine-3'-phosphate
  modified_base 21: mod_base = OTHER; note = 2'-O-methyladenosine-3'-phosphate attached to N-[tris(N-acetylgalactosamine-alkyl)-amidodecanoyl)]-4-hydr oxyprolinol Hyp-(N-acetylgalactosamine-alkyl)3
gactttcatcctggaaatata

SEQ ID NO: 213 - RNA, 21 nt, synthetic construct
  misc_feature 1..21: note = Description of Artificial Sequence: Synthetic oligonucleotide
  source 1..21: mol_type = other RNA
  modified_base 1: mod_base = OTHER; note = 2'-O-methylguanosine-3'- phosphorothioate
  modified_base 2: mod_base = OTHER; note = 2'-O-methyladenosine-3'- phosphorothioate
  modified_base 3: mod_base = OTHER; note = 2'-O-methylcytidine-3'-phosphate
  modified_base 4: mod_base = OTHER; note = 2'-O-methyluridine-3'-phosphate
  modified_base 5: mod_base = OTHER; note = 2'-O-methyluridine-3'-phosphate
  modified_base 6: mod_base = OTHER; note = 2'-O-methyluridine-3'-phosphate
  modified_base 7: mod_base = OTHER; note = 2'-fluorocytidine-3'-phosphate
  modified_base 8: mod_base = OTHER; note = 2'-O-methyladenosine-3'-phosphate
  modified_base 9: mod_base = OTHER; note = 2'-fluorouridine-3'-phosphate
  modified_base 10: mod_base = OTHER; note = 2'-fluorocytidine-3'-phosphate
  modified_base 11: mod_base = OTHER; note = 2'-fluorocytidine-3'-phosphate
  modified_base 12: mod_base = OTHER; note = 2'-O-methyluridine-3'-phosphate
  modified_base 13: mod_base = OTHER; note = 2'-O-methylguanosine-3'-phosphate
  modified_base 14: mod_base = OTHER; note = 2'-O-methylguanosine-3'-phosphate
  modified_base 15: mod_base = OTHER; note = 2'-O-methyladenosine-3'-phosphate
  modified_base 16: mod_base = OTHER; note = 2'-O-methyladenosine-3'-phosphate
  modified_base 17: mod_base = OTHER; note = 2'-O-methyladenosine-3'-phosphate
  modified_base 18: mod_base = OTHER; note = 2'-O-methyluridine-3'-phosphate
  modified_base 19: mod_base = OTHER; note = 2'-O-methyladenosine-3'-phosphate
  modified_base 20: mod_base = OTHER; note = 2'-O-methyluridine-3'-phosphate
  modified_base 21: mod_base = OTHER; note = 2'-O-methyladenosine-3'-phosphate attached to N-[tris(N-acetylgalactosamine-alkyl)-amidodecanoyl)]-4-hydr oxyprolinol Hyp-(N-acetylgalactosamine-alkyl)3
gactttcatcctggaaatata

SEQ ID NO: 214 - RNA, 21 nt, synthetic construct
  misc_feature 1..21: note = Description of Artificial Sequence: Synthetic oligonucleotide
  source 1..21: mol_type = other RNA
  modified_base 1: mod_base = OTHER; note = 2'-O-methylguanosine-3'- phosphorothioate
  modified_base 2: mod_base = OTHER; note = 2'-O-methyladenosine-3'- phosphorothioate
  modified_base 3: mod_base = OTHER; note = 2'-O-methylcytidine-3'-phosphate
  modified_base 4: mod_base = OTHER; note = 2'-O-methyluridine-3'-phosphate
  modified_base 5: mod_base = OTHER; note = 2'-O-methyluridine-3'-phosphate
  modified_base 6: mod_base = OTHER; note = 2'-O-methyluridine-3'-phosphate
  modified_base 7: mod_base = OTHER; note = 2'-fluorocytidine-3'-phosphate
  modified_base 8: mod_base = OTHER; note = 2'-O-methyladenosine-3'-phosphate
  modified_base 9: mod_base = OTHER; note = 2'-fluorouridine-3'-phosphate
  modified_base 10: mod_base = OTHER; note = 2'-fluorocytidine-3'-phosphate
  modified_base 11: mod_base = OTHER; note = 2'-fluorocytidine-3'-phosphate
  modified_base 12: mod_base = OTHER; note = 2'-O-methyluridine-3'-phosphate
  modified_base 13: mod_base = OTHER; note = 2'-O-methylguanosine-3'-phosphate
  modified_base 14: mod_base = OTHER; note = 2'-O-methylguanosine-3'-phosphate
  modified_base 15: mod_base = OTHER; note = 2'-O-methyladenosine-3'-phosphate
  modified_base 16: mod_base = OTHER; note = 2'-O-methyladenosine-3'-phosphate
  modified_base 17: mod_base = OTHER; note = 2'-O-methyladenosine-3'-phosphate
  modified_base 18: mod_base = OTHER; note = 2'-O-methyluridine-3'-phosphate
  modified_base 19: mod_base = OTHER; note = 2'-O-methyladenosine-3'-phosphate
  modified_base 20: mod_base = OTHER; note = 2'-O-methyluridine-3'-phosphate
  modified_base 21: mod_base = OTHER; note = 2'-O-methyladenosine-3'-phosphate attached to N-[tris(N-acetylgalactosamine-alkyl)-amidodecanoyl)]-4-hydr oxyprolinol Hyp-(N-acetylgalactosamine-alkyl)3
gactttcatcctggaaatata

SEQ ID NO: 215 - RNA, 21 nt, synthetic construct
  misc_feature 1..21: note = Description of Artificial Sequence: Synthetic oligonucleotide
  source 1..21: mol_type = other RNA
  modified_base 1: mod_base = OTHER; note = 2'-O-methylguanosine-3'- phosphorothioate
  modified_base 2: mod_base = OTHER; note = 2'-O-methyladenosine-3'- phosphorothioate
  modified_base 3: mod_base = OTHER; note = 2'-O-methylcytidine-3'-phosphate
  modified_base 4: mod_base = OTHER; note = 2'-O-methyluridine-3'-phosphate
  modified_base 5: mod_base = OTHER; note = 2'-O-methyluridine-3'-phosphate
  modified_base 6: mod_base = OTHER; note = 2'-O-methyluridine-3'-phosphate
  modified_base 7: mod_base = OTHER; note = 2'-fluorocytidine-3'-phosphate
  modified_base 8: mod_base = OTHER; note = 2'-O-methyladenosine-3'-phosphate
  modified_base 9: mod_base = OTHER; note = 2'-O-methyluridine-3'-phosphate
  modified_base 10: mod_base = OTHER; note = 2'-fluorocytidine-3'-phosphate
  modified_base 11: mod_base = OTHER; note = 2'-fluorocytidine-3'-phosphate
  modified_base 12: mod_base = OTHER; note = 2'-O-methyluridine-3'-phosphate
  modified_base 13: mod_base = OTHER; note = 2'-O-methylguanosine-3'-phosphate
  modified_base 14: mod_base = OTHER; note = 2'-O-methylguanosine-3'-phosphate
  modified_base 15: mod_base = OTHER; note = 2'-O-methyladenosine-3'-phosphate
  modified_base 16: mod_base = OTHER; note = 2'-O-methyladenosine-3'-phosphate
  modified_base 17: mod_base = OTHER; note = 2'-O-methyladenosine-3'-phosphate
  modified_base 18: mod_base = OTHER; note = 2'-O-methyluridine-3'-phosphate
  modified_base 19: mod_base = OTHER; note = 2'-O-methyladenosine-3'-phosphate
  modified_base 20: mod_base = OTHER; note = 2'-O-methyluridine-3'-phosphate
  modified_base 21: mod_base = OTHER; note = 2'-O-methyladenosine-3'-phosphate attached to N-[tris(N-acetylgalactosamine-alkyl)-amidodecanoyl)]-4-hydr oxyprolinol Hyp-(N-acetylgalactosamine-alkyl)3
gactttcatcctggaaatata

SEQ ID NO: 216 - RNA, 21 nt, synthetic construct
  misc_feature 1..21: note = Description of Artificial Sequence: Synthetic oligonucleotide
  source 1..21: mol_type = other RNA
  modified_base 1: mod_base = OTHER; note = 2'-O-methylguanosine-3'- phosphorothioate
  modified_base 2: mod_base = OTHER; note = 2'-O-methyladenosine-3'- phosphorothioate
  modified_base 3: mod_base = OTHER; note = 2'-O-methylcytidine-3'-phosphate
  modified_base 4: mod_base = OTHER; note = 2'-O-methyluridine-3'-phosphate
  modified_base 5: mod_base = OTHER; note = 2'-O-methyluridine-3'-phosphate
  modified_base 6: mod_base = OTHER; note = 2'-O-methyluridine-3'-phosphate
  modified_base 7: mod_base = OTHER; note = 2'-fluorocytidine-3'-phosphate
  modified_base 8: mod_base = OTHER; note = 2'-O-methyladenosine-3'-phosphate
  modified_base 9: mod_base = OTHER; note = 2'-O-methyluridine-3'-phosphate
  modified_base 10: mod_base = OTHER; note = 2'-fluorocytidine-3'-phosphate
  modified_base 11: mod_base = OTHER; note = 2'-fluorocytidine-3'-phosphate
  modified_base 12: mod_base = OTHER; note = 2'-O-methyluridine-3'-phosphate
  modified_base 13: mod_base = OTHER; note = 2'-O-methylguanosine-3'-phosphate
  modified_base 14: mod_base = OTHER; note = 2'-O-methylguanosine-3'-phosphate
  modified_base 15: mod_base = OTHER; note = 2'-O-methyladenosine-3'-phosphate
  modified_base 16: mod_base = OTHER; note = 2'-O-methyladenosine-3'-phosphate
  modified_base 17: mod_base = OTHER; note = 2'-O-methyladenosine-3'-phosphate
  modified_base 18: mod_base = OTHER; note = 2'-O-methyluridine-3'-phosphate
  modified_base 19: mod_base = OTHER; note = 2'-O-methyladenosine-3'-phosphate
  modified_base 20: mod_base = OTHER; note = 2'-O-methyluridine-3'-phosphate
  modified_base 21: mod_base = OTHER; note = 2'-O-methyladenosine-3'-phosphate attached to N-[tris(N-acetylgalactosamine-alkyl)-amidodecanoyl)]-4-hydr oxyprolinol Hyp-(N-acetylgalactosamine-alkyl)3
gactttcatcctggaaatata

SEQ ID NO: 217 - RNA, 21 nt, synthetic construct
  misc_feature 1..21: note = Description of Artificial Sequence: Synthetic oligonucleotide
  source 1..21: mol_type = other RNA
  modified_base 1: mod_base = OTHER; note = 2'-O-methylguanosine-3'- phosphorothioate
  modified_base 2: mod_base = OTHER; note = 2'-O-methyladenosine-3'- phosphorothioate
  modified_base 3: mod_base = OTHER; note = 2'-O-methylcytidine-3'-phosphate
  modified_base 4: mod_base = OTHER; note = 2'-O-methyluridine-3'-phosphate
  modified_base 5: mod_base = OTHER; note = 2'-O-methyluridine-3'-phosphate
  modified_base 6: mod_base = OTHER; note = 2'-O-methyluridine-3'-phosphate
  modified_base 7: mod_base = OTHER; note = 2'-fluorocytidine-3'-phosphate
  modified_base 8: mod_base = OTHER; note = 2'-O-methyladenosine-3'-phosphate
  modified_base 9: mod_base = OTHER; note = 2'-O-methyluridine-3'-phosphate
  modified_base 10: mod_base = OTHER; note = 2'-fluorocytidine-3'-phosphate
  modified_base 11: mod_base = OTHER; note = 2'-fluorocytidine-3'-phosphate
  modified_base 12: mod_base = OTHER; note = 2'-O-methyluridine-3'-phosphate
  modified_base 13: mod_base = OTHER; note = 2'-O-methylguanosine-3'-phosphate
  modified_base 14: mod_base = OTHER; note = 2'-O-methylguanosine-3'-phosphate
  modified_base 15: mod_base = OTHER; note = 2'-O-methyladenosine-3'-phosphate
  modified_base 16: mod_base = OTHER; note = 2'-O-methyladenosine-3'-phosphate
  modified_base 17: mod_base = OTHER; note = 2'-O-methyladenosine-3'-phosphate
  modified_base 18: mod_base = OTHER; note = 2'-O-methyluridine-3'-phosphate
  modified_base 19: mod_base = OTHER; note = 2'-O-methyladenosine-3'-phosphate
  modified_base 20: mod_base = OTHER; note = 2'-O-methyluridine-3'-phosphate
  modified_base 21: mod_base = OTHER; note = 2'-O-methyladenosine-3'-phosphate attached to N-[tris(N-acetylgalactosamine-alkyl)-amidodecanoyl)]-4-hydr oxyprolinol Hyp-(N-acetylgalactosamine-alkyl)3
gactttcatcctggaaatata

SEQ ID NO: 218 - RNA, 21 nt, synthetic construct
  misc_feature 1..21: note = Description of Artificial Sequence: Synthetic oligonucleotide
  source 1..21: mol_type = other RNA
  modified_base 1: mod_base = OTHER; note = 2'-O-methylguanosine-3'- phosphorothioate
  modified_base 2: mod_base = OTHER; note = 2'-O-methyladenosine-3'- phosphorothioate
  modified_base 3: mod_base = OTHER; note = 2'-O-methylcytidine-3'-phosphate
  modified_base 4: mod_base = OTHER; note = 2'-O-methyluridine-3'-phosphate
  modified_base 5: mod_base = OTHER; note = 2'-O-methyluridine-3'-phosphate
  modified_base 6: mod_base = OTHER; note = 2'-O-methyluridine-3'-phosphate
  modified_base 7: mod_base = OTHER; note = 2'-O-methylcytidine-3'-phosphate
  modified_base 8: mod_base = OTHER; note = 2'-O-methyladenosine-3'-phosphate
  modified_base 9: mod_base = OTHER; note = 2'-O-methyluridine-3'-phosphate
  modified_base 10: mod_base = OTHER; note = 2'-O-methylcytidine-3'-phosphate
  modified_base 11: mod_base = OTHER; note = 2'-O-methylcytidine-3'-phosphate
  modified_base 12: mod_base = OTHER; note = 2'-O-methyluridine-3'-phosphate
  modified_base 13: mod_base = OTHER; note = 2'-O-methylguanosine-3'-phosphate
  modified_base 14: mod_base = OTHER; note = 2'-O-methylguanosine-3'-phosphate
  modified_base 15: mod_base = OTHER; note = 2'-O-methyladenosine-3'-phosphate
  modified_base 16: mod_base = OTHER; note = 2'-O-methyladenosine-3'-phosphate
  modified_base 17: mod_base = OTHER; note = Adenosine-glycol nucleic acid (GNA)
  modified_base 18: mod_base = OTHER; note = 2'-O-methyluridine-3'-phosphate
  modified_base 19: mod_base = OTHER; note = 2'-O-methyladenosine-3'-phosphate
  modified_base 20: mod_base = OTHER; note = 2'-O-methyluridine-3'-phosphate
  modified_base 21: mod_base = OTHER; note = 2'-O-methyladenosine-3'-phosphate attached to N-[tris(N-acetylgalactosamine-alkyl)-amidodecanoyl)]-4-hydr oxyprolinol Hyp-(N-acetylgalactosamine-alkyl)3
gactttcatcctggaaatata

SEQ ID NO: 219 - DNA, 21 bp, synthetic construct
  misc_feature 1..21: note = Description of Artificial Sequence: Synthetic oligonucleotide
  source 1..21: mol_type = other DNA
  modified_base 1: mod_base = OTHER; note = 2'-O-methylguanosine-3'- phosphorothioate
  modified_base 2: mod_base = OTHER; note = 2'-O-methyladenosine-3'- phosphorothioate
  modified_base 3: mod_base = OTHER; note = 2'-O-methylcytidine-3'-phosphate
  modified_base 4: mod_base = OTHER; note = 2'-O-methyluridine-3'-phosphate
  modified_base 5: mod_base = OTHER; note = 2'-O-methyluridine-3'-phosphate
  modified_base 6: mod_base = OTHER; note = 2'-O-methyluridine-3'-phosphate
  modified_base 7: mod_base = OTHER; note = 2'-O-methylcytidine-3'-phosphate
  modified_base 8: mod_base = OTHER; note = 2'-O-methyladenosine-3'-phosphate
  modified_base 9: mod_base = OTHER; note = 2'-O-methyluridine-3'-phosphate
  modified_base 10: mod_base = OTHER; note = 2'-O-methylcytidine-3'-phosphate
  modified_base 12: mod_base = OTHER; note = 2'-O-methyluridine-3'-phosphate
  modified_base 13: mod_base = OTHER; note = 2'-O-methylguanosine-3'-phosphate
  modified_base 14: mod_base = OTHER; note = 2'-O-methylguanosine-3'-phosphate
  modified_base 15: mod_base = OTHER; note = 2'-O-methyladenosine-3'-phosphate
  modified_base 16: mod_base = OTHER; note = 2'-O-methyladenosine-3'-phosphate
  modified_base 17: mod_base = OTHER; note = Adenosine-glycol nucleic acid (GNA)
  modified_base 18: mod_base = OTHER; note = 2'-O-methyluridine-3'-phosphate
  modified_base 19: mod_base = OTHER; note = 2'-O-methyladenosine-3'-phosphate
  modified_base 20: mod_base = OTHER; note = 2'-O-methyluridine-3'-phosphate
  modified_base 21: mod_base = OTHER; note = 2'-O-methyladenosine-3'-phosphate attached to N-[tris(N-acetylgalactosamine-alkyl)-amidodecanoyl)]-4-hydr oxyprolinol Hyp-(N-acetylgalactosamine-alkyl)3
  misc_feature 1..10: note = RNA
  misc_feature 11: note = DNA
  misc_feature 12..21: note = RNA
gactttcatcctggaaatata

SEQ ID NO: 220 - DNA, 21 bp, synthetic construct
  misc_feature 1..21: note = Description of Artificial Sequence: Synthetic oligonucleotide
  source 1..21: mol_type = other DNA
  modified_base 1: mod_base = OTHER; note = 2'-O-methylguanosine-3'- phosphorothioate
  modified_base 2: mod_base = OTHER; note = 2'-O-methyladenosine-3'- phosphorothioate
  modified_base 3: mod_base = OTHER; note = 2'-O-methylcytidine-3'-phosphate
  modified_base 4: mod_base = OTHER; note = 2'-O-methyluridine-3'-phosphate
  modified_base 6: mod_base = OTHER; note = 2'-O-methyluridine-3'-phosphate
  modified_base 7: mod_base = OTHER; note = 2'-O-methylcytidine-3'-phosphate
  modified_base 8: mod_base = OTHER; note = 2'-O-methyladenosine-3'-phosphate
  modified_base 9: mod_base = OTHER; note = 2'-O-methyluridine-3'-phosphate
  modified_base 10: mod_base = OTHER; note = 2'-O-methylcytidine-3'-phosphate
  modified_base 12: mod_base = OTHER; note = 2'-O-methyluridine-3'-phosphate
  modified_base 13: mod_base = OTHER; note = 2'-O-methylguanosine-3'-phosphate
  modified_base 14: mod_base = OTHER; note = 2'-O-methylguanosine-3'-phosphate
  modified_base 15: mod_base = OTHER; note = 2'-O-methyladenosine-3'-phosphate
  modified_base 16: mod_base = OTHER; note = 2'-O-methyladenosine-3'-phosphate
  modified_base 17: mod_base = OTHER; note = Adenosine-glycol nucleic acid (GNA)
  modified_base 18: mod_base = OTHER; note = 2'-O-methyluridine-3'-phosphate
  modified_base 19: mod_base = OTHER; note = 2'-O-methyladenosine-3'-phosphate
  modified_base 20: mod_base = OTHER; note = 2'-O-methyluridine-3'-phosphate
  modified_base 21: mod_base = OTHER; note = 2'-O-methyladenosine-3'-phosphate attached to N-[tris(N-acetylgalactosamine-alkyl)-amidodecanoyl)]-4-hydr oxyprolinol Hyp-(N-acetylgalactosamine-alkyl)3
  misc_feature 1..4: note = RNA
  misc_feature 5: note = DNA
  misc_feature 6..10: note = RNA
  misc_feature 11: note = DNA
  misc_feature 12..21: note = RNA
gactttcatcctggaaatata

SEQ ID NO: 221 - DNA, 21 bp, synthetic construct
  misc_feature 1..21: note = Description of Artificial Sequence: Synthetic oligonucleotide
  source 1..21: mol_type = other DNA
  modified_base 1: mod_base = OTHER; note = 2'-O-methylguanosine-3'- phosphorothioate
  modified_base 2: mod_base = OTHER; note = 2'-O-methyladenosine-3'- phosphorothioate
  modified_base 3: mod_base = OTHER; note = 2'-O-methylcytidine-3'-phosphate
  modified_base 4: mod_base = OTHER; note = 2'-O-methyluridine-3'-phosphate
  modified_base 5: mod_base = OTHER; note = 2'-O-methyluridine-3'-phosphate
  modified_base 7: mod_base = OTHER; note = 2'-O-methylcytidine-3'-phosphate
  modified_base 8: mod_base = OTHER; note = 2'-O-methyladenosine-3'-phosphate
  modified_base 9: mod_base = OTHER; note = 2'-O-methyluridine-3'-phosphate
  modified_base 10: mod_base = OTHER; note = 2'-O-methylcytidine-3'-phosphate
  modified_base 12: mod_base = OTHER; note = 2'-O-methyluridine-3'-phosphate
  modified_base 13: mod_base = OTHER; note = 2'-O-methylguanosine-3'-phosphate
  modified_base 14: mod_base = OTHER; note = 2'-O-methylguanosine-3'-phosphate
  modified_base 15: mod_base = OTHER; note = 2'-O-methyladenosine-3'-phosphate
  modified_base 16: mod_base = OTHER; note = 2'-O-methyladenosine-3'-phosphate
  modified_base 17: mod_base = OTHER; note = Adenosine-glycol nucleic acid (GNA)
  modified_base 18: mod_base = OTHER; note = 2'-O-methyluridine-3'-phosphate
  modified_base 19: mod_base = OTHER; note = 2'-O-methyladenosine-3'-phosphate
  modified_base 20: mod_base = OTHER; note = 2'-O-methyluridine-3'-phosphate
  modified_base 21: mod_base = OTHER; note = 2'-O-methyladenosine-3'-phosphate attached to N-[tris(N-acetylgalactosamine-alkyl)-amidodecanoyl)]-4-hydr oxyprolinol Hyp-(N-acetylgalactosamine-alkyl)3
  misc_feature 1..5: note = RNA
  misc_feature 6: note = DNA
  misc_feature 7..10: note = RNA
  misc_feature 11: note = DNA
  misc_feature 12..21: note = RNA
gactttcatcctggaaatata

SEQ ID NO: 222 - DNA, 21 bp, synthetic construct
  misc_feature 1..21: note = Description of Artificial Sequence: Synthetic oligonucleotide
  source 1..21: mol_type = other DNA
  modified_base 1: mod_base = OTHER; note = 2'-O-methylguanosine-3'- phosphorothioate
  modified_base 2: mod_base = OTHER; note = 2'-O-methyladenosine-3'- phosphorothioate
  modified_base 3: mod_base = OTHER; note = 2'-O-methylcytidine-3'-phosphate
  modified_base 4: mod_base = OTHER; note = 2'-O-methyluridine-3'-phosphate
  modified_base 5: mod_base = OTHER; note = 2'-O-methyluridine-3'-phosphate
  modified_base 6: mod_base = OTHER; note = 2'-O-methyluridine-3'-phosphate
  modified_base 8: mod_base = OTHER; note = 2'-O-methyladenosine-3'-phosphate
  modified_base 9: mod_base = OTHER; note = 2'-O-methyluridine-3'-phosphate
  modified_base 10: mod_base = OTHER; note = 2'-O-methylcytidine-3'-phosphate
  modified_base 12: mod_base = OTHER; note = 2'-O-methyluridine-3'-phosphate
  modified_base 13: mod_base = OTHER; note = 2'-O-methylguanosine-3'-phosphate
  modified_base 14: mod_base = OTHER; note = 2'-O-methylguanosine-3'-phosphate
  modified_base 15: mod_base = OTHER; note = 2'-O-methyladenosine-3'-phosphate
  modified_base 16: mod_base = OTHER; note = 2'-O-methyladenosine-3'-phosphate
  modified_base 17: mod_base = OTHER; note = Adenosine-glycol nucleic acid (GNA)
  modified_base 18: mod_base = OTHER; note = 2'-O-methyluridine-3'-phosphate
  modified_base 19: mod_base = OTHER; note = 2'-O-methyladenosine-3'-phosphate
  modified_base 20: mod_base = OTHER; note = 2'-O-methyluridine-3'-phosphate
  modified_base 21: mod_base = OTHER; note = 2'-O-methyladenosine-3'-phosphate attached to N-[tris(N-acetylgalactosamine-alkyl)-amidodecanoyl)]-4-hydr oxyprolinol Hyp-(N-acetylgalactosamine-alkyl)3
  misc_feature 1..6: note = RNA
  misc_feature 7: note = DNA
  misc_feature 8..10: note = RNA
  misc_feature 11: note = DNA
  misc_feature 12..21: note = RNA
gactttcatcctggaaatata

SEQ ID NO: 223 - DNA, 21 bp, synthetic construct
  misc_feature 1..21: note = Description of Artificial Sequence: Synthetic oligonucleotide
  source 1..21: mol_type = other DNA
  modified_base 1: mod_base = OTHER; note = 2'-O-methylguanosine-3'- phosphorothioate
  modified_base 2: mod_base = OTHER; note = 2'-O-methyladenosine-3'- phosphorothioate
  modified_base 3: mod_base = OTHER; note = 2'-O-methylcytidine-3'-phosphate
  modified_base 4: mod_base = OTHER; note = 2'-O-methyluridine-3'-phosphate
  modified_base 5: mod_base = OTHER; note = 2'-O-methyluridine-3'-phosphate
  modified_base 6: mod_base = OTHER; note = 2'-O-methyluridine-3'-phosphate
  modified_base 7: mod_base = OTHER; note = 2'-O-methylcytidine-3'-phosphate
  modified_base 8: mod_base = OTHER; note = 2'-O-methyladenosine-3'-phosphate
  modified_base 9: mod_base = OTHER; note = 2'-O-methyluridine-3'-phosphate
  modified_base 10: mod_base = OTHER; note = 2'-O-methylcytidine-3'-phosphate
  modified_base 12: mod_base = OTHER; note = 2'-O-methyluridine-3'-phosphate
  modified_base 13: mod_base = OTHER; note = 2'-O-methylguanosine-3'-phosphate
  modified_base 14: mod_base = OTHER; note = 2'-O-methylguanosine-3'-phosphate
  modified_base 15: mod_base = OTHER; note = 2'-O-methyladenosine-3'-phosphate
  modified_base 16: mod_base = OTHER; note = 2'-O-methyladenosine-3'-phosphate
  modified_base 18: mod_base = OTHER; note = 2'-O-methyluridine-3'-phosphate
  modified_base 19: mod_base = OTHER; note = 2'-O-methyladenosine-3'-phosphate
  modified_base 20: mod_base = OTHER; note = 2'-O-methyluridine-3'-phosphate
  modified_base 21: mod_base = OTHER; note = 2'-O-methyladenosine-3'-phosphate attached to N-[tris(N-acetylgalactosamine-alkyl)-amidodecanoyl)]-4-hydr oxyprolinol Hyp-(N-acetylgalactosamine-alkyl)3
  misc_feature 1..10: note = RNA
  misc_feature 11: note = DNA
  misc_feature 12..16: note = RNA
  misc_feature 17: note = DNA
  misc_feature 18..21: note = RNA
gactttcatcctggaaatata

SEQ ID NO: 224 - DNA, 21 bp, synthetic construct
  misc_feature 1..21: note = Description of Artificial Sequence: Synthetic oligonucleotide
  source 1..21: mol_type = other DNA
  modified_base 1: mod_base = OTHER; note = 2'-O-methylguanosine-3'- phosphorothioate
  modified_base 2: mod_base = OTHER; note = 2'-O-methyladenosine-3'- phosphorothioate
  modified_base 3: mod_base = OTHER; note = 2'-O-methylcytidine-3'-phosphate
  modified_base 4: mod_base = OTHER; note = 2'-O-methyluridine-3'-phosphate
  modified_base 5: mod_base = OTHER; note = 2'-O-methyluridine-3'-phosphate
  modified_base 6: mod_base = OTHER; note = 2'-O-methyluridine-3'-phosphate
  modified_base 7: mod_base = OTHER; note = 2'-O-methylcytidine-3'-phosphate
  modified_base 8: mod_base = OTHER; note = 2'-O-methyladenosine-3'-phosphate
  modified_base 9: mod_base = OTHER; note = 2'-O-methyluridine-3'-phosphate
  modified_base 10: mod_base = OTHER; note = 2'-O-methylcytidine-3'-phosphate
  modified_base 12: mod_base = OTHER; note = 2'-O-methyluridine-3'-phosphate
  modified_base 13: mod_base = OTHER; note = 2'-O-methylguanosine-3'-phosphate
  modified_base 14: mod_base = OTHER; note = 2'-O-methylguanosine-3'-phosphate
  modified_base 15: mod_base = OTHER; note = 2'-O-methyladenosine-3'-phosphate
  modified_base 16: mod_base = OTHER; note = 2'-O-methyladenosine-3'-phosphate
  modified_base 18: mod_base = OTHER; note = 2'-O-methyluridine-3'-phosphate
  modified_base 19: mod_base = OTHER; note = 2'-O-methyladenosine-3'-phosphate
  modified_base 20: mod_base = OTHER; note = 2'-O-methyluridine-3'-phosphate
  modified_base 21: mod_base = OTHER; note = 2'-O-methyladenosine-3'-phosphate attached to N-[tris(N-acetylgalactosamine-alkyl)-amidodecanoyl)]-4-hydr oxyprolinol Hyp-(N-acetylgalactosamine-alkyl)3
  misc_feature 1..10: note = RNA
  misc_feature 11: note = DNA
  misc_feature 12..16: note = RNA
  misc_feature 17: note = DNA
  misc_feature 18..21: note = RNA
gactttcatcctggaattata

SEQ ID NO: 225 - DNA, 21 bp, synthetic construct
  misc_feature 1..21: note = Description of Artificial Sequence: Synthetic oligonucleotide
  source 1..21: mol_type = other DNA
  modified_base 1: mod_base = OTHER; note = 2'-O-methylguanosine-3'- phosphorothioate
  modified_base 2: mod_base = OTHER; note = 2'-O-methyladenosine-3'- phosphorothioate
  modified_base 3: mod_base = OTHER; note = 2'-O-methylcytidine-3'-phosphate
  modified_base 4: mod_base = OTHER; note = 2'-O-methyluridine-3'-phosphate
  modified_base 5: mod_base = OTHER; note = 2'-O-methyluridine-3'-phosphate
  modified_base 6: mod_base = OTHER; note = 2'-O-methyluridine-3'-phosphate
  modified_base 7: mod_base = OTHER; note = 2'-O-methylcytidine-3'-phosphate
  modified_base 8: mod_base = OTHER; note = 2'-O-methyladenosine-3'-phosphate
  modified_base 9: mod_base = OTHER; note = 2'-O-methyluridine-3'-phosphate
  modified_base 10: mod_base = OTHER; note = 2'-O-methylcytidine-3'-phosphate
  modified_base 12: mod_base = OTHER; note = 2'-O-methyluridine-3'-phosphate
  modified_base 13: mod_base = OTHER; note = 2'-O-methylguanosine-3'-phosphate
  modified_base 14: mod_base = OTHER; note = 2'-O-methylguanosine-3'-phosphate
  modified_base 15: mod_base = OTHER; note = 2'-O-methyladenosine-3'-phosphate
  modified_base 16: mod_base = OTHER; note = 2'-O-methyladenosine-3'-phosphate
  modified_base 17: mod_base = OTHER; note 2-hydroxymethyl-tetrahydrofurane-4-methoxy-3-phosphate (abasic 2'-O-Methyl furanose)
  modified_base 18: mod_base = OTHER; note = 2'-O-methyluridine-3'-phosphate
  modified_base 19: mod_base = OTHER; note = 2'-O-methyladenosine-3'-phosphate
  modified_base 20: mod_base = OTHER; note = 2'-O-methyluridine-3'-phosphate
  modified_base 21: mod_base = OTHER; note = 2'-O-methyladenosine-3'-phosphate attached to N-[tris(N-acetylgalactosamine-alkyl)-amidodecanoyl)]-4-hydr oxyprolinol Hyp-(N-acetylgalactosamine-alkyl)3
  misc_feature 1..10: note = RNA
  misc_feature 11: note = DNA
  misc_feature 12..21: note = RNA
gactttcatcctggaantata

SEQ ID NO: 226 - DNA, 21 bp, synthetic construct
  misc_feature 1..21: note = Description of Artificial Sequence: Synthetic oligonucleotide
  source 1..21: mol_type = other DNA
  modified_base 1: mod_base = OTHER; note = 2'-O-methylguanosine-3'- phosphorothioate
  modified_base 2: mod_base = OTHER; note = 2'-O-methyladenosine-3'- phosphorothioate
  modified_base 3: mod_base = OTHER; note = 2'-O-methylcytidine-3'-phosphate
  modified_base 4: mod_base = OTHER; note = 2'-O-methyluridine-3'-phosphate
  modified_base 5: mod_base = OTHER; note = 2'-O-methyluridine-3'-phosphate
  modified_base 6: mod_base = OTHER; note = 2'-O-methyluridine-3'-phosphate
  modified_base 7: mod_base = OTHER; note = 2'-O-methylcytidine-3'-phosphate
  modified_base 8: mod_base = OTHER; note = 2'-O-methyladenosine-3'-phosphate
  modified_base 9: mod_base = OTHER; note = 2'-O-methyluridine-3'-phosphate
  modified_base 10: mod_base = OTHER; note = 2'-O-methylcytidine-3'-phosphate
  modified_base 12: mod_base = OTHER; note = 2'-O-methyluridine-3'-phosphate
  modified_base 13: mod_base = OTHER; note = 2'-O-methylguanosine-3'-phosphate
  modified_base 14: mod_base = OTHER; note = 2'-O-methylguanosine-3'-phosphate
  modified_base 16: mod_base = OTHER; note = 2'-O-methyladenosine-3'-phosphate
  modified_base 18: mod_base = OTHER; note = 2'-O-methyluridine-3'-phosphate
  modified_base 19: mod_base = OTHER; note = 2'-O-methyladenosine-3'-phosphate
  modified_base 20: mod_base = OTHER; note = 2'-O-methyluridine-3'-phosphate
  modified_base 21: mod_base = OTHER; note = 2'-O-methyladenosine-3'-phosphate attached to N-[tris(N-acetylgalactosamine-alkyl)-amidodecanoyl)]-4-hydr oxyprolinol Hyp-(N-acetylgalactosamine-alkyl)3
  misc_feature 1..10: note = RNA
  misc_feature 11: note = DNA
  misc_feature 12..14: note = RNA
  misc_feature 15: note = DNA
  misc_feature 16: note = RNA
  misc_feature 17: note = DNA
  misc_feature 18..21: note = RNA
gactttcatcctggaattata

SEQ ID NO: 227 - DNA, 21 bp, synthetic construct
  misc_feature 1..21: note = Description of Artificial Sequence: Synthetic oligonucleotide
  source 1..21: mol_type = other DNA
  modified_base 1: mod_base = OTHER; note = 2'-O-methylguanosine-3'- phosphorothioate
  modified_base 2: mod_base = OTHER; note = 2'-O-methyladenosine-3'- phosphorothioate
  modified_base 3: mod_base = OTHER; note = 2'-O-methylcytidine-3'-phosphate
  modified_base 4: mod_base = OTHER; note = 2'-O-methyluridine-3'-phosphate
  modified_base 5: mod_base = OTHER; note = 2'-O-methyluridine-3'-phosphate
  modified_base 6: mod_base = OTHER; note = 2'-O-methyluridine-3'-phosphate
  modified_base 7: mod_base = OTHER; note = 2'-O-methylcytidine-3'-phosphate
  modified_base 8: mod_base = OTHER; note = 2'-O-methyladenosine-3'-phosphate
  modified_base 9: mod_base = OTHER; note = 2'-O-methyluridine-3'-phosphate
  modified_base 10: mod_base = OTHER; note = 2'-O-methylcytidine-3'-phosphate
  modified_base 12: mod_base = OTHER; note = 2'-O-methyluridine-3'-phosphate
  modified_base 13: mod_base = OTHER; note = 2'-O-methylguanosine-3'-phosphate
  modified_base 14: mod_base = OTHER; note = 2'-O-methylguanosine-3'-phosphate
  modified_base 15: mod_base = OTHER; note = 2'-O-methyladenosine-3'-phosphate
  modified_base 16: mod_base = OTHER; note = 2'-O-methyladenosine-3'-phosphate
  modified_base 18: mod_base = OTHER; note = 2'-O-methyluridine-3'-phosphate
  modified_base 20: mod_base = OTHER; note = 2'-O-methyluridine-3'-phosphate
  modified_base 21: mod_base = OTHER; note = 2'-O-methyladenosine-3'-phosphate attached to N-[tris(N-acetylgalactosamine-alkyl)-amidodecanoyl)]-4-hydr oxyprolinol Hyp-(N-acetylgalactosamine-alkyl)3
  misc_feature 1..10: note = RNA
  misc_feature 11: note = DNA
  misc_feature 12..16: note = RNA
  misc_feature 17: note = DNA
  misc_feature 18: note = RNA
  misc_feature 19: note = DNA
  misc_feature 20..21: note = RNA
gactttcatcctggaattata

SEQ ID NO: 228 - DNA, 21 bp, synthetic construct
  misc_feature 1..21: note = Description of Artificial Sequence: Synthetic oligonucleotide
  source 1..21: mol_type = other DNA
  modified_base 1: mod_base = OTHER; note = 2'-O-methylguanosine-3'- phosphorothioate
  modified_base 2: mod_base = OTHER; note = 2'-O-methyladenosine-3'- phosphorothioate
  modified_base 3: mod_base = OTHER; note = 2'-O-methylcytidine-3'-phosphate
  modified_base 4: mod_base = OTHER; note = 2'-O-methyluridine-3'-phosphate
  modified_base 5: mod_base = OTHER; note = 2'-O-methyluridine-3'-phosphate
  modified_base 6: mod_base = OTHER; note = 2'-O-methyluridine-3'-phosphate
  modified_base 7: mod_base = OTHER; note = 2'-O-methylcytidine-3'-phosphate
  modified_base 8: mod_base = OTHER; note = 2'-O-methyladenosine-3'-phosphate
  modified_base 9: mod_base = OTHER; note = 2'-O-methyluridine-3'-phosphate
  modified_base 10: mod_base = OTHER; note = 2'-O-methylcytidine-3'-phosphate
  modified_base 12: mod_base = OTHER; note = 2'-O-methyluridine-3'-phosphate
  modified_base 13: mod_base = OTHER; note = 2'-O-methylguanosine-3'-phosphate
  modified_base 14: mod_base = OTHER; note = 2'-O-methylguanosine-3'-phosphate
  modified_base 15: mod_base = OTHER; note = 2'-O-methyladenosine-3'-phosphate
  modified_base 16: mod_base = OTHER; note = 2'-O-methyladenosine-3'-phosphate
  modified_base 17: mod_base = OTHER; note = Adenosine-glycol nucleic acid (GNA)
  modified_base 18: mod_base = OTHER; note = 2'-O-methyluridine-3'-phosphate
  modified_base 20: mod_base = OTHER; note = 2'-O-methyluridine-3'-phosphate
  modified_base 21: mod_base = OTHER; note = 2'-O-methyladenosine-3'-phosphate attached to N-[tris(N-acetylgalactosamine-alkyl)-amidodecanoyl)]-4-hydr oxyprolinol Hyp-(N-acetylgalactosamine-alkyl)3
  misc_feature 1..10: note = RNA
  misc_feature 11: note = DNA
  misc_feature 12..18: note = RNA
  misc_feature 19: note = DNA
  misc_feature 20..21: note = RNA
gactttcatcctggaaatata

SEQ ID NO: 229 - DNA, 21 bp, synthetic construct
  misc_feature 1..21: note = Description of Artificial Sequence: Synthetic oligonucleotide
  source 1..21: mol_type = other DNA
  modified_base 1: mod_base = OTHER; note = 2'-O-methylguanosine-3'- phosphorothioate
  modified_base 2: mod_base = OTHER; note = 2'-O-methyladenosine-3'- phosphorothioate
  modified_base 3: mod_base = OTHER; note = 2'-O-methylcytidine-3'-phosphate
  modified_base 4: mod_base = OTHER; note = 2'-O-methyluridine-3'-phosphate
  modified_base 5: mod_base = OTHER; note = 2'-O-methyluridine-3'-phosphate
  modified_base 7: mod_base = OTHER; note = 2'-O-methylcytidine-3'-phosphate
  modified_base 8: mod_base = OTHER; note = 2'-O-methyladenosine-3'-phosphate
  modified_base 9: mod_base = OTHER; note = 2'-O-methyluridine-3'-phosphate
  modified_base 10: mod_base = OTHER; note = 2'-O-methylcytidine-3'-phosphate
  modified_base 12: mod_base = OTHER; note = 2'-O-methyluridine-3'-phosphate
  modified_base 13: mod_base = OTHER; note = 2'-O-methylguanosine-3'-phosphate
  modified_base 14: mod_base = OTHER; note = 2'-O-methylguanosine-3'-phosphate
  modified_base 15: mod_base = OTHER; note = 2'-O-methyladenosine-3'-phosphate
  modified_base 16: mod_base = OTHER; note = 2'-O-methyladenosine-3'-phosphate
  modified_base 18: mod_base = OTHER; note = 2'-O-methyluridine-3'-phosphate
  modified_base 20: mod_base = OTHER; note = 2'-O-methyluridine-3'-phosphate
  modified_base 21: mod_base = OTHER; note = 2'-O-methyladenosine-3'-phosphate attached to N-[tris(N-acetylgalactosamine-alkyl)-amidodecanoyl)]-4-hydr oxyprolinol Hyp-(N-acetylgalactosamine-alkyl)3
  misc_feature 1..5: note = RNA
  misc_feature 6: note = DNA
  misc_feature 7..10: note = RNA
  misc_feature 11: note = DNA
  misc_feature 12..16: note = RNA
  misc_feature 17: note = DNA
  misc_feature 18: note = RNA
  misc_feature 19: note = DNA
  misc_feature 20..21: note = RNA
gactttcatcctggaaatata

SEQ ID NO: 230 - RNA, 21 nt, synthetic construct
  misc_feature 1..21: note = Description of Artificial Sequence: Synthetic oligonucleotide
  source 1..21: mol_type = other RNA
  modified_base 1: mod_base = OTHER; note = 2'-fluoroguanosine-3'-phosphorothioate
  modified_base 2: mod_base = OTHER; note = 2'-O-methyladenosine-3'- phosphorothioate
  modified_base 3: mod_base = OTHER; note = 2'-fluorocytidine-3'-phosphate
  modified_base 4: mod_base = OTHER; note = 2'-O-methyluridine-3'-phosphate
  modified_base 5: mod_base = OTHER; note = 2'-fluorouridine-3'-phosphate
  modified_base 6: mod_base = OTHER; note = 2'-O-methyluridine-3'-phosphate
  modified_base 7: mod_base = OTHER; note = 2'-fluorocytidine-3'-phosphate
  modified_base 8: mod_base = OTHER; note = 2'-O-methyladenosine-3'-phosphate
  modified_base 9: mod_base = OTHER; note = 2'-fluorouridine-3'-phosphate
  modified_base 10: mod_base = OTHER; note = 2'-fluorocytidine-3'-phosphate
  modified_base 11: mod_base = OTHER; note = 2'-fluorocytidine-3'-phosphate
  modified_base 12: mod_base = OTHER; note = 2'-O-methyluridine-3'-phosphate
  modified_base 13: mod_base = OTHER; note = 2'-fluoroguanosine-3'-phosphate
  modified_base 14: mod_base = OTHER; note = 2'-O-methylguanosine-3'-phosphate
  modified_base 15: mod_base = OTHER; note = 2'-fluoroadenosine-3'-phosphate
  modified_base 16: mod_base = OTHER; note = 2'-O-methyladenosine-3'-phosphate
  modified_base 17: mod_base = OTHER; note = 2'-fluoroadenosine-3'-phosphate
  modified_base 18: mod_base = OTHER; note = 2'-O-methyluridine-3'-phosphate
  modified_base 19: mod_base = OTHER; note = 2'-fluoroadenosine-3'-phosphate
  modified_base 20: mod_base = OTHER; note = 2'-O-methyluridine-3'-phosphate
  modified_base 21: mod_base = OTHER; note = 2'-fluoroadenosine-3'-phosphate attached to N-[tris(N-acetylgalactosamine-alkyl)-amidodecanoyl)]-4-hydr oxyprolinol Hyp-(N-acetylgalactosamine-alkyl)3
gactttcatcctggaaatata

SEQ ID NO: 231 - RNA, 21 nt, synthetic construct
  misc_feature 1..21: note = Description of Artificial Sequence: Synthetic oligonucleotide
  source 1..21: mol_type = other RNA
  modified_base 1: mod_base = OTHER; note = 2'-fluoroguanosine-3'-phosphorothioate
  modified_base 2: mod_base = OTHER; note = 2'-O-methyladenosine-3'- phosphorothioate
  modified_base 3: mod_base = OTHER; note = 2'-fluorocytidine-3'-phosphate
  modified_base 4: mod_base = OTHER; note = 2'-O-methyluridine-3'-phosphate
  modified_base 5: mod_base = OTHER; note = 2'-fluorouridine-3'-phosphate
  modified_base 6: mod_base = OTHER; note = 2'-O-methyluridine-3'-phosphate
  modified_base 7: mod_base = OTHER; note = 2'-fluorocytidine-3'-phosphate
  modified_base 8: mod_base = OTHER; note = 2'-O-methyladenosine-3'-phosphate
  modified_base 9: mod_base = OTHER; note = 2'-fluorouridine-3'-phosphate
  modified_base 10: mod_base = OTHER; note = 2'-fluorocytidine-3'-phosphate
  modified_base 11: mod_base = OTHER; note = 2'-fluorocytidine-3'-phosphate
  modified_base 12: mod_base = OTHER; note = 2'-O-methyluridine-3'-phosphate
  modified_base 13: mod_base = OTHER; note = 2'-fluoroguanosine-3'-phosphate
  modified_base 14: mod_base = OTHER; note = 2'-O-methylguanosine-3'-phosphate
  modified_base 15: mod_base = OTHER; note = 2'-fluoroadenosine-3'-phosphate
  modified_base 16: mod_base = OTHER; note = 2'-O-methyladenosine-3'-phosphate
  modified_base 17: mod_base = OTHER; note = 2'-fluoroadenosine-3'-phosphate
  modified_base 18: mod_base = OTHER; note = 2'-O-methyluridine-3'-phosphate
  modified_base 19: mod_base = OTHER; note = 2'-fluoroadenosine-3'-phosphate
  modified_base 20: mod_base = OTHER; note = 2'-O-methyluridine-3'-phosphate
  modified_base 21: mod_base = OTHER; note = 2'-fluoroadenosine-3'-phosphate attached to N-[tris(N-acetylgalactosamine-alkyl)-amidodecanoyl)]-4-hydr oxyprolinol Hyp-(N-acetylgalactosamine-alkyl)3
gactttcatcctggaaatata

SEQ ID NO: 232 - RNA, 21 nt, synthetic construct
  misc_feature 1..21: note = Description of Artificial Sequence: Synthetic oligonucleotide
  source 1..21: mol_type = other RNA
  modified_base 1: mod_base = OTHER; note = 2'-fluoroguanosine-3'-phosphorothioate
  modified_base 2: mod_base = OTHER; note = 2'-O-methyladenosine-3'- phosphorothioate
  modified_base 3: mod_base = OTHER; note = 2'-fluorocytidine-3'-phosphate
  modified_base 4: mod_base = OTHER; note = 2'-O-methyluridine-3'-phosphate
  modified_base 5: mod_base = OTHER; note = 2'-fluorouridine-3'-phosphate
  modified_base 6: mod_base = OTHER; note = 2'-O-methyluridine-3'-phosphate
  modified_base 7: mod_base = OTHER; note = 2'-fluorocytidine-3'-phosphate
  modified_base 8: mod_base = OTHER; note = 2'-O-methyladenosine-3'-phosphate
  modified_base 9: mod_base = OTHER; note = 2'-fluorouridine-3'-phosphate
  modified_base 10: mod_base = OTHER; note = 2'-fluorocytidine-3'-phosphate
  modified_base 11: mod_base = OTHER; note = 2'-fluorocytidine-3'-phosphate
  modified_base 12: mod_base = OTHER; note = 2'-O-methyluridine-3'-phosphate
  modified_base 13: mod_base = OTHER; note = 2'-fluoroguanosine-3'-phosphate
  modified_base 14: mod_base = OTHER; note = 2'-O-methylguanosine-3'-phosphate
  modified_base 15: mod_base = OTHER; note = 2'-fluoroadenosine-3'-phosphate
  modified_base 16: mod_base = OTHER; note = 2'-O-methyladenosine-3'-phosphate
  modified_base 17: mod_base = OTHER; note = 2'-fluoroadenosine-3'-phosphate
  modified_base 18: mod_base = OTHER; note = 2'-O-methyluridine-3'-phosphate
  modified_base 19: mod_base = OTHER; note = 2'-fluoroadenosine-3'-phosphate
  modified_base 20: mod_base = OTHER; note = 2'-O-methyluridine-3'-phosphate
  modified_base 21: mod_base = OTHER; note = 2'-fluoroadenosine-3'-phosphate attached to N-[tris(N-acetylgalactosamine-alkyl)-amidodecanoyl)]-4-hydr oxyprolinol Hyp-(N-acetylgalactosamine-alkyl)3
gactttcatcctggaaatata

SEQ ID NO: 233 - RNA, 21 nt, synthetic construct
  misc_feature 1..21: note = Description of Artificial Sequence: Synthetic oligonucleotide
  source 1..21: mol_type = other RNA
  modified_base 1: mod_base = OTHER; note = 2'-fluoroguanosine-3'-phosphorothioate
  modified_base 2: mod_base = OTHER; note = 2'-O-methyladenosine-3'- phosphorothioate
  modified_base 3: mod_base = OTHER; note = 2'-fluorocytidine-3'-phosphate
  modified_base 4: mod_base = OTHER; note = 2'-O-methyluridine-3'-phosphate
  modified_base 5: mod_base = OTHER; note = 2'-fluorouridine-3'-phosphate
  modified_base 6: mod_base = OTHER; note = 2'-O-methyluridine-3'-phosphate
  modified_base 7: mod_base = OTHER; note = 2'-fluorocytidine-3'-phosphate
  modified_base 8: mod_base = OTHER; note = 2'-O-methyladenosine-3'-phosphate
  modified_base 9: mod_base = OTHER; note = 2'-fluorouridine-3'-phosphate
  modified_base 10: mod_base = OTHER; note = 2'-fluorocytidine-3'-phosphate
  modified_base 11: mod_base = OTHER; note = 2'-fluorocytidine-3'-phosphate
  modified_base 12: mod_base = OTHER; note = 2'-O-methyluridine-3'-phosphate
  modified_base 13: mod_base = OTHER; note = 2'-fluoroguanosine-3'-phosphate
  modified_base 14: mod_base = OTHER; note = 2'-O-methylguanosine-3'-phosphate
  modified_base 15: mod_base = OTHER; note = 2'-fluoroadenosine-3'-phosphate
  modified_base 16: mod_base = OTHER; note = 2'-O-methyladenosine-3'-phosphate
  modified_base 17: mod_base = OTHER; note = 2'-fluoroadenosine-3'-phosphate
  modified_base 18: mod_base = OTHER; note = 2'-O-methyluridine-3'-phosphate
  modified_base 19: mod_base = OTHER; note = 2'-fluoroadenosine-3'-phosphate
  modified_base 20: mod_base = OTHER; note = 2'-O-methyluridine-3'-phosphate
  modified_base 21: mod_base = OTHER; note = 2'-fluoroadenosine-3'-phosphate attached to N-[tris(N-acetylgalactosamine-alkyl)-amidodecanoyl)]-4-hydr oxyprolinol Hyp-(N-acetylgalactosamine-alkyl)3
gactttcatcctggaaatata

SEQ ID NO: 234 - RNA, 21 nt, synthetic construct
  misc_feature 1..21: note = Description of Artificial Sequence: Synthetic oligonucleotide
  source 1..21: mol_type = other RNA
  modified_base 1: mod_base = OTHER; note = 2'-fluoroguanosine-3'-phosphorothioate
  modified_base 2: mod_base = OTHER; note = 2'-O-methyladenosine-3'- phosphorothioate
  modified_base 3: mod_base = OTHER; note = 2'-fluorocytidine-3'-phosphate
  modified_base 4: mod_base = OTHER; note = 2'-O-methyluridine-3'-phosphate
  modified_base 5: mod_base = OTHER; note = 2'-fluorouridine-3'-phosphate
  modified_base 6: mod_base = OTHER; note = 2'-O-methyluridine-3'-phosphate
  modified_base 7: mod_base = OTHER; note = 2'-fluorocytidine-3'-phosphate
  modified_base 8: mod_base = OTHER; note = 2'-O-methyladenosine-3'-phosphate
  modified_base 9: mod_base = OTHER; note = 2'-fluorouridine-3'-phosphate
  modified_base 10: mod_base = OTHER; note = 2'-fluorocytidine-3'-phosphate
  modified_base 11: mod_base = OTHER; note = 2'-fluorocytidine-3'-phosphate
  modified_base 12: mod_base = OTHER; note = 2'-O-methyluridine-3'-phosphate
  modified_base 13: mod_base = OTHER; note = 2'-fluoroguanosine-3'-phosphate
  modified_base 14: mod_base = OTHER; note = 2'-O-methylguanosine-3'-phosphate
  modified_base 15: mod_base = OTHER; note = 2'-fluoroadenosine-3'-phosphate
  modified_base 16: mod_base = OTHER; note = 2'-O-methyladenosine-3'-phosphate
  modified_base 17: mod_base = OTHER; note = 2'-fluoroadenosine-3'-phosphate
  modified_base 18: mod_base = OTHER; note = 2'-O-methyluridine-3'-phosphate
  modified_base 19: mod_base = OTHER; note = 2'-fluoroadenosine-3'-phosphate
  modified_base 20: mod_base = OTHER; note = 2'-O-methyluridine-3'-phosphate
  modified_base 21: mod_base = OTHER; note = 2'-fluoroadenosine-3'-phosphate attached to N-[tris(N-acetylgalactosamine-alkyl)-amidodecanoyl)]-4-hydr oxyprolinol Hyp-(N-acetylgalactosamine-alkyl)3
gactttcatcctggaaatata

SEQ ID NO: 235 - RNA, 21 nt, synthetic construct
  misc_feature 1..21: note = Description of Artificial Sequence: Synthetic oligonucleotide
  source 1..21: mol_type = other RNA
  modified_base 1: mod_base = OTHER; note = 2'-fluoroguanosine-3'-phosphorothioate
  modified_base 2: mod_base = OTHER; note = 2'-O-methyladenosine-3'- phosphorothioate
  modified_base 3: mod_base = OTHER; note = 2'-fluorocytidine-3'-phosphate
  modified_base 4: mod_base = OTHER; note = 2'-O-methyluridine-3'-phosphate
  modified_base 5: mod_base = OTHER; note = 2'-fluorouridine-3'-phosphate
  modified_base 6: mod_base = OTHER; note = 2'-O-methyluridine-3'-phosphate
  modified_base 7: mod_base = OTHER; note = 2'-fluorocytidine-3'-phosphate
  modified_base 8: mod_base = OTHER; note = 2'-O-methyladenosine-3'-phosphate
  modified_base 9: mod_base = OTHER; note = 2'-fluorouridine-3'-phosphate
  modified_base 10: mod_base = OTHER; note = 2'-fluorocytidine-3'-phosphate
  modified_base 11: mod_base = OTHER; note = 2'-fluorocytidine-3'-phosphate
  modified_base 12: mod_base = OTHER; note = 2'-O-methyluridine-3'-phosphate
  modified_base 13: mod_base = OTHER; note = 2'-fluoroguanosine-3'-phosphate
  modified_base 14: mod_base = OTHER; note = 2'-O-methylguanosine-3'-phosphate
  modified_base 15: mod_base = OTHER; note = 2'-fluoroadenosine-3'-phosphate
  modified_base 16: mod_base = OTHER; note = 2'-O-methyladenosine-3'-phosphate
  modified_base 17: mod_base = OTHER; note = 2'-fluoroadenosine-3'-phosphate
  modified_base 18: mod_base = OTHER; note = 2'-O-methyluridine-3'-phosphate
  modified_base 19: mod_base = OTHER; note = 2'-fluoroadenosine-3'-phosphate
  modified_base 20: mod_base = OTHER; note = 2'-O-methyluridine-3'-phosphate
  modified_base 21: mod_base = OTHER; note = 2'-fluoroadenosine-3'-phosphate attached to N-[tris(N-acetylgalactosamine-alkyl)-amidodecanoyl)]-4-hydr oxyprolinol Hyp-(N-acetylgalactosamine-alkyl)3
gactttcatcctggaaatata

SEQ ID NO: 236 - RNA, 21 nt, synthetic construct
  misc_feature 1..21: note = Description of Artificial Sequence: Synthetic oligonucleotide
  source 1..21: mol_type = other RNA
  modified_base 1: mod_base = OTHER; note = 2'-fluoroguanosine-3'-phosphorothioate
  modified_base 2: mod_base = OTHER; note = 2'-O-methyladenosine-3'- phosphorothioate
  modified_base 3: mod_base = OTHER; note = 2'-fluorocytidine-3'-phosphate
  modified_base 4: mod_base = OTHER; note = 2'-O-methyluridine-3'-phosphate
  modified_base 5: mod_base = OTHER; note = 2'-fluorouridine-3'-phosphate
  modified_base 6: mod_base = OTHER; note = 2'-O-methyluridine-3'-phosphate
  modified_base 7: mod_base = OTHER; note = 2'-fluorocytidine-3'-phosphate
  modified_base 8: mod_base = OTHER; note = 2'-O-methyladenosine-3'-phosphate
  modified_base 9: mod_base = OTHER; note = 2'-fluorouridine-3'-phosphate
  modified_base 10: mod_base = OTHER; note = 2'-fluorocytidine-3'-phosphate
  modified_base 11: mod_base = OTHER; note = 2'-fluorocytidine-3'-phosphate
  modified_base 12: mod_base = OTHER; note = 2'-O-methyluridine-3'-phosphate
  modified_base 13: mod_base = OTHER; note = 2'-fluoroguanosine-3'-phosphate
  modified_base 14: mod_base = OTHER; note = 2'-O-methylguanosine-3'-phosphate
  modified_base 15: mod_base = OTHER; note = 2'-fluoroadenosine-3'-phosphate
  modified_base 16: mod_base = OTHER; note = 2'-O-methyladenosine-3'-phosphate
  modified_base 17: mod_base = OTHER; note = 2'-fluoroadenosine-3'-phosphate
  modified_base 18: mod_base = OTHER; note = 2'-O-methyluridine-3'-phosphate
  modified_base 19: mod_base = OTHER; note = 2'-fluoroadenosine-3'-phosphate
  modified_base 20: mod_base = OTHER; note = 2'-O-methyluridine-3'-phosphate
  modified_base 21: mod_base = OTHER; note = 2'-fluoroadenosine-3'-phosphate attached to N-[tris(N-acetylgalactosamine-alkyl)-amidodecanoyl)]-4-hydr oxyprolinol Hyp-(N-acetylgalactosamine-alkyl)3
gactttcatcctggaaatata

SEQ ID NO: 237 - DNA, 21 bp, synthetic construct
  misc_feature 1..21: note = Description of Artificial Sequence: Synthetic oligonucleotide
  source 1..21: mol_type = other DNA
  modified_base 1: mod_base = OTHER; note = 2'-O-methylguanosine-3'- phosphorothioate
  modified_base 2: mod_base = OTHER; note = 2'-O-methyladenosine-3'- phosphorothioate
  modified_base 3: mod_base = OTHER; note = 2'-O-methylcytidine-3'-phosphate
  modified_base 4: mod_base = OTHER; note = 2'-O-methyluridine-3'-phosphate
  modified_base 5: mod_base = OTHER; note = 2'-O-methyluridine-3'-phosphate
  modified_base 6: mod_base = OTHER; note = 2'-O-methyluridine-3'-phosphate
  modified_base 7: mod_base = OTHER; note = 2'-O-methylcytidine-3'-phosphate
  modified_base 8: mod_base = OTHER; note = 2'-O-methyladenosine-3'-phosphate
  modified_base 9: mod_base = OTHER; note = 2'-O-methyluridine-3'-phosphate
  modified_base 10: mod_base = OTHER; note = 2'-O-methylcytidine-3'-phosphate
  modified_base 12: mod_base = OTHER; note = 2'-O-methyluridine-3'-phosphate
  modified_base 13: mod_base = OTHER; note = 2'-O-methylguanosine-3'-phosphate
  modified_base 14: mod_base = OTHER; note = 2'-O-methylguanosine-3'-phosphate
  modified_base 15: mod_base = OTHER; note = 2'-O-methyladenosine-3'-phosphate
  modified_base 16: mod_base = OTHER; note = 2'-O-methyladenosine-3'-phosphate
  modified_base 17: mod_base = OTHER; note = Adenosine-glycol nucleic acid (GNA)
  modified_base 18: mod_base = OTHER; note = 2'-O-methyluridine-3'-phosphate
  modified_base 19: mod_base = OTHER; note = 2'-O-methyladenosine-3'-phosphate
  modified_base 20: mod_base = OTHER; note = 2'-O-methyluridine-3'-phosphate
  modified_base 21: mod_base = OTHER; note = 2'-O-methyladenosine-3'-phosphate attached to N-[tris(N-acetylgalactosamine-alkyl)-amidodecanoyl)]-4-hydr oxyprolinol Hyp-(N-acetylgalactosamine-alkyl)3
  misc_feature 1..10: note = RNA
  misc_feature 11: note = DNA
  misc_feature 12..21: note = RNA
gactttcatcctggaaatata

SEQ ID NO: 238 - RNA, 21 nt, synthetic construct
  misc_feature 1..21: note = Description of Artificial Sequence: Synthetic oligonucleotide
  source 1..21: mol_type = other RNA
  modified_base 1: mod_base = OTHER; note = 2'-O-methyladenosine-3'- phosphorothioate
  modified_base 2: mod_base = OTHER; note = 2'-O-methylguanosine-3'- phosphorothioate
  modified_base 3: mod_base = OTHER; note = 2'-O-methyladenosine-3'-phosphate
  modified_base 4: mod_base = OTHER; note = 2'-O-methyladenosine-3'-phosphate
  modified_base 5: mod_base = OTHER; note = 2'-O-methyladenosine-3'-phosphate
  modified_base 6: mod_base = OTHER; note = 2'-O-methylguanosine-3'-phosphate
  modified_base 7: mod_base = OTHER; note = 2'-fluoroguanosine-3'-phosphate
  modified_base 8: mod_base = OTHER; note = 2'-O-methyluridine-3'-phosphate
  modified_base 9: mod_base = OTHER; note = 2'-fluoroguanosine-3'-phosphate
  modified_base 10: mod_base = OTHER; note = 2'-fluorouridine-3'-phosphate
  modified_base 11: mod_base = OTHER; note = 2'-fluorouridine-3'-phosphate
  modified_base 12: mod_base = OTHER; note = 2'-O-methylcytidine-3'-phosphate
  modified_base 13: mod_base = OTHER; note = 2'-O-methyladenosine-3'-phosphate
  modified_base 14: mod_base = OTHER; note = 2'-O-methyladenosine-3'-phosphate
  modified_base 15: mod_base = OTHER; note = 2'-O-methylguanosine-3'-phosphate
  modified_base 16: mod_base = OTHER; note = 2'-O-methyladenosine-3'-phosphate
  modified_base 17: mod_base = OTHER; note = 2'-O-methyluridine-3'-phosphate
  modified_base 18: mod_base = OTHER; note = 2'-O-methylguanosine-3'-phosphate
  modified_base 19: mod_base = OTHER; note = 2'-O-methyluridine-3'-phosphate
  modified_base 20: mod_base = OTHER; note = 2'-O-methylcytidine-3'-phosphate
  modified_base 21: mod_base = OTHER; note = 2'-O-methyladenosine-3'-phosphate attached to N-[tris(N-acetylgalactosamine-alkyl)-amidodecanoyl)]-4-hydr oxyprolinol Hyp-(N-acetylgalactosamine-alkyl)3
agaaaggtgttcaagatgtca

SEQ ID NO: 239 - RNA, 21 nt, synthetic construct
  misc_feature 1..21: note = Description of Artificial Sequence: Synthetic oligonucleotide
  source 1..21: mol_type = other RNA
  modified_base 1: mod_base = OTHER; note = 2'-O-methylcytidine-3'- phosphorothioate
  modified_base 2: mod_base = OTHER; note = 2'-O-methyladenosine-3'- phosphorothioate
  modified_base 3: mod_base = OTHER; note = 2'-O-methyluridine-3'-phosphate
  modified_base 4: mod_base = OTHER; note = 2'-O-methylcytidine-3'-phosphate
  modified_base 5: mod_base = OTHER; note = 2'-O-methylcytidine-3'-phosphate
  modified_base 6: mod_base = OTHER; note = 2'-O-methyluridine-3'-phosphate
  modified_base 7: mod_base = OTHER; note = 2'-fluoroguanosine-3'-phosphate
  modified_base 8: mod_base = OTHER; note = 2'-O-methylguanosine-3'-phosphate
  modified_base 9: mod_base = OTHER; note = 2'-fluoroadenosine-3'-phosphate
  modified_base 10: mod_base = OTHER; note = 2'-fluoroadenosine-3'-phosphate
  modified_base 11: mod_base = OTHER; note = 2'-fluoroadenosine-3'-phosphate
  modified_base 12: mod_base = OTHER; note = 2'-O-methyluridine-3'-phosphate
  modified_base 13: mod_base = OTHER; note = 2'-O-methyladenosine-3'-phosphate
  modified_base 14: mod_base = OTHER; note = 2'-O-methyluridine-3'-phosphate
  modified_base 15: mod_base = OTHER; note = 2'-O-methyladenosine-3'-phosphate
  modified_base 16: mod_base = OTHER; note = 2'-O-methyluridine-3'-phosphate
  modified_base 17: mod_base = OTHER; note = 2'-O-methyluridine-3'-phosphate
  modified_base 18: mod_base = OTHER; note = 2'-O-methyladenosine-3'-phosphate
  modified_base 19: mod_base = OTHER; note = 2'-O-methyladenosine-3'-phosphate
  modified_base 20: mod_base = OTHER; note = 2'-O-methylcytidine-3'-phosphate
  modified_base 21: mod_base = OTHER; note = 2'-O-methyluridine-3'-phosphate attached to N-[tris(N-acetylgalactosamine-alkyl)-amidodecanoyl)]-4-hydr oxyprolinol Hyp-(N-acetylgalactosamine-alkyl)3
catcctggaaatatattaact

SEQ ID NO: 240 - RNA, 21 nt, synthetic construct
  misc_feature 1..21: note = Description of Artificial Sequence: Synthetic oligonucleotide
  source 1..21: mol_type = other RNA
  modified_base 1: mod_base = OTHER; note = 2'-O-methylguanosine-3'- phosphorothioate
  modified_base 2: mod_base = OTHER; note = 2'-O-methyladenosine-3'- phosphorothioate
  modified_base 3: mod_base = OTHER; note = 2'-O-methyladenosine-3'-phosphate
  modified_base 4: mod_base = OTHER; note = 2'-O-methyluridine-3'-phosphate
  modified_base 5: mod_base = OTHER; note = 2'-O-methylguanosine-3'-phosphate
  modified_base 6: mod_base = OTHER; note = 2'-O-methyluridine-3'-phosphate
  modified_base 7: mod_base = OTHER; note = 2'-fluoroguanosine-3'-phosphate
  modified_base 8: mod_base = OTHER; note = 2'-O-methyladenosine-3'-phosphate
  modified_base 9: mod_base = OTHER; note = 2'-fluoroadenosine-3'-phosphate
  modified_base 10: mod_base = OTHER; note = 2'-fluoroadenosine-3'-phosphate
  modified_base 11: mod_base = OTHER; note = 2'-fluoroguanosine-3'-phosphate
  modified_base 12: mod_base = OTHER; note = 2'-O-methyluridine-3'-phosphate
  modified_base 13: mod_base = OTHER; note = 2'-O-methylcytidine-3'-phosphate
  modified_base 14: mod_base = OTHER; note = 2'-O-methyladenosine-3'-phosphate
  modified_base 15: mod_base = OTHER; note = 2'-O-methyluridine-3'-phosphate
  modified_base 16: mod_base = OTHER; note = 2'-O-methylcytidine-3'-phosphate
  modified_base 17: mod_base = OTHER; note = 2'-O-methylguanosine-3'-phosphate
  modified_base 18: mod_base = OTHER; note = 2'-O-methyladenosine-3'-phosphate
  modified_base 19: mod_base = OTHER; note = 2'-O-methylcytidine-3'-phosphate
  modified_base 20: mod_base = OTHER; note = 2'-O-methyladenosine-3'-phosphate
  modified_base 21: mod_base = OTHER; note = 2'-O-methyladenosine-3'-phosphate attached to N-[tris(N-acetylgalactosamine-alkyl)-amidodecanoyl)]-4-hydr oxyprolinol Hyp-(N-acetylgalactosamine-alkyl)3
gaatgtgaaagtcatcgacaa

SEQ ID NO: 241 - RNA, 21 nt, synthetic construct
  misc_feature 1..21: note = Description of Artificial Sequence: Synthetic oligonucleotide
  source 1..21: mol_type = other RNA
  modified_base 1: mod_base = OTHER; note = 2'-O-methyladenosine-3'- phosphorothioate
  modified_base 2: mod_base = OTHER; note = 2'-O-methylguanosine-3'- phosphorothioate
  modified_base 3: mod_base = OTHER; note = 2'-O-methyluridine-3'-phosphate
  modified_base 4: mod_base = OTHER; note = 2'-O-methylguanosine-3'-phosphate
  modified_base 5: mod_base = OTHER; note = 2'-O-methylcytidine-3'-phosphate
  modified_base 6: mod_base = OTHER; note = 2'-O-methyladenosine-3'-phosphate
  modified_base 7: mod_base = OTHER; note = 2'-fluorocytidine-3'-phosphate
  modified_base 8: mod_base = OTHER; note = 2'-O-methyladenosine-3'-phosphate
  modified_base 9: mod_base = OTHER; note = 2'-fluoroadenosine-3'-phosphate
  modified_base 10: mod_base = OTHER; note = 2'-fluorouridine-3'-phosphate
  modified_base 11: mod_base = OTHER; note = 2'-fluoroadenosine-3'-phosphate
  modified_base 12: mod_base = OTHER; note = 2'-O-methyluridine-3'-phosphate
  modified_base 13: mod_base = OTHER; note = 2'-O-methyluridine-3'-phosphate
  modified_base 14: mod_base = OTHER; note = 2'-O-methyluridine-3'-phosphate
  modified_base 15: mod_base = OTHER; note = 2'-O-methyluridine-3'-phosphate
  modified_base 16: mod_base = OTHER; note = 2'-O-methylcytidine-3'-phosphate
  modified_base 17: mod_base = OTHER; note = 2'-O-methylcytidine-3'-phosphate
  modified_base 18: mod_base = OTHER; note = 2'-O-methylcytidine-3'-phosphate
  modified_base 19: mod_base = OTHER; note = 2'-O-methyladenosine-3'-phosphate
  modified_base 20: mod_base = OTHER; note = 2'-O-methyluridine-3'-phosphate
  modified_base 21: mod_base = OTHER; note = 2'-O-methyladenosine-3'-phosphate attached to N-[tris(N-acetylgalactosamine-alkyl)-amidodecanoyl)]-4-hydr oxyprolinol Hyp-(N-acetylgalactosamine-alkyl)3
agtgcacaatattttcccata

SEQ ID NO: 242 - RNA, 21 nt, synthetic construct
  misc_feature 1..21: note = Description of Artificial Sequence: Synthetic oligonucleotide
  source 1..21: mol_type = other RNA
  modified_base 1: mod_base = OTHER; note = 2'-O-methylguanosine-3'- phosphorothioate
  modified_base 2: mod_base = OTHER; note = 2'-O-methyladenosine-3'- phosphorothioate
  modified_base 3: mod_base = OTHER; note = 2'-O-methyladenosine-3'-phosphate
  modified_base 4: mod_base = OTHER; note = 2'-O-methyladenosine-3'-phosphate
  modified_base 5: mod_base = OTHER; note = 2'-O-methylguanosine-3'-phosphate
  modified_base 6: mod_base = OTHER; note = 2'-O-methyluridine-3'-phosphate
  modified_base 7: mod_base = OTHER; note = 2'-fluorocytidine-3'-phosphate
  modified_base 8: mod_base = OTHER; note = 2'-O-methyladenosine-3'-phosphate
  modified_base 9: mod_base = OTHER; note = 2'-fluorouridine-3'-phosphate
  modified_base 10: mod_base = OTHER; note = 2'-fluorocytidine-3'-phosphate
  modified_base 11: mod_base = OTHER; note = 2'-fluoroguanosine-3'-phosphate
  modified_base 12: mod_base = OTHER; note = 2'-O-methyladenosine-3'-phosphate
  modified_base 13: mod_base = OTHER; note = 2'-O-methylcytidine-3'-phosphate
  modified_base 14: mod_base = OTHER; note = 2'-O-methyladenosine-3'-phosphate
  modified_base 15: mod_base = OTHER; note = 2'-O-methyladenosine-3'-phosphate
  modified_base 16: mod_base = OTHER; note = 2'-O-methylguanosine-3'-phosphate
  modified_base 17: mod_base = OTHER; note = 2'-O-methyladenosine-3'-phosphate
  modified_base 18: mod_base = OTHER; note = 2'-O-methylcytidine-3'-phosphate
  modified_base 19: mod_base = OTHER; note = 2'-O-methyladenosine-3'-phosphate
  modified_base 20: mod_base = OTHER; note = 2'-O-methyluridine-3'-phosphate
  modified_base 21: mod_base = OTHER; note = 2'-O-methyluridine-3'-phosphate attached to N-[tris(N-acetylgalactosamine-alkyl)-amidodecanoyl)]-4-hydr oxyprolinol Hyp-(N-acetylgalactosamine-alkyl)3
gaaagtcatcgacaagacatt

SEQ ID NO: 243 - RNA, 21 nt, synthetic construct
  misc_feature 1..21: note = Description of Artificial Sequence: Synthetic oligonucleotide
  source 1..21: mol_type = other RNA
  modified_base 1: mod_base = OTHER; note = 2'-O-methyladenosine-3'- phosphorothioate
  modified_base 2: mod_base = OTHER; note = 2'-O-methyladenosine-3'- phosphorothioate
  modified_base 3: mod_base = OTHER; note = 2'-O-methyluridine-3'-phosphate
  modified_base 4: mod_base = OTHER; note = 2'-O-methylguanosine-3'-phosphate
  modified_base 5: mod_base = OTHER; note = 2'-O-methyluridine-3'-phosphate
  modified_base 6: mod_base = OTHER; note = 2'-O-methylguanosine-3'-phosphate
  modified_base 7: mod_base = OTHER; note = 2'-fluoroadenosine-3'-phosphate
  modified_base 8: mod_base = OTHER; note = 2'-O-methyladenosine-3'-phosphate
  modified_base 9: mod_base = OTHER; note = 2'-fluoroadenosine-3'-phosphate
  modified_base 10: mod_base = OTHER; note = 2'-fluoroguanosine-3'-phosphate
  modified_base 11: mod_base = OTHER; note = 2'-fluorouridine-3'-phosphate
  modified_base 12: mod_base = OTHER; note = 2'-O-methylcytidine-3'-phosphate
  modified_base 13: mod_base = OTHER; note = 2'-O-methyladenosine-3'-phosphate
  modified_base 14: mod_base = OTHER; note = 2'-O-methyluridine-3'-phosphate
  modified_base 15: mod_base = OTHER; note = 2'-O-methylcytidine-3'-phosphate
  modified_base 16: mod_base = OTHER; note = 2'-O-methylguanosine-3'-phosphate
  modified_base 17: mod_base = OTHER; note = 2'-O-methyladenosine-3'-phosphate
  modified_base 18: mod_base = OTHER; note = 2'-O-methylcytidine-3'-phosphate
  modified_base 19: mod_base = OTHER; note = 2'-O-methyladenosine-3'-phosphate
  modified_base 20: mod_base = OTHER; note = 2'-O-methyladenosine-3'-phosphate
  modified_base 21: mod_base = OTHER; note = 2'-O-methyladenosine-3'-phosphate attached to N-[tris(N-acetylgalactosamine-alkyl)-amidodecanoyl)]-4-hydr oxyprolinol Hyp-(N-acetylgalactosamine-alkyl)3
aatgtgaaagtcatcgacaaa

SEQ ID NO: 244 - RNA, 21 nt, synthetic construct
  misc_feature 1..21: note = Description of Artificial Sequence: Synthetic oligonucleotide
  source 1..21: mol_type = other RNA
  modified_base 1: mod_base = OTHER; note = 2'-O-methylcytidine-3'- phosphorothioate
  modified_base 2: mod_base = OTHER; note = 2'-O-methyluridine-3'-phosphorothioate
  modified_base 3: mod_base = OTHER; note = 2'-O-methylguanosine-3'-phosphate
  modified_base 4: mod_base = OTHER; note = 2'-O-methylguanosine-3'-phosphate
  modified_base 5: mod_base = OTHER; note = 2'-O-methyladenosine-3'-phosphate
  modified_base 6: mod_base = OTHER; note = 2'-O-methyladenosine-3'-phosphate
  modified_base 7: mod_base = OTHER; note = 2'-fluoroadenosine-3'-phosphate
  modified_base 8: mod_base = OTHER; note = 2'-O-methyluridine-3'-phosphate
  modified_base 9: mod_base = OTHER; note = 2'-fluoroadenosine-3'-phosphate
  modified_base 10: mod_base = OTHER; note = 2'-fluorouridine-3'-phosphate
  modified_base 11: mod_base = OTHER; note = 2'-fluoroadenosine-3'-phosphate
  modified_base 12: mod_base = OTHER; note = 2'-O-methyluridine-3'-phosphate
  modified_base 13: mod_base = OTHER; note = 2'-O-methyluridine-3'-phosphate
  modified_base 14: mod_base = OTHER; note = 2'-O-methyladenosine-3'-phosphate
  modified_base 15: mod_base = OTHER; note = 2'-O-methyladenosine-3'-phosphate
  modified_base 16: mod_base = OTHER; note = 2'-O-methylcytidine-3'-phosphate
  modified_base 17: mod_base = OTHER; note = 2'-O-methyluridine-3'-phosphate
  modified_base 18: mod_base = OTHER; note = 2'-O-methylguanosine-3'-phosphate
  modified_base 19: mod_base = OTHER; note = 2'-O-methyluridine-3'-phosphate
  modified_base 20: mod_base = OTHER; note = 2'-O-methyluridine-3'-phosphate
  modified_base 21: mod_base = OTHER; note = 2'-O-methyladenosine-3'-phosphate attached to N-[tris(N-acetylgalactosamine-alkyl)-amidodecanoyl)]-4-hydr oxyprolinol Hyp-(N-acetylgalactosamine-alkyl)3
ctggaaatatattaactgtta

SEQ ID NO: 245 - RNA, 21 nt, synthetic construct
  misc_feature 1..21: note = Description of Artificial Sequence: Synthetic oligonucleotide
  source 1..21: mol_type = other RNA
  modified_base 1: mod_base = OTHER; note = 2'-O-methyladenosine-3'- phosphorothioate
  modified_base 2: mod_base = OTHER; note = 2'-O-methyluridine-3'-phosphorothioate
  modified_base 3: mod_base = OTHER; note = 2'-O-methyluridine-3'-phosphate
  modified_base 4: mod_base = OTHER; note = 2'-O-methyluridine-3'-phosphate
  modified_base 5: mod_base = OTHER; note = 2'-O-methyluridine-3'-phosphate
  modified_base 6: mod_base = OTHER; note = 2'-O-methylcytidine-3'-phosphate
  modified_base 7: mod_base = OTHER; note = 2'-fluorocytidine-3'-phosphate
  modified_base 8: mod_base = OTHER; note = 2'-O-methylcytidine-3'-phosphate
  modified_base 9: mod_base = OTHER; note = 2'-fluoroadenosine-3'-phosphate
  modified_base 10: mod_base = OTHER; note = 2'-fluorouridine-3'-phosphate
  modified_base 11: mod_base = OTHER; note = 2'-fluorocytidine-3'-phosphate
  modified_base 12: mod_base = OTHER; note = 2'-O-methyluridine-3'-phosphate
  modified_base 13: mod_base = OTHER; note = 2'-O-methylguanosine-3'-phosphate
  modified_base 14: mod_base = OTHER; note = 2'-O-methyluridine-3'-phosphate
  modified_base 15: mod_base = OTHER; note = 2'-O-methyladenosine-3'-phosphate
  modified_base 16: mod_base = OTHER; note = 2'-O-methyluridine-3'-phosphate
  modified_base 17: mod_base = OTHER; note = 2'-O-methyluridine-3'-phosphate
  modified_base 18: mod_base = OTHER; note = 2'-O-methyladenosine-3'-phosphate
  modified_base 19: mod_base = OTHER; note = 2'-O-methyluridine-3'-phosphate
  modified_base 20: mod_base = OTHER; note = 2'-O-methyluridine-3'-phosphate
  modified_base 21: mod_base = OTHER; note = 2'-O-methyluridine-3'-phosphate attached to N-[tris(N-acetylgalactosamine-alkyl)-amidodecanoyl)]-4-hydr oxyprolinol Hyp-(N-acetylgalactosamine-alkyl)3
attttcccatctgtattattt

SEQ ID NO: 246 - RNA, 21 nt, synthetic construct
  misc_feature 1..21: note = Description of Artificial Sequence: Synthetic oligonucleotide
  source 1..21: mol_type = other RNA
  modified_base 1: mod_base = OTHER; note = 2'-O-methyluridine-3'-phosphorothioate
  modified_base 2: mod_base = OTHER; note = 2'-O-methylguanosine-3'- phosphorothioate
  modified_base 3: mod_base = OTHER; note = 2'-O-methyluridine-3'-phosphate
  modified_base 4: mod_base = OTHER; note = 2'-O-methylcytidine-3'-phosphate
  modified_base 5: mod_base = OTHER; note = 2'-O-methylguanosine-3'-phosphate
  modified_base 6: mod_base = OTHER; note = 2'-O-methyluridine-3'-phosphate
  modified_base 7: mod_base = OTHER; note = 2'-fluorouridine-3'-phosphate
  modified_base 8: mod_base = OTHER; note = 2'-O-methylcytidine-3'-phosphate
  modified_base 9: mod_base = OTHER; note = 2'-fluorouridine-3'-phosphate
  modified_base 10: mod_base = OTHER; note = 2'-fluorouridine-3'-phosphate
  modified_base 11: mod_base = OTHER; note = 2'-fluorouridine-3'-phosphate
  modified_base 12: mod_base = OTHER; note = 2'-O-methyluridine-3'-phosphate
  modified_base 13: mod_base = OTHER; note = 2'-O-methylcytidine-3'-phosphate
  modified_base 14: mod_base = OTHER; note = 2'-O-methylcytidine-3'-phosphate
  modified_base 15: mod_base = OTHER; note = 2'-O-methyladenosine-3'-phosphate
  modified_base 16: mod_base = OTHER; note = 2'-O-methyladenosine-3'-phosphate
  modified_base 17: mod_base = OTHER; note = 2'-O-methylcytidine-3'-phosphate
  modified_base 18: mod_base = OTHER; note = 2'-O-methyladenosine-3'-phosphate
  modified_base 19: mod_base = OTHER; note = 2'-O-methyladenosine-3'-phosphate
  modified_base 20: mod_base = OTHER; note = 2'-O-methyladenosine-3'-phosphate
  modified_base 21: mod_base = OTHER; note = 2'-O-methyladenosine-3'-phosphate attached to N-[tris(N-acetylgalactosamine-alkyl)-amidodecanoyl)]-4-hydr oxyprolinol Hyp-(N-acetylgalactosamine-alkyl)3
tgtcgttcttttccaacaaaa

SEQ ID NO: 247 - RNA, 21 nt, synthetic construct
  misc_feature 1..21: note = Description of Artificial Sequence: Synthetic oligonucleotide
  source 1..21: mol_type = other RNA
  modified_base 1: mod_base = OTHER; note = 2'-O-methyladenosine-3'- phosphorothioate
  modified_base 2: mod_base = OTHER; note = 2'-O-methyluridine-3'-phosphorothioate
  modified_base 3: mod_base = OTHER; note = 2'-O-methylcytidine-3'-phosphate
  modified_base 4: mod_base = OTHER; note = 2'-O-methylcytidine-3'-phosphate
  modified_base 5: mod_base = OTHER; note = 2'-O-methyluridine-3'-phosphate
  modified_base 6: mod_base = OTHER; note = 2'-O-methylguanosine-3'-phosphate
  modified_base 7: mod_base = OTHER; note = 2'-fluoroguanosine-3'-phosphate
  modified_base 8: mod_base = OTHER; note = 2'-O-methyladenosine-3'-phosphate
  modified_base 9: mod_base = OTHER; note = 2'-fluoroadenosine-3'-phosphate
  modified_base 10: mod_base = OTHER; note = 2'-fluoroadenosine-3'-phosphate
  modified_base 11: mod_base = OTHER; note = 2'-fluorouridine-3'-phosphate
  modified_base 12: mod_base = OTHER; note = 2'-O-methyladenosine-3'-phosphate
  modified_base 13: mod_base = OTHER; note = 2'-O-methyluridine-3'-phosphate
  modified_base 14: mod_base = OTHER; note = 2'-O-methyladenosine-3'-phosphate
  modified_base 15: mod_base = OTHER; note = 2'-O-methyluridine-3'-phosphate
  modified_base 16: mod_base = OTHER; note = 2'-O-methyluridine-3'-phosphate
  modified_base 17: mod_base = OTHER; note = 2'-O-methyladenosine-3'-phosphate
  modified_base 18: mod_base = OTHER; note = 2'-O-methyladenosine-3'-phosphate
  modified_base 19: mod_base = OTHER; note = 2'-O-methylcytidine-3'-phosphate
  modified_base 20: mod_base = OTHER; note = 2'-O-methyluridine-3'-phosphate
  modified_base 21: mod_base = OTHER; note = 2'-O-methyladenosine-3'-phosphate attached to N-[tris(N-acetylgalactosamine-alkyl)-amidodecanoyl)]-4-hydr oxyprolinol Hyp-(N-acetylgalactosamine-alkyl)3
atcctggaaatatattaacta

SEQ ID NO: 248 - RNA, 21 nt, synthetic construct
  misc_feature 1..21: note = Description of Artificial Sequence: Synthetic oligonucleotide
  source 1..21: mol_type = other RNA
  modified_base 1: mod_base = OTHER; note = 2'-O-methylguanosine-3'- phosphorothioate
  modified_base 2: mod_base = OTHER; note = 2'-O-methylcytidine-3'- phosphorothioate
  modified_base 3: mod_base = OTHER; note = 2'-O-methyladenosine-3'-phosphate
  modified_base 4: mod_base = OTHER; note = 2'-O-methyluridine-3'-phosphate
  modified_base 5: mod_base = OTHER; note = 2'-O-methyluridine-3'-phosphate
  modified_base 6: mod_base = OTHER; note = 2'-O-methyluridine-3'-phosphate
  modified_base 7: mod_base = OTHER; note = 2'-fluorouridine-3'-phosphate
  modified_base 8: mod_base = OTHER; note = 2'-O-methylguanosine-3'-phosphate
  modified_base 9: mod_base = OTHER; note = 2'-fluoroadenosine-3'-phosphate
  modified_base 10: mod_base = OTHER; note = 2'-fluoroguanosine-3'-phosphate
  modified_base 11: mod_base = OTHER; note = 2'-fluoroadenosine-3'-phosphate
  modified_base 12: mod_base = OTHER; note = 2'-O-methylguanosine-3'-phosphate
  modified_base 13: mod_base = OTHER; note = 2'-O-methylguanosine-3'-phosphate
  modified_base 14: mod_base = OTHER; note = 2'-O-methyluridine-3'-phosphate
  modified_base 15: mod_base = OTHER; note = 2'-O-methylguanosine-3'-phosphate
  modified_base 16: mod_base = OTHER; note = 2'-O-methyladenosine-3'-phosphate
  modified_base 17: mod_base = OTHER; note = 2'-O-methyluridine-3'-phosphate
  modified_base 18: mod_base = OTHER; note = 2'-O-methylguanosine-3'-phosphate
  modified_base 19: mod_base = OTHER; note = 2'-O-methyladenosine-3'-phosphate
  modified_base 20: mod_base = OTHER; note = 2'-O-methyluridine-3'-phosphate
  modified_base 21: mod_base = OTHER; note = 2'-O-methyladenosine-3'-phosphate attached to N-[tris(N-acetylgalactosamine-alkyl)-amidodecanoyl)]-4-hydr oxyprolinol Hyp-(N-acetylgalactosamine-alkyl)3
gcattttgagaggtgatgata

SEQ ID NO: 249 - RNA, 21 nt, synthetic construct
  misc_feature 1..21: note = Description of Artificial Sequence: Synthetic oligonucleotide
  source 1..21: mol_type = other RNA
  modified_base 1: mod_base = OTHER; note = 2'-O-methylcytidine-3'- phosphorothioate
  modified_base 2: mod_base = OTHER; note = 2'-O-methyladenosine-3'- phosphorothioate
  modified_base 3: mod_base = OTHER; note = 2'-O-methylguanosine-3'-phosphate
  modified_base 4: mod_base = OTHER; note = 2'-O-methylguanosine-3'-phosphate
  modified_base 5: mod_base = OTHER; note = 2'-O-methylguanosine-3'-phosphate
  modified_base 6: mod_base = OTHER; note = 2'-O-methylguanosine-3'-phosphate
  modified_base 7: mod_base = OTHER; note = 2'-fluoroguanosine-3'-phosphate
  modified_base 8: mod_base = OTHER; note = 2'-O-methyladenosine-3'-phosphate
  modified_base 9: mod_base = OTHER; note = 2'-fluoroguanosine-3'-phosphate
  modified_base 10: mod_base = OTHER; note = 2'-fluoroadenosine-3'-phosphate
  modified_base 11: mod_base = OTHER; note = 2'-fluoroadenosine-3'-phosphate
  modified_base 12: mod_base = OTHER; note = 2'-O-methyladenosine-3'-phosphate
  modified_base 13: mod_base = OTHER; note = 2'-O-methylguanosine-3'-phosphate
  modified_base 14: mod_base = OTHER; note = 2'-O-methylguanosine-3'-phosphate
  modified_base 15: mod_base = OTHER; note = 2'-O-methyluridine-3'-phosphate
  modified_base 16: mod_base = OTHER; note = 2'-O-methylguanosine-3'-phosphate
  modified_base 17: mod_base = OTHER; note = 2'-O-methyluridine-3'-phosphate
  modified_base 18: mod_base = OTHER; note = 2'-O-methyluridine-3'-phosphate
  modified_base 19: mod_base = OTHER; note = 2'-O-methylcytidine-3'-phosphate
  modified_base 20: mod_base = OTHER; note = 2'-O-methyladenosine-3'-phosphate
  modified_base 21: mod_base = OTHER; note = 2'-O-methyladenosine-3'-phosphate attached to N-[tris(N-acetylgalactosamine-alkyl)-amidodecanoyl)]-4-hydr oxyprolinol Hyp-(N-acetylgalactosamine-alkyl)3
cagggggagaaaggtgttcaa

SEQ ID NO: 250 - RNA, 21 nt, synthetic construct
  misc_feature 1..21: note = Description of Artificial Sequence: Synthetic oligonucleotide
  source 1..21: mol_type = other RNA
  modified_base 1: mod_base = OTHER; note = 2'-O-methylguanosine-3'- phosphorothioate
  modified_base 2: mod_base = OTHER; note = 2'-O-methylguanosine-3'- phosphorothioate
  modified_base 3: mod_base = OTHER; note = 2'-O-methyladenosine-3'-phosphate
  modified_base 4: mod_base = OTHER; note = 2'-O-methyladenosine-3'-phosphate
  modified_base 5: mod_base = OTHER; note = 2'-O-methyladenosine-3'-phosphate
  modified_base 6: mod_base = OTHER; note = 2'-O-methyluridine-3'-phosphate
  modified_base 7: mod_base = OTHER; note = 2'-fluoroadenosine-3'-phosphate
  modified_base 8: mod_base = OTHER; note = 2'-O-methyluridine-3'-phosphate
  modified_base 9: mod_base = OTHER; note = 2'-fluoroadenosine-3'-phosphate
  modified_base 10: mod_base = OTHER; note = 2'-fluorouridine-3'-phosphate
  modified_base 11: mod_base = OTHER; note = 2'-fluorouridine-3'-phosphate
  modified_base 12: mod_base = OTHER; note = 2'-O-methyladenosine-3'-phosphate
  modified_base 13: mod_base = OTHER; note = 2'-O-methyladenosine-3'-phosphate
  modified_base 14: mod_base = OTHER; note = 2'-O-methylcytidine-3'-phosphate
  modified_base 15: mod_base = OTHER; note = 2'-O-methyluridine-3'-phosphate
  modified_base 16: mod_base = OTHER; note = 2'-O-methylguanosine-3'-phosphate
  modified_base 17: mod_base = OTHER; note = 2'-O-methyluridine-3'-phosphate
  modified_base 18: mod_base = OTHER; note = 2'-O-methyluridine-3'-phosphate
  modified_base 19: mod_base = OTHER; note = 2'-O-methyladenosine-3'-phosphate
  modified_base 20: mod_base = OTHER; note = 2'-O-methyladenosine-3'-phosphate
  modified_base 21: mod_base = OTHER; note = 2'-O-methyladenosine-3'-phosphate attached to N-[tris(N-acetylgalactosamine-alkyl)-amidodecanoyl)]-4-hydr oxyprolinol Hyp-(N-acetylgalactosamine-alkyl)3
ggaaatatattaactgttaaa

SEQ ID NO: 251 - RNA, 21 nt, synthetic construct
  misc_feature 1..21: note = Description of Artificial Sequence: Synthetic oligonucleotide
  source 1..21: mol_type = other RNA
  modified_base 1: mod_base = OTHER; note = 2'-O-methylcytidine-3'- phosphorothioate
  modified_base 2: mod_base = OTHER; note = 2'-O-methyladenosine-3'- phosphorothioate
  modified_base 3: mod_base = OTHER; note = 2'-O-methyluridine-3'-phosphate
  modified_base 4: mod_base = OTHER; note = 2'-O-methyluridine-3'-phosphate
  modified_base 5: mod_base = OTHER; note = 2'-O-methylguanosine-3'-phosphate
  modified_base 6: mod_base = OTHER; note = 2'-O-methylguanosine-3'-phosphate
  modified_base 7: mod_base = OTHER; note = 2'-fluorouridine-3'-phosphate
  modified_base 8: mod_base = OTHER; note = 2'-O-methylguanosine-3'-phosphate
  modified_base 9: mod_base = OTHER; note = 2'-fluoroadenosine-3'-phosphate
  modified_base 10: mod_base = OTHER; note = 2'-fluoroguanosine-3'-phosphate
  modified_base 11: mod_base = OTHER; note = 2'-fluoroguanosine-3'-phosphate
  modified_base 12: mod_base = OTHER; note = 2'-O-methyladenosine-3'-phosphate
  modified_base 13: mod_base = OTHER; note = 2'-O-methyladenosine-3'-phosphate
  modified_base 14: mod_base = OTHER; note = 2'-O-methyladenosine-3'-phosphate
  modified_base 15: mod_base = OTHER; note = 2'-O-methyladenosine-3'-phosphate
  modified_base 16: mod_base = OTHER; note = 2'-O-methyladenosine-3'-phosphate
  modified_base 17: mod_base = OTHER; note = 2'-O-methyluridine-3'-phosphate
  modified_base 18: mod_base = OTHER; note = 2'-O-methylcytidine-3'-phosphate
  modified_base 19: mod_base = OTHER; note = 2'-O-methylcytidine-3'-phosphate
  modified_base 20: mod_base = OTHER; note = 2'-O-methyluridine-3'-phosphate
  modified_base 21: mod_base = OTHER; note = 2'-O-methyluridine-3'-phosphate attached to N-[tris(N-acetylgalactosamine-alkyl)-amidodecanoyl)]-4-hydr oxyprolinol Hyp-(N-acetylgalactosamine-alkyl)3
cattggtgaggaaaaatcctt

SEQ ID NO: 252 - RNA, 21 nt, synthetic construct
  misc_feature 1..21: note = Description of Artificial Sequence: Synthetic oligonucleotide
  source 1..21: mol_type = other RNA
  modified_base 1: mod_base = OTHER; note = 2'-O-methylguanosine-3'- phosphorothioate
  modified_base 2: mod_base = OTHER; note = 2'-O-methylguanosine-3'- phosphorothioate
  modified_base 3: mod_base = OTHER; note = 2'-O-methylguanosine-3'-phosphate
  modified_base 4: mod_base = OTHER; note = 2'-O-methyladenosine-3'-phosphate
  modified_base 5: mod_base = OTHER; note = 2'-O-methylguanosine-3'-phosphate
  modified_base 6: mod_base = OTHER; note = 2'-O-methyladenosine-3'-phosphate
  modified_base 7: mod_base = OTHER; note = 2'-fluoroadenosine-3'-phosphate
  modified_base 8: mod_base = OTHER; note = 2'-O-methyladenosine-3'-phosphate
  modified_base 9: mod_base = OTHER; note = 2'-fluoroguanosine-3'-phosphate
  modified_base 10: mod_base = OTHER; note = 2'-fluoroguanosine-3'-phosphate
  modified_base 11: mod_base = OTHER; note = 2'-fluorouridine-3'-phosphate
  modified_base 12: mod_base = OTHER; note = 2'-O-methylguanosine-3'-phosphate
  modified_base 13: mod_base = OTHER; note = 2'-O-methyluridine-3'-phosphate
  modified_base 14: mod_base = OTHER; note = 2'-O-methyluridine-3'-phosphate
  modified_base 15: mod_base = OTHER; note = 2'-O-methylcytidine-3'-phosphate
  modified_base 16: mod_base = OTHER; note = 2'-O-methyladenosine-3'-phosphate
  modified_base 17: mod_base = OTHER; note = 2'-O-methyladenosine-3'-phosphate
  modified_base 18: mod_base = OTHER; note = 2'-O-methylguanosine-3'-phosphate
  modified_base 19: mod_base = OTHER; note = 2'-O-methyladenosine-3'-phosphate
  modified_base 20: mod_base = OTHER; note = 2'-O-methyluridine-3'-phosphate
  modified_base 21: mod_base = OTHER; note = 2'-O-methyladenosine-3'-phosphate attached to N-[tris(N-acetylgalactosamine-alkyl)-amidodecanoyl)]-4-hydr oxyprolinol Hyp-(N-acetylgalactosamine-alkyl)3
gggagaaaggtgttcaagata

SEQ ID NO: 253 - RNA, 21 nt, synthetic construct
  misc_feature 1..21: note = Description of Artificial Sequence: Synthetic oligonucleotide
  source 1..21: mol_type = other RNA
  modified_base 1: mod_base = OTHER; note = 2'-O-methylguanosine-3'- phosphorothioate
  modified_base 2: mod_base = OTHER; note = 2'-O-methylguanosine-3'- phosphorothioate
  modified_base 3: mod_base = OTHER; note = 2'-O-methylcytidine-3'-phosphate
  modified_base 4: mod_base = OTHER; note = 2'-O-methyladenosine-3'-phosphate
  modified_base 5: mod_base = OTHER; note = 2'-O-methyluridine-3'-phosphate
  modified_base 6: mod_base = OTHER; note = 2'-O-methyluridine-3'-phosphate
  modified_base 7: mod_base = OTHER; note = 2'-fluorouridine-3'-phosphate
  modified_base 8: mod_base = OTHER; note = 2'-O-methyluridine-3'-phosphate
  modified_base 9: mod_base = OTHER; note = 2'-fluoroguanosine-3'-phosphate
  modified_base 10: mod_base = OTHER; note = 2'-fluoroadenosine-3'-phosphate
  modified_base 11: mod_base = OTHER; note = 2'-fluoroguanosine-3'-phosphate
  modified_base 12: mod_base = OTHER; note = 2'-O-methyladenosine-3'-phosphate
  modified_base 13: mod_base = OTHER; note = 2'-O-methylguanosine-3'-phosphate
  modified_base 14: mod_base = OTHER; note = 2'-O-methylguanosine-3'-phosphate
  modified_base 15: mod_base = OTHER; note = 2'-O-methyluridine-3'-phosphate
  modified_base 16: mod_base = OTHER; note = 2'-O-methylguanosine-3'-phosphate
  modified_base 17: mod_base = OTHER; note = 2'-O-methyladenosine-3'-phosphate
  modified_base 18: mod_base = OTHER; note = 2'-O-methyluridine-3'-phosphate
  modified_base 19: mod_base = OTHER; note = 2'-O-methylguanosine-3'-phosphate
  modified_base 20: mod_base = OTHER; note = 2'-O-methyladenosine-3'-phosphate
  modified_base 21: mod_base = OTHER; note = 2'-O-methyluridine-3'-phosphate attached to N-[tris(N-acetylgalactosamine-alkyl)-amidodecanoyl)]-4-hydr oxyprolinol Hyp-(N-acetylgalactosamine-alkyl)3
ggcattttgagaggtgatgat

SEQ ID NO: 254 - RNA, 21 nt, synthetic construct
  misc_feature 1..21: note = Description of Artificial Sequence: Synthetic oligonucleotide
  source 1..21: mol_type = other RNA
  modified_base 1: mod_base = OTHER; note = 2'-O-methyluridine-3'-phosphorothioate
  modified_base 2: mod_base = OTHER; note = 2'-O-methyladenosine-3'- phosphorothioate
  modified_base 3: mod_base = OTHER; note = 2'-O-methylcytidine-3'-phosphate
  modified_base 4: mod_base = OTHER; note = 2'-O-methyladenosine-3'-phosphate
  modified_base 5: mod_base = OTHER; note = 2'-O-methyladenosine-3'-phosphate
  modified_base 6: mod_base = OTHER; note = 2'-O-methyladenosine-3'-phosphate
  modified_base 7: mod_base = OTHER; note = 2'-fluoroguanosine-3'-phosphate
  modified_base 8: mod_base = OTHER; note = 2'-O-methylguanosine-3'-phosphate
  modified_base 9: mod_base = OTHER; note = 2'-fluoroguanosine-3'-phosphate
  modified_base 10: mod_base = OTHER; note = 2'-fluorouridine-3'-phosphate
  modified_base 11: mod_base = OTHER; note = 2'-fluoroguanosine-3'-phosphate
  modified_base 12: mod_base = OTHER; note = 2'-O-methyluridine-3'-phosphate
  modified_base 13: mod_base = OTHER; note = 2'-O-methylcytidine-3'-phosphate
  modified_base 14: mod_base = OTHER; note = 2'-O-methylguanosine-3'-phosphate
  modified_base 15: mod_base = OTHER; note = 2'-O-methyluridine-3'-phosphate
  modified_base 16: mod_base = OTHER; note = 2'-O-methyluridine-3'-phosphate
  modified_base 17: mod_base = OTHER; note = 2'-O-methylcytidine-3'-phosphate
  modified_base 18: mod_base = OTHER; note = 2'-O-methyluridine-3'-phosphate
  modified_base 19: mod_base = OTHER; note = 2'-O-methyluridine-3'-phosphate
  modified_base 20: mod_base = OTHER; note = 2'-O-methyluridine-3'-phosphate
  modified_base 21: mod_base = OTHER; note = 2'-O-methyluridine-3'-phosphate attached to N-[tris(N-acetylgalactosamine-alkyl)-amidodecanoyl)]-4-hydr oxyprolinol Hyp-(N-acetylgalactosamine-alkyl)3
tacaaagggtgtcgttctttt

SEQ ID NO: 255 - RNA, 21 nt, synthetic construct
  misc_feature 1..21: note = Description of Artificial Sequence: Synthetic oligonucleotide
  source 1..21: mol_type = other RNA
  modified_base 1: mod_base = OTHER; note = 2'-O-methyluridine-3'-phosphorothioate
  modified_base 2: mod_base = OTHER; note = 2'-O-methylguanosine-3'- phosphorothioate
  modified_base 3: mod_base = OTHER; note = 2'-O-methylguanosine-3'-phosphate
  modified_base 4: mod_base = OTHER; note = 2'-O-methylguanosine-3'-phosphate
  modified_base 5: mod_base = OTHER; note = 2'-O-methyladenosine-3'-phosphate
  modified_base 6: mod_base = OTHER; note = 2'-O-methyluridine-3'-phosphate
  modified_base 7: mod_base = OTHER; note = 2'-fluorocytidine-3'-phosphate
  modified_base 8: mod_base = OTHER; note = 2'-O-methyluridine-3'-phosphate
  modified_base 9: mod_base = OTHER; note = 2'-fluorouridine-3'-phosphate
  modified_base 10: mod_base = OTHER; note = 2'-fluoroguanosine-3'-phosphate
  modified_base 11: mod_base = OTHER; note = 2'-fluoroguanosine-3'-phosphate
  modified_base 12: mod_base = OTHER; note = 2'-O-methyluridine-3'-phosphate
  modified_base 13: mod_base = OTHER; note = 2'-O-methylguanosine-3'-phosphate
  modified_base 14: mod_base = OTHER; note = 2'-O-methyluridine-3'-phosphate
  modified_base 15: mod_base = OTHER; note = 2'-O-methylcytidine-3'-phosphate
  modified_base 16: mod_base = OTHER; note = 2'-O-methylguanosine-3'-phosphate
  modified_base 17: mod_base = OTHER; note = 2'-O-methyladenosine-3'-phosphate
  modified_base 18: mod_base = OTHER; note = 2'-O-methyladenosine-3'-phosphate
  modified_base 19: mod_base = OTHER; note = 2'-O-methyluridine-3'-phosphate
  modified_base 20: mod_base = OTHER; note = 2'-O-methylcytidine-3'-phosphate
  modified_base 21: mod_base = OTHER; note = 2'-O-methyladenosine-3'-phosphate attached to N-[tris(N-acetylgalactosamine-alkyl)-amidodecanoyl)]-4-hydr oxyprolinol Hyp-(N-acetylgalactosamine-alkyl)3
tgggatcttggtgtcgaatca

SEQ ID NO: 256 - RNA, 21 nt, synthetic construct
  misc_feature 1..21: note = Description of Artificial Sequence: Synthetic oligonucleotide
  source 1..21: mol_type = other RNA
  modified_base 1: mod_base = OTHER; note = 2'-O-methylcytidine-3'- phosphorothioate
  modified_base 2: mod_base = OTHER; note = 2'-O-methyluridine-3'-phosphorothioate
  modified_base 3: mod_base = OTHER; note = 2'-O-methylguanosine-3'-phosphate
  modified_base 4: mod_base = OTHER; note = 2'-O-methyladenosine-3'-phosphate
  modified_base 5: mod_base = OTHER; note = 2'-O-methylcytidine-3'-phosphate
  modified_base 6: mod_base = OTHER; note = 2'-O-methyladenosine-3'-phosphate
  modified_base 7: mod_base = OTHER; note = 2'-fluoroguanosine-3'-phosphate
  modified_base 8: mod_base = OTHER; note = 2'-O-methyluridine-3'-phosphate
  modified_base 9: mod_base = OTHER; note = 2'-fluoroguanosine-3'-phosphate
  modified_base 10: mod_base = OTHER; note = 2'-fluorocytidine-3'-phosphate
  modified_base 11: mod_base = OTHER; note = 2'-fluoroadenosine-3'-phosphate
  modified_base 12: mod_base = OTHER; note = 2'-O-methylcytidine-3'-phosphate
  modified_base 13: mod_base = OTHER; note = 2'-O-methyladenosine-3'-phosphate
  modified_base 14: mod_base = OTHER; note = 2'-O-methyladenosine-3'-phosphate
  modified_base 15: mod_base = OTHER; note = 2'-O-methyluridine-3'-phosphate
  modified_base 16: mod_base = OTHER; note = 2'-O-methyladenosine-3'-phosphate
  modified_base 17: mod_base = OTHER; note = 2'-O-methyluridine-3'-phosphate
  modified_base 18: mod_base = OTHER; note = 2'-O-methyluridine-3'-phosphate
  modified_base 19: mod_base = OTHER; note = 2'-O-methyluridine-3'-phosphate
  modified_base 20: mod_base = OTHER; note = 2'-O-methyluridine-3'-phosphate
  modified_base 21: mod_base = OTHER; note = 2'-O-methyladenosine-3'-phosphate attached to N-[tris(N-acetylgalactosamine-alkyl)-amidodecanoyl)]-4-hydr oxyprolinol Hyp-(N-acetylgalactosamine-alkyl)3
ctgacagtgcacaatatttta

SEQ ID NO: 257 - RNA, 21 nt, synthetic construct
  misc_feature 1..21: note = Description of Artificial Sequence: Synthetic oligonucleotide
  source 1..21: mol_type = other RNA
  modified_base 1: mod_base = OTHER; note = 2'-O-methylcytidine-3'- phosphorothioate
  modified_base 2: mod_base = OTHER; note = 2'-O-methyladenosine-3'- phosphorothioate
  modified_base 3: mod_base = OTHER; note = 2'-O-methylguanosine-3'-phosphate
  modified_base 4: mod_base = OTHER; note = 2'-O-methyluridine-3'-phosphate
  modified_base 5: mod_base = OTHER; note = 2'-O-methylguanosine-3'-phosphate
  modified_base 6: mod_base = OTHER; note = 2'-O-methylcytidine-3'-phosphate
  modified_base 7: mod_base = OTHER; note = 2'-fluoroadenosine-3'-phosphate
  modified_base 8: mod_base = OTHER; note = 2'-O-methylcytidine-3'-phosphate
  modified_base 9: mod_base = OTHER; note = 2'-fluoroadenosine-3'-phosphate
  modified_base 10: mod_base = OTHER; note = 2'-fluoroadenosine-3'-phosphate
  modified_base 11: mod_base = OTHER; note = 2'-fluorouridine-3'-phosphate
  modified_base 12: mod_base = OTHER; note = 2'-O-methyladenosine-3'-phosphate
  modified_base 13: mod_base = OTHER; note = 2'-O-methyluridine-3'-phosphate
  modified_base 14: mod_base = OTHER; note = 2'-O-methyluridine-3'-phosphate
  modified_base 15: mod_base = OTHER; note = 2'-O-methyluridine-3'-phosphate
  modified_base 16: mod_base = OTHER; note = 2'-O-methyluridine-3'-phosphate
  modified_base 17: mod_base = OTHER; note = 2'-O-methylcytidine-3'-phosphate
  modified_base 18: mod_base = OTHER; note = 2'-O-methylcytidine-3'-phosphate
  modified_base 19: mod_base = OTHER; note = 2'-O-methylcytidine-3'-phosphate
  modified_base 20: mod_base = OTHER; note = 2'-O-methyladenosine-3'-phosphate
  modified_base 21: mod_base = OTHER; note = 2'-O-methyluridine-3'-phosphate attached to N-[tris(N-acetylgalactosamine-alkyl)-amidodecanoyl)]-4-hydr oxyprolinol Hyp-(N-acetylgalactosamine-alkyl)3
cagtgcacaatattttcccat

SEQ ID NO: 258 - RNA, 21 nt, synthetic construct
  misc_feature 1..21: note = Description of Artificial Sequence: Synthetic oligonucleotide
  source 1..21: mol_type = other RNA
  modified_base 1: mod_base = OTHER; note = 2'-O-methyladenosine-3'- phosphorothioate
  modified_base 2: mod_base = OTHER; note = 2'-O-methylcytidine-3'- phosphorothioate
  modified_base 3: mod_base = OTHER; note = 2'-O-methyluridine-3'-phosphate
  modified_base 4: mod_base = OTHER; note = 2'-O-methyluridine-3'-phosphate
  modified_base 5: mod_base = OTHER; note = 2'-O-methyluridine-3'-phosphate
  modified_base 6: mod_base = OTHER; note = 2'-O-methyluridine-3'-phosphate
  modified_base 7: mod_base = OTHER; note = 2'-fluorocytidine-3'-phosphate
  modified_base 8: mod_base = OTHER; note = 2'-O-methyladenosine-3'-phosphate
  modified_base 9: mod_base = OTHER; note = 2'-fluoroadenosine-3'-phosphate
  modified_base 10: mod_base = OTHER; note = 2'-fluorouridine-3'-phosphate
  modified_base 11: mod_base = OTHER; note = 2'-fluoroguanosine-3'-phosphate
  modified_base 12: mod_base = OTHER; note = 2'-O-methylguanosine-3'-phosphate
  modified_base 13: mod_base = OTHER; note = 2'-O-methylguanosine-3'-phosphate
  modified_base 14: mod_base = OTHER; note = 2'-O-methyluridine-3'-phosphate
  modified_base 15: mod_base = OTHER; note = 2'-O-methylguanosine-3'-phosphate
  modified_base 16: mod_base = OTHER; note = 2'-O-methyluridine-3'-phosphate
  modified_base 17: mod_base = OTHER; note = 2'-O-methylcytidine-3'-phosphate
  modified_base 18: mod_base = OTHER; note = 2'-O-methylcytidine-3'-phosphate
  modified_base 19: mod_base = OTHER; note = 2'-O-methyluridine-3'-phosphate
  modified_base 20: mod_base = OTHER; note = 2'-O-methyladenosine-3'-phosphate
  modified_base 21: mod_base = OTHER; note = 2'-O-methyladenosine-3'-phosphate attached to N-[tris(N-acetylgalactosamine-alkyl)-amidodecanoyl)]-4-hydr oxyprolinol Hyp-(N-acetylgalactosamine-alkyl)3
acttttcaatgggtgtcctaa

SEQ ID NO: 259 - RNA, 21 nt, synthetic construct
  misc_feature 1..21: note = Description of Artificial Sequence: Synthetic oligonucleotide
  source 1..21: mol_type = other RNA
  modified_base 1: mod_base = OTHER; note = 2'-O-methyladenosine-3'- phosphorothioate
  modified_base 2: mod_base = OTHER; note = 2'-O-methylcytidine-3'- phosphorothioate
  modified_base 3: mod_base = OTHER; note = 2'-O-methyladenosine-3'-phosphate
  modified_base 4: mod_base = OTHER; note = 2'-O-methyluridine-3'-phosphate
  modified_base 5: mod_base = OTHER; note = 2'-O-methyluridine-3'-phosphate
  modified_base 6: mod_base = OTHER; note = 2'-O-methylguanosine-3'-phosphate
  modified_base 7: mod_base = OTHER; note = 2'-fluoroguanosine-3'-phosphate
  modified_base 8: mod_base = OTHER; note = 2'-O-methyluridine-3'-phosphate
  modified_base 9: mod_base = OTHER; note = 2'-fluoroguanosine-3'-phosphate
  modified_base 10: mod_base = OTHER; note = 2'-fluoroadenosine-3'-phosphate
  modified_base 11: mod_base = OTHER; note = 2'-fluoroguanosine-3'-phosphate
  modified_base 12: mod_base = OTHER; note = 2'-O-methylguanosine-3'-phosphate
  modified_base 13: mod_base = OTHER; note = 2'-O-methyladenosine-3'-phosphate
  modified_base 14: mod_base = OTHER; note = 2'-O-methyladenosine-3'-phosphate
  modified_base 15: mod_base = OTHER; note = 2'-O-methyladenosine-3'-phosphate
  modified_base 16: mod_base = OTHER; note = 2'-O-methyladenosine-3'-phosphate
  modified_base 17: mod_base = OTHER; note = 2'-O-methyladenosine-3'-phosphate
  modified_base 18: mod_base = OTHER; note = 2'-O-methyluridine-3'-phosphate
  modified_base 19: mod_base = OTHER; note = 2'-O-methylcytidine-3'-phosphate
  modified_base 20: mod_base = OTHER; note = 2'-O-methylcytidine-3'-phosphate
  modified_base 21: mod_base = OTHER; note = 2'-O-methyluridine-3'-phosphate attached to N-[tris(N-acetylgalactosamine-alkyl)-amidodecanoyl)]-4-hydr oxyprolinol Hyp-(N-acetylgalactosamine-alkyl)3
acattggtgaggaaaaatcct

SEQ ID NO: 260 - RNA, 21 nt, synthetic construct
  misc_feature 1..21: note = Description of Artificial Sequence: Synthetic oligonucleotide
  source 1..21: mol_type = other RNA
  modified_base 1: mod_base = OTHER; note = 2'-O-methyluridine-3'-phosphorothioate
  modified_base 2: mod_base = OTHER; note = 2'-O-methyluridine-3'-phosphorothioate
  modified_base 3: mod_base = OTHER; note = 2'-O-methylguanosine-3'-phosphate
  modified_base 4: mod_base = OTHER; note = 2'-O-methylcytidine-3'-phosphate
  modified_base 5: mod_base = OTHER; note = 2'-O-methyluridine-3'-phosphate
  modified_base 6: mod_base = OTHER; note = 2'-O-methyluridine-3'-phosphate
  modified_base 7: mod_base = OTHER; note = 2'-fluorouridine-3'-phosphate
  modified_base 8: mod_base = OTHER; note = 2'-O-methyluridine-3'-phosphate
  modified_base 9: mod_base = OTHER; note = 2'-fluoroguanosine-3'-phosphate
  modified_base 10: mod_base = OTHER; note = 2'-fluoroadenosine-3'-phosphate
  modified_base 11: mod_base = OTHER; note = 2'-fluorocytidine-3'-phosphate
  modified_base 12: mod_base = OTHER; note = 2'-O-methyluridine-3'-phosphate
  modified_base 13: mod_base = OTHER; note = 2'-O-methyluridine-3'-phosphate
  modified_base 14: mod_base = OTHER; note = 2'-O-methyluridine-3'-phosphate
  modified_base 15: mod_base = OTHER; note = 2'-O-methyluridine-3'-phosphate
  modified_base 16: mod_base = OTHER; note = 2'-O-methylcytidine-3'-phosphate
  modified_base 17: mod_base = OTHER; note = 2'-O-methyladenosine-3'-phosphate
  modified_base 18: mod_base = OTHER; note = 2'-O-methyladenosine-3'-phosphate
  modified_base 19: mod_base = OTHER; note = 2'-O-methyluridine-3'-phosphate
  modified_base 20: mod_base = OTHER; note = 2'-O-methylguanosine-3'-phosphate
  modified_base 21: mod_base = OTHER; note = 2'-O-methyladenosine-3'-phosphate attached to N-[tris(N-acetylgalactosamine-alkyl)-amidodecanoyl)]-4-hydr oxyprolinol Hyp-(N-acetylgalactosamine-alkyl)3
ttgcttttgacttttcaatga

SEQ ID NO: 261 - RNA, 21 nt, synthetic construct
  misc_feature 1..21: note = Description of Artificial Sequence: Synthetic oligonucleotide
  source 1..21: mol_type = other RNA
  modified_base 1: mod_base = OTHER; note = 2'-O-methylcytidine-3'- phosphorothioate
  modified_base 2: mod_base = OTHER; note = 2'-O-methyladenosine-3'- phosphorothioate
  modified_base 3: mod_base = OTHER; note = 2'-O-methyluridine-3'-phosphate
  modified_base 4: mod_base = OTHER; note = 2'-O-methyluridine-3'-phosphate
  modified_base 5: mod_base = OTHER; note = 2'-O-methyluridine-3'-phosphate
  modified_base 6: mod_base = OTHER; note = 2'-O-methyluridine-3'-phosphate
  modified_base 7: mod_base = OTHER; note = 2'-fluoroguanosine-3'-phosphate
  modified_base 8: mod_base = OTHER; note = 2'-O-methyladenosine-3'-phosphate
  modified_base 9: mod_base = OTHER; note = 2'-fluoroguanosine-3'-phosphate
  modified_base 10: mod_base = OTHER; note = 2'-fluoroadenosine-3'-phosphate
  modified_base 11: mod_base = OTHER; note = 2'-fluoroguanosine-3'-phosphate
  modified_base 12: mod_base = OTHER; note = 2'-O-methylguanosine-3'-phosphate
  modified_base 13: mod_base = OTHER; note = 2'-O-methyluridine-3'-phosphate
  modified_base 14: mod_base = OTHER; note = 2'-O-methylguanosine-3'-phosphate
  modified_base 15: mod_base = OTHER; note = 2'-O-methyladenosine-3'-phosphate
  modified_base 16: mod_base = OTHER; note = 2'-O-methyluridine-3'-phosphate
  modified_base 17: mod_base = OTHER; note = 2'-O-methylguanosine-3'-phosphate
  modified_base 18: mod_base = OTHER; note = 2'-O-methyladenosine-3'-phosphate
  modified_base 19: mod_base = OTHER; note = 2'-O-methyluridine-3'-phosphate
  modified_base 20: mod_base = OTHER; note = 2'-O-methylguanosine-3'-phosphate
  modified_base 21: mod_base = OTHER; note = 2'-O-methyladenosine-3'-phosphate attached to N-[tris(N-acetylgalactosamine-alkyl)-amidodecanoyl)]-4-hydr oxyprolinol Hyp-(N-acetylgalactosamine-alkyl)3
cattttgagaggtgatgatga

SEQ ID NO: 262 - RNA, 21 nt, synthetic construct
  misc_feature 1..21: note = Description of Artificial Sequence: Synthetic oligonucleotide
  source 1..21: mol_type = other RNA
  modified_base 1: mod_base = OTHER; note = 2'-O-methyluridine-3'-phosphorothioate
  modified_base 2: mod_base = OTHER; note = 2'-O-methyluridine-3'-phosphorothioate
  modified_base 3: mod_base = OTHER; note = 2'-O-methylguanosine-3'-phosphate
  modified_base 4: mod_base = OTHER; note = 2'-O-methyladenosine-3'-phosphate
  modified_base 5: mod_base = OTHER; note = 2'-O-methylcytidine-3'-phosphate
  modified_base 6: mod_base = OTHER; note = 2'-O-methyluridine-3'-phosphate
  modified_base 7: mod_base = OTHER; note = 2'-fluorouridine-3'-phosphate
  modified_base 8: mod_base = OTHER; note = 2'-O-methyluridine-3'-phosphate
  modified_base 9: mod_base = OTHER; note = 2'-fluorouridine-3'-phosphate
  modified_base 10: mod_base = OTHER; note = 2'-fluorocytidine-3'-phosphate
  modified_base 11: mod_base = OTHER; note = 2'-fluoroadenosine-3'-phosphate
  modified_base 12: mod_base = OTHER; note = 2'-O-methyladenosine-3'-phosphate
  modified_base 13: mod_base = OTHER; note = 2'-O-methyluridine-3'-phosphate
  modified_base 14: mod_base = OTHER; note = 2'-O-methylguanosine-3'-phosphate
  modified_base 15: mod_base = OTHER; note = 2'-O-methylguanosine-3'-phosphate
  modified_base 16: mod_base = OTHER; note = 2'-O-methylguanosine-3'-phosphate
  modified_base 17: mod_base = OTHER; note = 2'-O-methyluridine-3'-phosphate
  modified_base 18: mod_base = OTHER; note = 2'-O-methylguanosine-3'-phosphate
  modified_base 19: mod_base = OTHER; note = 2'-O-methyluridine-3'-phosphate
  modified_base 20: mod_base = OTHER; note = 2'-O-methylcytidine-3'-phosphate
  modified_base 21: mod_base = OTHER; note = 2'-O-methyladenosine-3'-phosphate attached to N-[tris(N-acetylgalactosamine-alkyl)-amidodecanoyl)]-4-hydr oxyprolinol Hyp-(N-acetylgalactosamine-alkyl)3
ttgacttttcaatgggtgtca

SEQ ID NO: 263 - RNA, 21 nt, synthetic construct
  misc_feature 1..21: note = Description of Artificial Sequence: Synthetic oligonucleotide
  source 1..21: mol_type = other RNA
  modified_base 1: mod_base = OTHER; note = 2'-O-methylcytidine-3'- phosphorothioate
  modified_base 2: mod_base = OTHER; note = 2'-O-methylguanosine-3'- phosphorothioate
  modified_base 3: mod_base = OTHER; note = 2'-O-methyladenosine-3'-phosphate
  modified_base 4: mod_base = OTHER; note = 2'-O-methylcytidine-3'-phosphate
  modified_base 5: mod_base = OTHER; note = 2'-O-methyluridine-3'-phosphate
  modified_base 6: mod_base = OTHER; note = 2'-O-methyluridine-3'-phosphate
  modified_base 7: mod_base = OTHER; note = 2'-fluorocytidine-3'-phosphate
  modified_base 8: mod_base = OTHER; note = 2'-O-methyluridine-3'-phosphate
  modified_base 9: mod_base = OTHER; note = 2'-fluoroguanosine-3'-phosphate
  modified_base 10: mod_base = OTHER; note = 2'-fluorouridine-3'-phosphate
  modified_base 11: mod_base = OTHER; note = 2'-fluorouridine-3'-phosphate
  modified_base 12: mod_base = OTHER; note = 2'-O-methyluridine-3'-phosphate
  modified_base 13: mod_base = OTHER; note = 2'-O-methyluridine-3'-phosphate
  modified_base 14: mod_base = OTHER; note = 2'-O-methyladenosine-3'-phosphate
  modified_base 15: mod_base = OTHER; note = 2'-O-methylguanosine-3'-phosphate
  modified_base 16: mod_base = OTHER; note = 2'-O-methylguanosine-3'-phosphate
  modified_base 17: mod_base = OTHER; note = 2'-O-methyladenosine-3'-phosphate
  modified_base 18: mod_base = OTHER; note = 2'-O-methylcytidine-3'-phosphate
  modified_base 19: mod_base = OTHER; note = 2'-O-methyladenosine-3'-phosphate
  modified_base 20: mod_base = OTHER; note = 2'-O-methylguanosine-3'-phosphate
  modified_base 21: mod_base = OTHER; note = 2'-O-methyladenosine-3'-phosphate attached to N-[tris(N-acetylgalactosamine-alkyl)-amidodecanoyl)]-4-hydr oxyprolinol Hyp-(N-acetylgalactosamine-alkyl)3
cgacttctgttttaggacaga

SEQ ID NO: 264 - RNA, 21 nt, synthetic construct
  misc_feature 1..21: note = Description of Artificial Sequence: Synthetic oligonucleotide
  source 1..21: mol_type = other RNA
  modified_base 1: mod_base = OTHER; note = 2'-O-methylcytidine-3'- phosphorothioate
  modified_base 2: mod_base = OTHER; note = 2'-O-methyluridine-3'-phosphorothioate
  modified_base 3: mod_base = OTHER; note = 2'-O-methylcytidine-3'-phosphate
  modified_base 4: mod_base = OTHER; note = 2'-O-methyluridine-3'-phosphate
  modified_base 5: mod_base = OTHER; note = 2'-O-methylguanosine-3'-phosphate
  modified_base 6: mod_base = OTHER; note = 2'-O-methyladenosine-3'-phosphate
  modified_base 7: mod_base = OTHER; note = 2'-fluoroguanosine-3'-phosphate
  modified_base 8: mod_base = OTHER; note = 2'-O-methyluridine-3'-phosphate
  modified_base 9: mod_base = OTHER; note = 2'-fluoroguanosine-3'-phosphate
  modified_base 10: mod_base = OTHER; note = 2'-fluoroguanosine-3'-phosphate
  modified_base 11: mod_base = OTHER; note = 2'-fluoroguanosine-3'-phosphate
  modified_base 12: mod_base = OTHER; note = 2'-O-methyluridine-3'-phosphate
  modified_base 13: mod_base = OTHER; note = 2'-O-methylguanosine-3'-phosphate
  modified_base 14: mod_base = OTHER; note = 2'-O-methylcytidine-3'-phosphate
  modified_base 15: mod_base = OTHER; note = 2'-O-methylcytidine-3'-phosphate
  modified_base 16: mod_base = OTHER; note = 2'-O-methyladenosine-3'-phosphate
  modified_base 17: mod_base = OTHER; note = 2'-O-methylguanosine-3'-phosphate
  modified_base 18: mod_base = OTHER; note = 2'-O-methyladenosine-3'-phosphate
  modified_base 19: mod_base = OTHER; note = 2'-O-methyladenosine-3'-phosphate
  modified_base 20: mod_base = OTHER; note = 2'-O-methyluridine-3'-phosphate
  modified_base 21: mod_base = OTHER; note = 2'-O-methyladenosine-3'-phosphate attached to N-[tris(N-acetylgalactosamine-alkyl)-amidodecanoyl)]-4-hydr oxyprolinol Hyp-(N-acetylgalactosamine-alkyl)3
ctctgagtgggtgccagaata

SEQ ID NO: 265 - RNA, 21 nt, synthetic construct
  misc_feature 1..21: note = Description of Artificial Sequence: Synthetic oligonucleotide
  source 1..21: mol_type = other RNA
  modified_base 1: mod_base = OTHER; note = 2'-O-methylguanosine-3'- phosphorothioate
  modified_base 2: mod_base = OTHER; note = 2'-O-methylguanosine-3'- phosphorothioate
  modified_base 3: mod_base = OTHER; note = 2'-O-methylguanosine-3'-phosphate
  modified_base 4: mod_base = OTHER; note = 2'-O-methyluridine-3'-phosphate
  modified_base 5: mod_base = OTHER; note = 2'-O-methylguanosine-3'-phosphate
  modified_base 6: mod_base = OTHER; note = 2'-O-methylcytidine-3'-phosphate
  modified_base 7: mod_base = OTHER; note = 2'-fluorocytidine-3'-phosphate
  modified_base 8: mod_base = OTHER; note = 2'-O-methyladenosine-3'-phosphate
  modified_base 9: mod_base = OTHER; note = 2'-fluoroguanosine-3'-phosphate
  modified_base 10: mod_base = OTHER; note = 2'-fluoroadenosine-3'-phosphate
  modified_base 11: mod_base = OTHER; note = 2'-fluoroadenosine-3'-phosphate
  modified_base 12: mod_base = OTHER; note = 2'-O-methyluridine-3'-phosphate
  modified_base 13: mod_base = OTHER; note = 2'-O-methylguanosine-3'-phosphate
  modified_base 14: mod_base = OTHER; note = 2'-O-methyluridine-3'-phosphate
  modified_base 15: mod_base = OTHER; note = 2'-O-methylguanosine-3'-phosphate
  modified_base 16: mod_base = OTHER; note = 2'-O-methyladenosine-3'-phosphate
  modified_base 17: mod_base = OTHER; note = 2'-O-methyladenosine-3'-phosphate
  modified_base 18: mod_base = OTHER; note = 2'-O-methyladenosine-3'-phosphate
  modified_base 19: mod_base = OTHER; note = 2'-O-methylguanosine-3'-phosphate
  modified_base 20: mod_base = OTHER; note = 2'-O-methyluridine-3'-phosphate
  modified_base 21: mod_base = OTHER; note = 2'-O-methyladenosine-3'-phosphate attached to N-[tris(N-acetylgalactosamine-alkyl)-amidodecanoyl)]-4-hydr oxyprolinol Hyp-(N-acetylgalactosamine-alkyl)3
gggtgccagaatgtgaaagta

SEQ ID NO: 266 - RNA, 21 nt, synthetic construct
  misc_feature 1..21: note = Description of Artificial Sequence: Synthetic oligonucleotide
  source 1..21: mol_type = other RNA
  modified_base 1: mod_base = OTHER; note = 2'-O-methyluridine-3'-phosphorothioate
  modified_base 2: mod_base = OTHER; note = 2'-O-methylcytidine-3'- phosphorothioate
  modified_base 3: mod_base = OTHER; note = 2'-O-methyladenosine-3'-phosphate
  modified_base 4: mod_base = OTHER; note = 2'-O-methyladenosine-3'-phosphate
  modified_base 5: mod_base = OTHER; note = 2'-O-methyluridine-3'-phosphate
  modified_base 6: mod_base = OTHER; note = 2'-O-methylguanosine-3'-phosphate
  modified_base 7: mod_base = OTHER; note = 2'-fluoroguanosine-3'-phosphate
  modified_base 8: mod_base = OTHER; note = 2'-O-methylguanosine-3'-phosphate
  modified_base 9: mod_base = OTHER; note = 2'-fluorouridine-3'-phosphate
  modified_base 10: mod_base = OTHER; note = 2'-fluoroguanosine-3'-phosphate
  modified_base 11: mod_base = OTHER; note = 2'-fluorouridine-3'-phosphate
  modified_base 12: mod_base = OTHER; note = 2'-O-methylcytidine-3'-phosphate
  modified_base 13: mod_base = OTHER; note = 2'-O-methylcytidine-3'-phosphate
  modified_base 14: mod_base = OTHER; note = 2'-O-methyluridine-3'-phosphate
  modified_base 15: mod_base = OTHER; note = 2'-O-methyladenosine-3'-phosphate
  modified_base 16: mod_base = OTHER; note = 2'-O-methylguanosine-3'-phosphate
  modified_base 17: mod_base = OTHER; note = 2'-O-methylguanosine-3'-phosphate
  modified_base 18: mod_base = OTHER; note = 2'-O-methyladenosine-3'-phosphate
  modified_base 19: mod_base = OTHER; note = 2'-O-methyladenosine-3'-phosphate
  modified_base 20: mod_base = OTHER; note = 2'-O-methylcytidine-3'-phosphate
  modified_base 21: mod_base = OTHER; note = 2'-O-methyladenosine-3'-phosphate attached to N-[tris(N-acetylgalactosamine-alkyl)-amidodecanoyl)]-4-hydr oxyprolinol Hyp-(N-acetylgalactosamine-alkyl)3
tcaatgggtgtcctaggaaca

SEQ ID NO: 267 - RNA, 21 nt, synthetic construct
  misc_feature 1..21: note = Description of Artificial Sequence: Synthetic oligonucleotide
  source 1..21: mol_type = other RNA
  modified_base 1: mod_base = OTHER; note = 2'-O-methyladenosine-3'- phosphorothioate
  modified_base 2: mod_base = OTHER; note = 2'-O-methyladenosine-3'- phosphorothioate
  modified_base 3: mod_base = OTHER; note = 2'-O-methyladenosine-3'-phosphate
  modified_base 4: mod_base = OTHER; note = 2'-O-methylguanosine-3'-phosphate
  modified_base 5: mod_base = OTHER; note = 2'-O-methyluridine-3'-phosphate
  modified_base 6: mod_base = OTHER; note = 2'-O-methylcytidine-3'-phosphate
  modified_base 7: mod_base = OTHER; note = 2'-fluoroadenosine-3'-phosphate
  modified_base 8: mod_base = OTHER; note = 2'-O-methyluridine-3'-phosphate
  modified_base 9: mod_base = OTHER; note = 2'-fluorocytidine-3'-phosphate
  modified_base 10: mod_base = OTHER; note = 2'-fluoroguanosine-3'-phosphate
  modified_base 11: mod_base = OTHER; note = 2'-fluoroadenosine-3'-phosphate
  modified_base 12: mod_base = OTHER; note = 2'-O-methylcytidine-3'-phosphate
  modified_base 13: mod_base = OTHER; note = 2'-O-methyladenosine-3'-phosphate
  modified_base 14: mod_base = OTHER; note = 2'-O-methyladenosine-3'-phosphate
  modified_base 15: mod_base = OTHER; note = 2'-O-methylguanosine-3'-phosphate
  modified_base 16: mod_base = OTHER; note = 2'-O-methyladenosine-3'-phosphate
  modified_base 17: mod_base = OTHER; note = 2'-O-methylcytidine-3'-phosphate
  modified_base 18: mod_base = OTHER; note = 2'-O-methyladenosine-3'-phosphate
  modified_base 19: mod_base = OTHER; note = 2'-O-methyluridine-3'-phosphate
  modified_base 20: mod_base = OTHER; note = 2'-O-methyluridine-3'-phosphate
  modified_base 21: mod_base = OTHER; note = 2'-O-methyladenosine-3'-phosphate attached to N-[tris(N-acetylgalactosamine-alkyl)-amidodecanoyl)]-4-hydr oxyprolinol Hyp-(N-acetylgalactosamine-alkyl)3
aaagtcatcgacaagacatta

SEQ ID NO: 268 - RNA, 21 nt, synthetic construct
  misc_feature 1..21: note = Description of Artificial Sequence: Synthetic oligonucleotide
  source 1..21: mol_type = other RNA
  modified_base 1: mod_base = OTHER; note = 2'-O-methyladenosine-3'- phosphorothioate
  modified_base 2: mod_base = OTHER; note = 2'-O-methyluridine-3'-phosphorothioate
  modified_base 3: mod_base = OTHER; note = 2'-O-methyluridine-3'-phosphate
  modified_base 4: mod_base = OTHER; note = 2'-O-methyluridine-3'-phosphate
  modified_base 5: mod_base = OTHER; note = 2'-O-methyluridine-3'-phosphate
  modified_base 6: mod_base = OTHER; note = 2'-O-methylguanosine-3'-phosphate
  modified_base 7: mod_base = OTHER; note = 2'-fluoroadenosine-3'-phosphate
  modified_base 8: mod_base = OTHER; note = 2'-O-methylguanosine-3'-phosphate
  modified_base 9: mod_base = OTHER; note = 2'-fluoroadenosine-3'-phosphate
  modified_base 10: mod_base = OTHER; note = 2'-fluoroguanosine-3'-phosphate
  modified_base 11: mod_base = OTHER; note = 2'-fluoroguanosine-3'-phosphate
  modified_base 12: mod_base = OTHER; note = 2'-O-methyluridine-3'-phosphate
  modified_base 13: mod_base = OTHER; note = 2'-O-methylguanosine-3'-phosphate
  modified_base 14: mod_base = OTHER; note = 2'-O-methyladenosine-3'-phosphate
  modified_base 15: mod_base = OTHER; note = 2'-O-methyluridine-3'-phosphate
  modified_base 16: mod_base = OTHER; note = 2'-O-methylguanosine-3'-phosphate
  modified_base 17: mod_base = OTHER; note = 2'-O-methyladenosine-3'-phosphate
  modified_base 18: mod_base = OTHER; note = 2'-O-methyluridine-3'-phosphate
  modified_base 19: mod_base = OTHER; note = 2'-O-methylguanosine-3'-phosphate
  modified_base 20: mod_base = OTHER; note = 2'-O-methylcytidine-3'-phosphate
  modified_base 21: mod_base = OTHER; note = 2'-O-methyladenosine-3'-phosphate attached to N-[tris(N-acetylgalactosamine-alkyl)-amidodecanoyl)]-4-hydr oxyprolinol Hyp-(N-acetylgalactosamine-alkyl)3
attttgagaggtgatgatgca

SEQ ID NO: 269 - RNA, 21 nt, synthetic construct
  misc_feature 1..21: note = Description of Artificial Sequence: Synthetic oligonucleotide
  source 1..21: mol_type = other RNA
  modified_base 1: mod_base = OTHER; note = 2'-O-methyladenosine-3'- phosphorothioate
  modified_base 2: mod_base = OTHER; note = 2'-O-methyluridine-3'-phosphorothioate
  modified_base 3: mod_base = OTHER; note = 2'-O-methylcytidine-3'-phosphate
  modified_base 4: mod_base = OTHER; note = 2'-O-methylguanosine-3'-phosphate
  modified_base 5: mod_base = OTHER; note = 2'-O-methyladenosine-3'-phosphate
  modified_base 6: mod_base = OTHER; note = 2'-O-methylcytidine-3'-phosphate
  modified_base 7: mod_base = OTHER; note = 2'-fluoroadenosine-3'-phosphate
  modified_base 8: mod_base = OTHER; note = 2'-O-methyladenosine-3'-phosphate
  modified_base 9: mod_base = OTHER; note = 2'-fluoroguanosine-3'-phosphate
  modified_base 10: mod_base = OTHER; note = 2'-fluoroadenosine-3'-phosphate
  modified_base 11: mod_base = OTHER; note = 2'-fluorocytidine-3'-phosphate
  modified_base 12: mod_base = OTHER; note = 2'-O-methyladenosine-3'-phosphate
  modified_base 13: mod_base = OTHER; note = 2'-O-methyluridine-3'-phosphate
  modified_base 14: mod_base = OTHER; note = 2'-O-methyluridine-3'-phosphate
  modified_base 15: mod_base = OTHER; note = 2'-O-methylguanosine-3'-phosphate
  modified_base 16: mod_base = OTHER; note = 2'-O-methylguanosine-3'-phosphate
  modified_base 17: mod_base = OTHER; note = 2'-O-methyluridine-3'-phosphate
  modified_base 18: mod_base = OTHER; note = 2'-O-methylguanosine-3'-phosphate
  modified_base 19: mod_base = OTHER; note = 2'-O-methyladenosine-3'-phosphate
  modified_base 20: mod_base = OTHER; note = 2'-O-methylguanosine-3'-phosphate
  modified_base 21: mod_base = OTHER; note = 2'-O-methyladenosine-3'-phosphate attached to N-[tris(N-acetylgalactosamine-alkyl)-amidodecanoyl)]-4-hydr oxyprolinol Hyp-(N-acetylgalactosamine-alkyl)3
atcgacaagacattggtgaga

SEQ ID NO: 270 - RNA, 21 nt, synthetic construct
  misc_feature 1..21: note = Description of Artificial Sequence: Synthetic oligonucleotide
  source 1..21: mol_type = other RNA
  modified_base 1: mod_base = OTHER; note = 2'-O-methylguanosine-3'- phosphorothioate
  modified_base 2: mod_base = OTHER; note = 2'-O-methylguanosine-3'- phosphorothioate
  modified_base 3: mod_base = OTHER; note = 2'-O-methyluridine-3'-phosphate
  modified_base 4: mod_base = OTHER; note = 2'-O-methylguanosine-3'-phosphate
  modified_base 5: mod_base = OTHER; note = 2'-O-methylcytidine-3'-phosphate
  modified_base 6: mod_base = OTHER; note = 2'-O-methylcytidine-3'-phosphate
  modified_base 7: mod_base = OTHER; note = 2'-fluoroadenosine-3'-phosphate
  modified_base 8: mod_base = OTHER; note = 2'-O-methylguanosine-3'-phosphate
  modified_base 9: mod_base = OTHER; note = 2'-fluoroadenosine-3'-phosphate
  modified_base 10: mod_base = OTHER; note = 2'-fluoroadenosine-3'-phosphate
  modified_base 11: mod_base = OTHER; note = 2'-fluorouridine-3'-phosphate
  modified_base 12: mod_base = OTHER; note = 2'-O-methylguanosine-3'-phosphate
  modified_base 13: mod_base = OTHER; note = 2'-O-methyluridine-3'-phosphate
  modified_base 14: mod_base = OTHER; note = 2'-O-methylguanosine-3'-phosphate
  modified_base 15: mod_base = OTHER; note = 2'-O-methyladenosine-3'-phosphate
  modified_base 16: mod_base = OTHER; note = 2'-O-methyladenosine-3'-phosphate
  modified_base 17: mod_base = OTHER; note = 2'-O-methyladenosine-3'-phosphate
  modified_base 18: mod_base = OTHER; note = 2'-O-methylguanosine-3'-phosphate
  modified_base 19: mod_base = OTHER; note = 2'-O-methyluridine-3'-phosphate
  modified_base 20: mod_base = OTHER; note = 2'-O-methylcytidine-3'-phosphate
  modified_base 21: mod_base = OTHER; note = 2'-O-methyladenosine-3'-phosphate attached to N-[tris(N-acetylgalactosamine-alkyl)-amidodecanoyl)]-4-hydr oxyprolinol Hyp-(N-acetylgalactosamine-alkyl)3
ggtgccagaatgtgaaagtca

SEQ ID NO: 271 - RNA, 21 nt, synthetic construct
  misc_feature 1..21: note = Description of Artificial Sequence: Synthetic oligonucleotide
  source 1..21: mol_type = other RNA
  modified_base 1: mod_base = OTHER; note = 2'-O-methylguanosine-3'- phosphorothioate
  modified_base 2: mod_base = OTHER; note = 2'-O-methyladenosine-3'- phosphorothioate
  modified_base 3: mod_base = OTHER; note = 2'-O-methylcytidine-3'-phosphate
  modified_base 4: mod_base = OTHER; note = 2'-O-methyladenosine-3'-phosphate
  modified_base 5: mod_base = OTHER; note = 2'-O-methylguanosine-3'-phosphate
  modified_base 6: mod_base = OTHER; note = 2'-O-methyluridine-3'-phosphate
  modified_base 7: mod_base = OTHER; note = 2'-fluoroguanosine-3'-phosphate
  modified_base 8: mod_base = OTHER; note = 2'-O-methylcytidine-3'-phosphate
  modified_base 9: mod_base = OTHER; note = 2'-fluoroadenosine-3'-phosphate
  modified_base 10: mod_base = OTHER; note = 2'-fluorocytidine-3'-phosphate
  modified_base 11: mod_base = OTHER; note = 2'-fluoroadenosine-3'-phosphate
  modified_base 12: mod_base = OTHER; note = 2'-O-methyladenosine-3'-phosphate
  modified_base 13: mod_base = OTHER; note = 2'-O-methyluridine-3'-phosphate
  modified_base 14: mod_base = OTHER; note = 2'-O-methyladenosine-3'-phosphate
  modified_base 15: mod_base = OTHER; note = 2'-O-methyluridine-3'-phosphate
  modified_base 16: mod_base = OTHER; note = 2'-O-methyluridine-3'-phosphate
  modified_base 17: mod_base = OTHER; note = 2'-O-methyluridine-3'-phosphate
  modified_base 18: mod_base = OTHER; note = 2'-O-methyluridine-3'-phosphate
  modified_base 19: mod_base = OTHER; note = 2'-O-methylcytidine-3'-phosphate
  modified_base 20: mod_base = OTHER; note = 2'-O-methylcytidine-3'-phosphate
  modified_base 21: mod_base = OTHER; note = 2'-O-methyladenosine-3'-phosphate attached to N-[tris(N-acetylgalactosamine-alkyl)-amidodecanoyl)]-4-hydr oxyprolinol Hyp-(N-acetylgalactosamine-alkyl)3
gacagtgcacaatattttcca

SEQ ID NO: 272 - RNA, 21 nt, synthetic construct
  misc_feature 1..21: note = Description of Artificial Sequence: Synthetic oligonucleotide
  source 1..21: mol_type = other RNA
  modified_base 1: mod_base = OTHER; note = 2'-O-methyladenosine-3'- phosphorothioate
  modified_base 2: mod_base = OTHER; note = 2'-O-methylcytidine-3'- phosphorothioate
  modified_base 3: mod_base = OTHER; note = 2'-O-methyladenosine-3'-phosphate
  modified_base 4: mod_base = OTHER; note = 2'-O-methyladenosine-3'-phosphate
  modified_base 5: mod_base = OTHER; note = 2'-O-methyladenosine-3'-phosphate
  modified_base 6: mod_base = OTHER; note = 2'-O-methylguanosine-3'-phosphate
  modified_base 7: mod_base = OTHER; note = 2'-fluoroadenosine-3'-phosphate
  modified_base 8: mod_base = OTHER; note = 2'-O-methylguanosine-3'-phosphate
  modified_base 9: mod_base = OTHER; note = 2'-fluoroadenosine-3'-phosphate
  modified_base 10: mod_base = OTHER; note = 2'-fluorocytidine-3'-phosphate
  modified_base 11: mod_base = OTHER; note = 2'-fluoroadenosine-3'-phosphate
  modified_base 12: mod_base = OTHER; note = 2'-O-methylcytidine-3'-phosphate
  modified_base 13: mod_base = OTHER; note = 2'-O-methyluridine-3'-phosphate
  modified_base 14: mod_base = OTHER; note = 2'-O-methylguanosine-3'-phosphate
  modified_base 15: mod_base = OTHER; note = 2'-O-methyluridine-3'-phosphate
  modified_base 16: mod_base = OTHER; note = 2'-O-methylguanosine-3'-phosphate
  modified_base 17: mod_base = OTHER; note = 2'-O-methylcytidine-3'-phosphate
  modified_base 18: mod_base = OTHER; note = 2'-O-methyladenosine-3'-phosphate
  modified_base 19: mod_base = OTHER; note = 2'-O-methylguanosine-3'-phosphate
  modified_base 20: mod_base = OTHER; note = 2'-O-methyladenosine-3'-phosphate
  modified_base 21: mod_base = OTHER; note = 2'-O-methyladenosine-3'-phosphate attached to N-[tris(N-acetylgalactosamine-alkyl)-amidodecanoyl)]-4-hydr oxyprolinol Hyp-(N-acetylgalactosamine-alkyl)3
acaaagagacactgtgcagaa

SEQ ID NO: 273 - RNA, 21 nt, synthetic construct
  misc_feature 1..21: note = Description of Artificial Sequence: Synthetic oligonucleotide
  source 1..21: mol_type = other RNA
  modified_base 1: mod_base = OTHER; note = 2'-O-methyluridine-3'-phosphorothioate
  modified_base 2: mod_base = OTHER; note = 2'-O-methyluridine-3'-phosphorothioate
  modified_base 3: mod_base = OTHER; note = 2'-O-methyluridine-3'-phosphate
  modified_base 4: mod_base = OTHER; note = 2'-O-methyluridine-3'-phosphate
  modified_base 5: mod_base = OTHER; note = 2'-O-methylcytidine-3'-phosphate
  modified_base 6: mod_base = OTHER; note = 2'-O-methyladenosine-3'-phosphate
  modified_base 7: mod_base = OTHER; note = 2'-fluoroadenosine-3'-phosphate
  modified_base 8: mod_base = OTHER; note = 2'-O-methyluridine-3'-phosphate
  modified_base 9: mod_base = OTHER; note = 2'-fluoroguanosine-3'-phosphate
  modified_base 10: mod_base = OTHER; note = 2'-fluoroguanosine-3'-phosphate
  modified_base 11: mod_base = OTHER; note = 2'-fluoroguanosine-3'-phosphate
  modified_base 12: mod_base = OTHER; note = 2'-O-methyluridine-3'-phosphate
  modified_base 13: mod_base = OTHER; note = 2'-O-methylguanosine-3'-phosphate
  modified_base 14: mod_base = OTHER; note = 2'-O-methyluridine-3'-phosphate
  modified_base 15: mod_base = OTHER; note = 2'-O-methylcytidine-3'-phosphate
  modified_base 16: mod_base = OTHER; note = 2'-O-methylcytidine-3'-phosphate
  modified_base 17: mod_base = OTHER; note = 2'-O-methyluridine-3'-phosphate
  modified_base 18: mod_base = OTHER; note = 2'-O-methyladenosine-3'-phosphate
  modified_base 19: mod_base = OTHER; note = 2'-O-methylguanosine-3'-phosphate
  modified_base 20: mod_base = OTHER; note = 2'-O-methylguanosine-3'-phosphate
  modified_base 21: mod_base = OTHER; note = 2'-O-methyladenosine-3'-phosphate attached to N-[tris(N-acetylgalactosamine-alkyl)-amidodecanoyl)]-4-hydr oxyprolinol Hyp-(N-acetylgalactosamine-alkyl)3
ttttcaatgggtgtcctagga

SEQ ID NO: 274 - RNA, 21 nt, synthetic construct
  misc_feature 1..21: note = Description of Artificial Sequence: Synthetic oligonucleotide
  source 1..21: mol_type = other RNA
  modified_base 1: mod_base = OTHER; note = 2'-O-methylcytidine-3'- phosphorothioate
  modified_base 2: mod_base = OTHER; note = 2'-O-methylcytidine-3'- phosphorothioate
  modified_base 3: mod_base = OTHER; note = 2'-O-methylguanosine-3'-phosphate
  modified_base 4: mod_base = OTHER; note = 2'-O-methyluridine-3'-phosphate
  modified_base 5: mod_base = OTHER; note = 2'-O-methyluridine-3'-phosphate
  modified_base 6: mod_base = OTHER; note = 2'-O-methyluridine-3'-phosphate
  modified_base 7: mod_base = OTHER; note = 2'-fluorocytidine-3'-phosphate
  modified_base 8: mod_base = OTHER; note = 2'-O-methylcytidine-3'-phosphate
  modified_base 9: mod_base = OTHER; note = 2'-fluoroadenosine-3'-phosphate
  modified_base 10: mod_base = OTHER; note = 2'-fluoroadenosine-3'-phosphate
  modified_base 11: mod_base = OTHER; note = 2'-fluoroguanosine-3'-phosphate
  modified_base 12: mod_base = OTHER; note = 2'-O-methyladenosine-3'-phosphate
  modified_base 13: mod_base = OTHER; note = 2'-O-methyluridine-3'-phosphate
  modified_base 14: mod_base = OTHER; note = 2'-O-methylcytidine-3'-phosphate
  modified_base 15: mod_base = OTHER; note = 2'-O-methyluridine-3'-phosphate
  modified_base 16: mod_base = OTHER; note = 2'-O-methylguanosine-3'-phosphate
  modified_base 17: mod_base = OTHER; note = 2'-O-methyladenosine-3'-phosphate
  modified_base 18: mod_base = OTHER; note = 2'-O-methylcytidine-3'-phosphate
  modified_base 19: mod_base = OTHER; note = 2'-O-methyladenosine-3'-phosphate
  modified_base 20: mod_base = OTHER; note = 2'-O-methylguanosine-3'-phosphate
  modified_base 21: mod_base = OTHER; note = 2'-O-methyluridine-3'-phosphate attached to N-[tris(N-acetylgalactosamine-alkyl)-amidodecanoyl)]-4-hydr oxyprolinol Hyp-(N-acetylgalactosamine-alkyl)3
ccgtttccaagatctgacagt

SEQ ID NO: 275 - RNA, 21 nt, synthetic construct
  misc_feature 1..21: note = Description of Artificial Sequence: Synthetic oligonucleotide
  source 1..21: mol_type = other RNA
  modified_base 1: mod_base = OTHER; note = 2'-O-methyladenosine-3'- phosphorothioate
  modified_base 2: mod_base = OTHER; note = 2'-O-methylguanosine-3'- phosphorothioate
  modified_base 3: mod_base = OTHER; note = 2'-O-methylguanosine-3'-phosphate
  modified_base 4: mod_base = OTHER; note = 2'-O-methylguanosine-3'-phosphate
  modified_base 5: mod_base = OTHER; note = 2'-O-methylguanosine-3'-phosphate
  modified_base 6: mod_base = OTHER; note = 2'-O-methylguanosine-3'-phosphate
  modified_base 7: mod_base = OTHER; note = 2'-fluoroadenosine-3'-phosphate
  modified_base 8: mod_base = OTHER; note = 2'-O-methylguanosine-3'-phosphate
  modified_base 9: mod_base = OTHER; note = 2'-fluoroadenosine-3'-phosphate
  modified_base 10: mod_base = OTHER; note = 2'-fluoroadenosine-3'-phosphate
  modified_base 11: mod_base = OTHER; note = 2'-fluoroadenosine-3'-phosphate
  modified_base 12: mod_base = OTHER; note = 2'-O-methylguanosine-3'-phosphate
  modified_base 13: mod_base = OTHER; note = 2'-O-methylguanosine-3'-phosphate
  modified_base 14: mod_base = OTHER; note = 2'-O-methyluridine-3'-phosphate
  modified_base 15: mod_base = OTHER; note = 2'-O-methylguanosine-3'-phosphate
  modified_base 16: mod_base = OTHER; note = 2'-O-methyluridine-3'-phosphate
  modified_base 17: mod_base = OTHER; note = 2'-O-methyluridine-3'-phosphate
  modified_base 18: mod_base = OTHER; note = 2'-O-methylcytidine-3'-phosphate
  modified_base 19: mod_base = OTHER; note = 2'-O-methyladenosine-3'-phosphate
  modified_base 20: mod_base = OTHER; note = 2'-O-methyladenosine-3'-phosphate
  modified_base 21: mod_base = OTHER; note = 2'-O-methyladenosine-3'-phosphate attached to N-[tris(N-acetylgalactosamine-alkyl)-amidodecanoyl)]-4-hydr oxyprolinol Hyp-(N-acetylgalactosamine-alkyl)3
agggggagaaaggtgttcaaa

SEQ ID NO: 276 - RNA, 21 nt, synthetic construct
  misc_feature 1..21: note = Description of Artificial Sequence: Synthetic oligonucleotide
  source 1..21: mol_type = other RNA
  modified_base 1: mod_base = OTHER; note = 2'-O-methyladenosine-3'- phosphorothioate
  modified_base 2: mod_base = OTHER; note = 2'-O-methylguanosine-3'- phosphorothioate
  modified_base 3: mod_base = OTHER; note = 2'-O-methyluridine-3'-phosphate
  modified_base 4: mod_base = OTHER; note = 2'-O-methylcytidine-3'-phosphate
  modified_base 5: mod_base = OTHER; note = 2'-O-methyladenosine-3'-phosphate
  modified_base 6: mod_base = OTHER; note = 2'-O-methyluridine-3'-phosphate
  modified_base 7: mod_base = OTHER; note = 2'-fluorocytidine-3'-phosphate
  modified_base 8: mod_base = OTHER; note = 2'-O-methylguanosine-3'-phosphate
  modified_base 9: mod_base = OTHER; note = 2'-fluoroadenosine-3'-phosphate
  modified_base 10: mod_base = OTHER; note = 2'-fluorocytidine-3'-phosphate
  modified_base 11: mod_base = OTHER; note = 2'-fluoroadenosine-3'-phosphate
  modified_base 12: mod_base = OTHER; note = 2'-O-methyladenosine-3'-phosphate
  modified_base 13: mod_base = OTHER; note = 2'-O-methylguanosine-3'-phosphate
  modified_base 14: mod_base = OTHER; note = 2'-O-methyladenosine-3'-phosphate
  modified_base 15: mod_base = OTHER; note = 2'-O-methylcytidine-3'-phosphate
  modified_base 16: mod_base = OTHER; note = 2'-O-methyladenosine-3'-phosphate
  modified_base 17: mod_base = OTHER; note = 2'-O-methyluridine-3'-phosphate
  modified_base 18: mod_base = OTHER; note = 2'-O-methyluridine-3'-phosphate
  modified_base 19: mod_base = OTHER; note = 2'-O-methylguanosine-3'-phosphate
  modified_base 20: mod_base = OTHER; note = 2'-O-methylguanosine-3'-phosphate
  modified_base 21: mod_base = OTHER; note = 2'-O-methyluridine-3'-phosphate attached to N-[tris(N-acetylgalactosamine-alkyl)-amidodecanoyl)]-4-hydr oxyprolinol Hyp-(N-acetylgalactosamine-alkyl)3
agtcatcgacaagacattggt

SEQ ID NO: 277 - RNA, 23 nt, synthetic construct
  misc_feature 1..23: note = Description of Artificial Sequence: Synthetic oligonucleotide
  source 1..23: mol_type = other RNA
  modified_base 1: mod_base = OTHER; note = 2'-O-methyluridine-3'-phosphorothioate
  modified_base 2: mod_base = OTHER; note = 2'-fluorouridine -3'-phosphorothioate
  modified_base 3: mod_base = OTHER; note = 2'-O-methylguanosine-3'-phosphate
  modified_base 4: mod_base = OTHER; note = 2'-fluorouridine-3'-phosphate
  modified_base 5: mod_base = OTHER; note = 2'-O-methylcytidine-3'-phosphate
  modified_base 6: mod_base = OTHER; note = 2'-fluoroguanosine-3'-phosphate
  modified_base 7: mod_base = OTHER; note = 2'-O-methyladenosine-3'-phosphate
  modified_base 8: mod_base = OTHER; note = 2'-fluorouridine-3'-phosphate
  modified_base 9: mod_base = OTHER; note = 2'-O-methylguanosine-3'-phosphate
  modified_base 10: mod_base = OTHER; note = 2'-fluoroadenosine-3'-phosphate
  modified_base 11: mod_base = OTHER; note = 2'-O-methylcytidine-3'-phosphate
  modified_base 12: mod_base = OTHER; note = 2'-O-methyluridine-3'-phosphate
  modified_base 13: mod_base = OTHER; note = 2'-O-methyluridine-3'-phosphate
  modified_base 14: mod_base = OTHER; note = 2'-fluorouridine-3'-phosphate
  modified_base 15: mod_base = OTHER; note = 2'-O-methylcytidine-3'-phosphate
  modified_base 16: mod_base = OTHER; note = 2'-fluoroadenosine-3'-phosphate
  modified_base 17: mod_base = OTHER; note = 2'-O-methylcytidine-3'-phosphate
  modified_base 18: mod_base = OTHER; note = 2'-fluoroadenosine-3'-phosphate
  modified_base 19: mod_base = OTHER; note = 2'-O-methyluridine-3'-phosphate
  modified_base 20: mod_base = OTHER; note = 2'-fluorouridine-3'-phosphate
  modified_base 21: mod_base = OTHER; note = 2'-O-methylcytidine-3'- phosphorothioate
  modified_base 22: mod_base = OTHER; note = 2'-O-methyluridine-3'-phosphorothioate
  modified_base 23: mod_base = OTHER; note = 2'-O-methylguanosine-3'-phosphate
ttgtcgatgactttcacattctg

SEQ ID NO: 278 - RNA, 23 nt, synthetic construct
  misc_feature 1..23: note = Description of Artificial Sequence: Synthetic oligonucleotide
  source 1..23: mol_type = other RNA
  modified_base 1: mod_base = OTHER; note = 5' Phosphate 2'-O-methyluridine-3'-phosphorothioate
  modified_base 2: mod_base = OTHER; note = 2'-fluorouridine -3'-phosphorothioate
  modified_base 3: mod_base = OTHER; note = 2'-O-methylguanosine-3'-phosphate
  modified_base 4: mod_base = OTHER; note = 2'-fluorouridine-3'-phosphate
  modified_base 5: mod_base = OTHER; note = 2'-O-methylcytidine-3'-phosphate
  modified_base 6: mod_base = OTHER; note = 2'-fluoroguanosine-3'-phosphate
  modified_base 7: mod_base = OTHER; note = 2'-O-methyladenosine-3'-phosphate
  modified_base 8: mod_base = OTHER; note = 2'-fluorouridine-3'-phosphate
  modified_base 9: mod_base = OTHER; note = 2'-O-methylguanosine-3'-phosphate
  modified_base 10: mod_base = OTHER; note = 2'-fluoroadenosine-3'-phosphate
  modified_base 11: mod_base = OTHER; note = 2'-O-methylcytidine-3'-phosphate
  modified_base 12: mod_base = OTHER; note = 2'-O-methyluridine-3'-phosphate
  modified_base 13: mod_base = OTHER; note = 2'-O-methyluridine-3'-phosphate
  modified_base 14: mod_base = OTHER; note = 2'-fluorouridine-3'-phosphate
  modified_base 15: mod_base = OTHER; note = 2'-O-methylcytidine-3'-phosphate
  modified_base 16: mod_base = OTHER; note = 2'-fluoroadenosine-3'-phosphate
  modified_base 17: mod_base = OTHER; note = 2'-O-methylcytidine-3'-phosphate
  modified_base 18: mod_base = OTHER; note = 2'-fluoroadenosine-3'-phosphate
  modified_base 19: mod_base = OTHER; note = 2'-O-methyluridine-3'-phosphate
  modified_base 20: mod_base = OTHER; note = 2'-fluorouridine-3'-phosphate
  modified_base 21: mod_base = OTHER; note = 2'-O-methylcytidine-3'- phosphorothioate
  modified_base 22: mod_base = OTHER; note = 2'-O-methyluridine-3'-phosphorothioate
  modified_base 23: mod_base = OTHER; note = 2'-O-methylguanosine-3'-phosphate
ttgtcgatgactttcacattctg

SEQ ID NO: 279 - RNA, 23 nt, synthetic construct
  misc_feature 1..23: note = Description of Artificial Sequence: Synthetic oligonucleotide
  source 1..23: mol_type = other RNA
  modified_base 1: mod_base = OTHER; note = 2'-O-methyluridine-3'-phosphorothioate
  modified_base 2: mod_base = OTHER; note = 2'-fluorouridine -3'-phosphorothioate
  modified_base 3: mod_base = OTHER; note = 2'-O-methylguanosine-3'-phosphate
  modified_base 4: mod_base = OTHER; note = 2'-fluorouridine-3'-phosphate
  modified_base 5: mod_base = OTHER; note = 2'-O-methylcytidine-3'-phosphate
  modified_base 6: mod_base = OTHER; note = 2'-fluoroguanosine-3'-phosphate
  modified_base 7: mod_base = OTHER; note = 2'-O-methyladenosine-3'-phosphate
  modified_base 8: mod_base = OTHER; note = 2'-fluorouridine-3'-phosphate
  modified_base 9: mod_base = OTHER; note = 2'-O-methylguanosine-3'-phosphate
  modified_base 10: mod_base = OTHER; note = 2'-fluoroadenosine-3'-phosphate
  modified_base 11: mod_base = OTHER; note = 2'-O-methylcytidine-3'-phosphate
  modified_base 12: mod_base = OTHER; note = 2'-O-methyluridine-3'-phosphate
  modified_base 13: mod_base = OTHER; note = 2'-O-methyluridine-3'-phosphate
  modified_base 14: mod_base = OTHER; note = 2'-fluorouridine-3'-phosphate
  modified_base 15: mod_base = OTHER; note = 2'-O-methylcytidine-3'-phosphate
  modified_base 16: mod_base = OTHER; note = 2'-fluoroadenosine-3'-phosphate
  modified_base 17: mod_base = OTHER; note = 2'-O-methylcytidine-3'-phosphate
  modified_base 18: mod_base = OTHER; note = 2'-fluoroadenosine-3'-phosphate
  modified_base 19: mod_base = OTHER; note = 2'-O-methyluridine-3'-phosphate
  modified_base 20: mod_base = OTHER; note = 2'-fluorouridine-3'-phosphate
  modified_base 21: mod_base = OTHER; note = 2'-O-methylcytidine-3'- phosphorothioate
  modified_base 22: mod_base = OTHER; note = 2'-O-methyluridine-3'-phosphorothioate
  modified_base 23: mod_base = OTHER; note = 2'-O-methylguanosine-3'-phosphate
ttgtcgatgactttcacattctg

SEQ ID NO: 280 - RNA, 23 nt, synthetic construct
  misc_feature 1..23: note = Description of Artificial Sequence: Synthetic oligonucleotide
  source 1..23: mol_type = other RNA
  modified_base 1: mod_base = OTHER; note = 2'-O-methyluridine-3'-phosphorothioate
  modified_base 2: mod_base = OTHER; note = 2'-fluorouridine -3'-phosphorothioate
  modified_base 3: mod_base = OTHER; note = 2'-O-methylguanosine-3'-phosphate
  modified_base 4: mod_base = OTHER; note = 2'-fluorouridine-3'-phosphate
  modified_base 5: mod_base = OTHER; note = 2'-O-methylcytidine-3'-phosphate
  modified_base 6: mod_base = OTHER; note = 2'-fluoroguanosine-3'-phosphate
  modified_base 7: mod_base = OTHER; note = 2'-O-methyladenosine-3'-phosphate
  modified_base 8: mod_base = OTHER; note = 2'-fluorouridine-3'-phosphate
  modified_base 9: mod_base = OTHER; note = 2'-O-methylguanosine-3'-phosphate
  modified_base 10: mod_base = OTHER; note = 2'-fluoroadenosine-3'-phosphate
  modified_base 11: mod_base = OTHER; note = 2'-O-methylcytidine-3'-phosphate
  modified_base 12: mod_base = OTHER; note = 2'-O-methyluridine-3'-phosphate
  modified_base 13: mod_base = OTHER; note = 2'-O-methyluridine-3'-phosphate
  modified_base 14: mod_base = OTHER; note = 2'-fluorouridine-3'-phosphate
  modified_base 15: mod_base = OTHER; note = 2'-O-methylcytidine-3'-phosphate
  modified_base 16: mod_base = OTHER; note = 2'-fluoroadenosine-3'-phosphate
  modified_base 17: mod_base = OTHER; note = 2'-O-methylcytidine-3'-phosphate
  modified_base 18: mod_base = OTHER; note = 2'-fluoroadenosine-3'-phosphate
  modified_base 19: mod_base = OTHER; note = 2'-O-methyluridine-3'-phosphate
  modified_base 20: mod_base = OTHER; note = 2'-fluorouridine-3'-phosphate
  modified_base 21: mod_base = OTHER; note = 2'-O-methylcytidine-3'- phosphorothioate
  modified_base 22: mod_base = OTHER; note = 2'-O-methyluridine-3'-phosphorothioate
  modified_base 23: mod_base = OTHER; note = 2'-O-methylguanosine-3'-phosphate
ttgtcgatgactttcacattctg

SEQ ID NO: 281 - RNA, 23 nt, synthetic construct
  misc_feature 1..23: note = Description of Artificial Sequence: Synthetic oligonucleotide
  source 1..23: mol_type = other RNA
  modified_base 1: mod_base = OTHER; note = 2'-O-methyluridine-3'-phosphorothioate
  modified_base 2: mod_base = OTHER; note = 2'-fluorouridine -3'-phosphorothioate
  modified_base 3: mod_base = OTHER; note = 2'-O-methylguanosine-3'-phosphate
  modified_base 4: mod_base = OTHER; note = 2'-fluorouridine-3'-phosphate
  modified_base 5: mod_base = OTHER; note = 2'-O-methylcytidine-3'-phosphate
  modified_base 6: mod_base = OTHER; note = 2'-fluoroguanosine-3'-phosphate
  modified_base 7: mod_base = OTHER; note = 2'-O-methyladenosine-3'-phosphate
  modified_base 8: mod_base = OTHER; note = 2'-fluorouridine-3'-phosphate
  modified_base 9: mod_base = OTHER; note = 2'-O-methylguanosine-3'-phosphate
  modified_base 10: mod_base = OTHER; note = 2'-fluoroadenosine-3'-phosphate
  modified_base 11: mod_base = OTHER; note = 2'-O-methylcytidine-3'-phosphate
  modified_base 12: mod_base = OTHER; note = 2'-O-methyluridine-3'-phosphate
  modified_base 13: mod_base = OTHER; note = 2'-O-methyluridine-3'-phosphate
  modified_base 14: mod_base = OTHER; note = 2'-fluorouridine-3'-phosphate
  modified_base 15: mod_base = OTHER; note = 2'-O-methylcytidine-3'-phosphate
  modified_base 16: mod_base = OTHER; note = 2'-fluoroadenosine-3'-phosphate
  modified_base 17: mod_base = OTHER; note = 2'-O-methylcytidine-3'-phosphate
  modified_base 18: mod_base = OTHER; note = 2'-fluoroadenosine-3'-phosphate
  modified_base 19: mod_base = OTHER; note = 2'-O-methyluridine-3'-phosphate
  modified_base 20: mod_base = OTHER; note = 2'-fluorouridine-3'-phosphate
  modified_base 21: mod_base = OTHER; note = 2'-O-methylcytidine-3'- phosphorothioate
  modified_base 22: mod_base = OTHER; note = 2'-O-methyluridine-3'-phosphorothioate
  modified_base 23: mod_base = OTHER; note = 2'-O-methylguanosine-3'-phosphate
ttgtcgatgactttcacattctg

SEQ ID NO: 282 - RNA, 23 nt, synthetic construct
  misc_feature 1..23: note = Description of Artificial Sequence: Synthetic oligonucleotide
  source 1..23: mol_type = other RNA
  modified_base 1: mod_base = OTHER; note = 2'-O-methyluridine-3'-phosphorothioate
  modified_base 2: mod_base = OTHER; note = 2'-fluorouridine -3'-phosphorothioate
  modified_base 3: mod_base = OTHER; note = 2'-O-methylguanosine-3'-phosphate
  modified_base 4: mod_base = OTHER; note = 2'-fluorouridine-3'-phosphate
  modified_base 5: mod_base = OTHER; note = 2'-O-methylcytidine-3'-phosphate
  modified_base 6: mod_base = OTHER; note = 2'-fluoroguanosine-3'-phosphate
  modified_base 7: mod_base = OTHER; note = 2'-O-methyladenosine-3'-phosphate
  modified_base 8: mod_base = OTHER; note = 2'-fluorouridine-3'-phosphate
  modified_base 9: mod_base = OTHER; note = 2'-O-methylguanosine-3'-phosphate
  modified_base 10: mod_base = OTHER; note = 2'-fluoroadenosine-3'-phosphate
  modified_base 11: mod_base = OTHER; note = 2'-O-methylcytidine-3'-phosphate
  modified_base 12: mod_base = OTHER; note = 2'-O-methyluridine-3'-phosphate
  modified_base 13: mod_base = OTHER; note = 2'-O-methyluridine-3'-phosphate
  modified_base 14: mod_base = OTHER; note = 2'-fluorouridine-3'-phosphate
  modified_base 15: mod_base = OTHER; note = 2'-O-methylcytidine-3'-phosphate
  modified_base 16: mod_base = OTHER; note = 2'-fluoroadenosine-3'-phosphate
  modified_base 17: mod_base = OTHER; note = 2'-O-methylcytidine-3'-phosphate
  modified_base 18: mod_base = OTHER; note = 2'-fluoroadenosine-3'-phosphate
  modified_base 19: mod_base = OTHER; note = 2'-O-methyluridine-3'-phosphate
  modified_base 20: mod_base = OTHER; note = 2'-fluorouridine-3'-phosphate
  modified_base 21: mod_base = OTHER; note = 2'-O-methylcytidine-3'- phosphorothioate
  modified_base 22: mod_base = OTHER; note = 2'-O-methyluridine-3'-phosphorothioate
  modified_base 23: mod_base = OTHER; note = 2'-O-methylguanosine-3'-phosphate
ttgtcgatgactttcacattctg

SEQ ID NO: 283 - RNA, 23 nt, synthetic construct
  misc_feature 1..23: note = Description of Artificial Sequence: Synthetic oligonucleotide
  source 1..23: mol_type = other RNA
  modified_base 1: mod_base = OTHER; note = 2'-O-methyluridine-3'-phosphorothioate
  modified_base 2: mod_base = OTHER; note = 2'-fluorouridine -3'-phosphorothioate
  modified_base 3: mod_base = OTHER; note = 2'-O-methylguanosine-3'-phosphate
  modified_base 4: mod_base = OTHER; note = 2'-fluorouridine-3'-phosphate
  modified_base 5: mod_base = OTHER; note = 2'-O-methylcytidine-3'-phosphate
  modified_base 6: mod_base = OTHER; note = 2'-fluoroguanosine-3'-phosphate
  modified_base 7: mod_base = OTHER; note = 2'-O-methyladenosine-3'-phosphate
  modified_base 8: mod_base = OTHER; note = 2'-fluorouridine-3'-phosphate
  modified_base 9: mod_base = OTHER; note = 2'-O-methylguanosine-3'-phosphate
  modified_base 10: mod_base = OTHER; note = 2'-fluoroadenosine-3'-phosphate
  modified_base 11: mod_base = OTHER; note = 2'-O-methylcytidine-3'-phosphate
  modified_base 12: mod_base = OTHER; note = 2'-O-methyluridine-3'-phosphate
  modified_base 13: mod_base = OTHER; note = 2'-O-methyluridine-3'-phosphate
  modified_base 14: mod_base = OTHER; note = 2'-fluorouridine-3'-phosphate
  modified_base 15: mod_base = OTHER; note = 2'-O-methylcytidine-3'-phosphate
  modified_base 16: mod_base = OTHER; note = 2'-fluoroadenosine-3'-phosphate
  modified_base 17: mod_base = OTHER; note = 2'-O-methylcytidine-3'-phosphate
  modified_base 18: mod_base = OTHER; note = 2'-fluoroadenosine-3'-phosphate
  modified_base 19: mod_base = OTHER; note = 2'-O-methyluridine-3'-phosphate
  modified_base 20: mod_base = OTHER; note = 2'-fluorouridine-3'-phosphate
  modified_base 21: mod_base = OTHER; note = 2'-O-methylcytidine-3'- phosphorothioate
  modified_base 22: mod_base = OTHER; note = 2'-O-methyluridine-3'-phosphorothioate
  modified_base 23: mod_base = OTHER; note = 2'-O-methylguanosine-3'-phosphate
ttgtcgatgactttcacattctg

SEQ ID NO: 284 - RNA, 23 nt, synthetic construct
  misc_feature 1..23: note = Description of Artificial Sequence: Synthetic oligonucleotide
  source 1..23: mol_type = other RNA
  modified_base 1: mod_base = OTHER; note = 2'-O-methyluridine-3'-phosphorothioate
  modified_base 2: mod_base = OTHER; note = 2'-fluorouridine -3'-phosphorothioate
  modified_base 3: mod_base = OTHER; note = 2'-O-methylguanosine-3'-phosphate
  modified_base 4: mod_base = OTHER; note = 2'-fluorouridine-3'-phosphate
  modified_base 5: mod_base = OTHER; note = 2'-O-methylcytidine-3'-phosphate
  modified_base 6: mod_base = OTHER; note = 2'-fluoroguanosine-3'-phosphate
  modified_base 7: mod_base = OTHER; note = 2'-O-methyladenosine-3'-phosphate
  modified_base 8: mod_base = OTHER; note = 2'-fluorouridine-3'-phosphate
  modified_base 9: mod_base = OTHER; note = 2'-O-methylguanosine-3'-phosphate
  modified_base 10: mod_base = OTHER; note = 2'-fluoroadenosine-3'-phosphate
  modified_base 11: mod_base = OTHER; note = 2'-O-methylcytidine-3'-phosphate
  modified_base 12: mod_base = OTHER; note = 2'-O-methyluridine-3'-phosphate
  modified_base 13: mod_base = OTHER; note = 2'-O-methyluridine-3'-phosphate
  modified_base 14: mod_base = OTHER; note = 2'-fluorouridine-3'-phosphate
  modified_base 15: mod_base = OTHER; note = 2'-O-methylcytidine-3'-phosphate
  modified_base 16: mod_base = OTHER; note = 2'-fluoroadenosine-3'-phosphate
  modified_base 17: mod_base = OTHER; note = 2'-O-methylcytidine-3'-phosphate
  modified_base 18: mod_base = OTHER; note = 2'-fluoroadenosine-3'-phosphate
  modified_base 19: mod_base = OTHER; note = 2'-O-methyluridine-3'-phosphate
  modified_base 20: mod_base = OTHER; note = 2'-fluorouridine-3'-phosphate
  modified_base 21: mod_base = OTHER; note = 2'-O-methylcytidine-3'- phosphorothioate
  modified_base 22: mod_base = OTHER; note = 2'-O-methyluridine-3'-phosphorothioate
  modified_base 23: mod_base = OTHER; note = 2'-O-methylguanosine-3'-phosphate
ttgtcgatgactttcacattctg

SEQ ID NO: 285 - RNA, 21 nt, synthetic construct
  misc_feature 1..21: note = Description of Artificial Sequence: Synthetic oligonucleotide
  source 1..21: mol_type = other RNA
  modified_base 1: mod_base = OTHER; note = 2'-O-methyluridine-3'-phosphorothioate
  modified_base 2: mod_base = OTHER; note = 2'-fluorouridine -3'-phosphorothioate
  modified_base 3: mod_base = OTHER; note = 2'-O-methylguanosine-3'-phosphate
  modified_base 4: mod_base = OTHER; note = 2'-fluorouridine-3'-phosphate
  modified_base 5: mod_base = OTHER; note = 2'-O-methylcytidine-3'-phosphate
  modified_base 6: mod_base = OTHER; note = 2'-fluoroguanosine-3'-phosphate
  modified_base 7: mod_base = OTHER; note = 2'-O-methyladenosine-3'-phosphate
  modified_base 8: mod_base = OTHER; note = 2'-fluorouridine-3'-phosphate
  modified_base 9: mod_base = OTHER; note = 2'-O-methylguanosine-3'-phosphate
  modified_base 10: mod_base = OTHER; note = 2'-fluoroadenosine-3'-phosphate
  modified_base 11: mod_base = OTHER; note = 2'-O-methylcytidine-3'-phosphate
  modified_base 12: mod_base = OTHER; note = 2'-O-methyluridine-3'-phosphate
  modified_base 13: mod_base = OTHER; note = 2'-O-methyluridine-3'-phosphate
  modified_base 14: mod_base = OTHER; note = 2'-fluorouridine-3'-phosphate
  modified_base 15: mod_base = OTHER; note = 2'-O-methylcytidine-3'-phosphate
  modified_base 16: mod_base = OTHER; note = 2'-fluoroadenosine-3'-phosphate
  modified_base 17: mod_base = OTHER; note = 2'-O-methylcytidine-3'-phosphate
  modified_base 18: mod_base = OTHER; note = 2'-fluoroadenosine-3'-phosphate
  modified_base 19: mod_base = OTHER; note = 2'-O-methyluridine-3'-phosphorothioate
  modified_base 20: mod_base = OTHER; note = 2'-O-methyluridine-3'-phosphorothioate
  modified_base 21: mod_base = OTHER; note = 2'-O-methylcytidine-3'-phosphate
ttgtcgatgactttcacattc

SEQ ID NO: 286 - RNA, 21 nt, synthetic construct
  misc_feature 1..21: note = Description of Artificial Sequence: Synthetic oligonucleotide
  source 1..21: mol_type = other RNA
  modified_base 1: mod_base = OTHER; note = 2'-O-methyluridine-3'-phosphorothioate
  modified_base 2: mod_base = OTHER; note = 2'-fluorouridine -3'-phosphorothioate
  modified_base 3: mod_base = OTHER; note = 2'-O-methylguanosine-3'-phosphate
  modified_base 4: mod_base = OTHER; note = 2'-O-methyluridine-3'-phosphate
  modified_base 5: mod_base = OTHER; note = 2'-O-methylcytidine-3'-phosphate
  modified_base 6: mod_base = OTHER; note = 2'-fluoroguanosine-3'-phosphate
  modified_base 7: mod_base = OTHER; note = 2'-O-methyladenosine-3'-phosphate
  modified_base 8: mod_base = OTHER; note = 2'-O-methyluridine-3'-phosphate
  modified_base 9: mod_base = OTHER; note = 2'-O-methylguanosine-3'-phosphate
  modified_base 10: mod_base = OTHER; note = 2'-O-methyladenosine-3'-phosphate
  modified_base 11: mod_base = OTHER; note = 2'-O-methylcytidine-3'-phosphate
  modified_base 12: mod_base = OTHER; note = 2'-O-methyluridine-3'-phosphate
  modified_base 13: mod_base = OTHER; note = 2'-O-methyluridine-3'-phosphate
  modified_base 14: mod_base = OTHER; note = 2'-fluorouridine-3'-phosphate
  modified_base 15: mod_base = OTHER; note = 2'-O-methylcytidine-3'-phosphate
  modified_base 16: mod_base = OTHER; note = 2'-fluoroadenosine-3'-phosphate
  modified_base 17: mod_base = OTHER; note = 2'-O-methylcytidine-3'-phosphate
  modified_base 18: mod_base = OTHER; note = 2'-O-methyladenosine-3'-phosphate
  modified_base 19: mod_base = OTHER; note = 2'-O-methyluridine-3'-phosphorothioate
  modified_base 20: mod_base = OTHER; note = 2'-O-methyluridine-3'-phosphorothioate
  modified_base 21: mod_base = OTHER; note = 2'-O-methylcytidine-3'-phosphate
ttgtcgatgactttcacattc

SEQ ID NO: 287 - RNA, 23 nt, synthetic construct
  misc_feature 1..23: note = Description of Artificial Sequence: Synthetic oligonucleotide
  source 1..23: mol_type = other RNA
  modified_base 1: mod_base = OTHER; note = 2'-O-methyluridine-3'-phosphorothioate
  modified_base 2: mod_base = OTHER; note = 2'-fluorouridine -3'-phosphorothioate
  modified_base 3: mod_base = OTHER; note = 2'-O-methylguanosine-3'-phosphate
  modified_base 4: mod_base = OTHER; note = 2'-O-methyluridine-3'-phosphate
  modified_base 5: mod_base = OTHER; note = 2'-O-methylcytidine-3'-phosphate
  modified_base 6: mod_base = OTHER; note = 2'-fluoroguanosine-3'-phosphate
  modified_base 7: mod_base = OTHER; note = 2'-O-methyladenosine-3'-phosphate
  modified_base 8: mod_base = OTHER; note = 2'-fluorouridine-3'-phosphate
  modified_base 9: mod_base = OTHER; note = 2'-O-methylguanosine-3'-phosphate
  modified_base 10: mod_base = OTHER; note = 2'-fluoroadenosine-3'-phosphate
  modified_base 11: mod_base = OTHER; note = 2'-O-methylcytidine-3'-phosphate
  modified_base 12: mod_base = OTHER; note = 2'-O-methyluridine-3'-phosphate
  modified_base 13: mod_base = OTHER; note = 2'-O-methyluridine-3'-phosphate
  modified_base 14: mod_base = OTHER; note = 2'-fluorouridine-3'-phosphate
  modified_base 15: mod_base = OTHER; note = 2'-O-methylcytidine-3'-phosphate
  modified_base 16: mod_base = OTHER; note = 2'-fluoroadenosine-3'-phosphate
  modified_base 17: mod_base = OTHER; note = 2'-O-methylcytidine-3'-phosphate
  modified_base 18: mod_base = OTHER; note = 2'-O-methyladenosine-3'-phosphate
  modified_base 19: mod_base = OTHER; note = 2'-O-methyluridine-3'-phosphate
  modified_base 20: mod_base = OTHER; note = 2'-O-methyluridine-3'-phosphate
  modified_base 21: mod_base = OTHER; note = 2'-O-methylcytidine-3'- phosphorothioate
  modified_base 22: mod_base = OTHER; note = 2'-O-methyluridine-3'-phosphorothioate
  modified_base 23: mod_base = OTHER; note = 2'-O-methylguanosine-3'-phosphate
ttgtcgatgactttcacattctg

SEQ ID NO: 288 - RNA, 23 nt, synthetic construct
  misc_feature 1..23: note = Description of Artificial Sequence: Synthetic oligonucleotide
  source 1..23: mol_type = other RNA
  modified_base 1: mod_base = OTHER; note = 2'-O-methyluridine-3'-phosphorothioate
  modified_base 2: mod_base = OTHER; note = 2'-fluorouridine -3'-phosphorothioate
  modified_base 3: mod_base = OTHER; note = 2'-O-methylguanosine-3'-phosphate
  modified_base 4: mod_base = OTHER; note = 2'-O-methyluridine-3'-phosphate
  modified_base 5: mod_base = OTHER; note = 2'-O-methylcytidine-3'-phosphate
  modified_base 6: mod_base = OTHER; note = 2'-fluoroguanosine-3'-phosphate
  modified_base 7: mod_base = OTHER; note = 2'-O-methyladenosine-3'-phosphate
  modified_base 8: mod_base = OTHER; note = 2'-fluorouridine-3'-phosphate
  modified_base 9: mod_base = OTHER; note = 2'-fluoroguanosine-3'-phosphate
  modified_base 10: mod_base = OTHER; note = 2'-O-methyladenosine-3'-phosphate
  modified_base 11: mod_base = OTHER; note = 2'-O-methylcytidine-3'-phosphate
  modified_base 12: mod_base = OTHER; note = 2'-O-methyluridine-3'-phosphate
  modified_base 13: mod_base = OTHER; note = 2'-O-methyluridine-3'-phosphate
  modified_base 14: mod_base = OTHER; note = 2'-fluorouridine-3'-phosphate
  modified_base 15: mod_base = OTHER; note = 2'-O-methylcytidine-3'-phosphate
  modified_base 16: mod_base = OTHER; note = 2'-fluoroadenosine-3'-phosphate
  modified_base 17: mod_base = OTHER; note = 2'-O-methylcytidine-3'-phosphate
  modified_base 18: mod_base = OTHER; note = 2'-O-methyladenosine-3'-phosphate
  modified_base 19: mod_base = OTHER; note = 2'-O-methyluridine-3'-phosphate
  modified_base 20: mod_base = OTHER; note = 2'-O-methyluridine-3'-phosphate
  modified_base 21: mod_base = OTHER; note = 2'-O-methylcytidine-3'- phosphorothioate
  modified_base 22: mod_base = OTHER; note = 2'-O-methyluridine-3'-phosphorothioate
  modified_base 23: mod_base = OTHER; note = 2'-O-methylguanosine-3'-phosphate
ttgtcgatgactttcacattctg

SEQ ID NO: 289 - RNA, 23 nt, synthetic construct
  misc_feature 1..23: note = Description of Artificial Sequence: Synthetic oligonucleotide
  source 1..23: mol_type = other RNA
  modified_base 1: mod_base = OTHER; note = 2'-O-methyluridine-3'-phosphorothioate
  modified_base 2: mod_base = OTHER; note = 2'-fluorouridine -3'-phosphorothioate
  modified_base 3: mod_base = OTHER; note = 2'-O-methylguanosine-3'-phosphate
  modified_base 4: mod_base = OTHER; note = 2'-O-methyluridine-3'-phosphate
  modified_base 5: mod_base = OTHER; note = 2'-O-methylcytidine-3'-phosphate
  modified_base 6: mod_base = OTHER; note = 2'-fluoroguanosine-3'-phosphate
  modified_base 7: mod_base = OTHER; note = 2'-O-methyladenosine-3'-phosphate
  modified_base 8: mod_base = OTHER; note = 2'-O-methyluridine-3'-phosphate
  modified_base 9: mod_base = OTHER; note = 2'-O-methylguanosine-3'-phosphate
  modified_base 10: mod_base = OTHER; note = 2'-O-methyladenosine-3'-phosphate
  modified_base 11: mod_base = OTHER; note = 2'-O-methylcytidine-3'-phosphate
  modified_base 12: mod_base = OTHER; note = 2'-O-methyluridine-3'-phosphate
  modified_base 13: mod_base = OTHER; note = 2'-O-methyluridine-3'-phosphate
  modified_base 14: mod_base = OTHER; note = 2'-fluorouridine-3'-phosphate
  modified_base 15: mod_base = OTHER; note = 2'-O-methylcytidine-3'-phosphate
  modified_base 16: mod_base = OTHER; note = 2'-fluoroadenosine-3'-phosphate
  modified_base 17: mod_base = OTHER; note = 2'-O-methylcytidine-3'-phosphate
  modified_base 18: mod_base = OTHER; note = 2'-O-methyladenosine-3'-phosphate
  modified_base 19: mod_base = OTHER; note = 2'-O-methyluridine-3'-phosphate
  modified_base 20: mod_base = OTHER; note = 2'-O-methyluridine-3'-phosphate
  modified_base 21: mod_base = OTHER; note = 2'-O-methylcytidine-3'- phosphorothioate
  modified_base 22: mod_base = OTHER; note = 2'-O-methyluridine-3'-phosphorothioate
  modified_base 23: mod_base = OTHER; note = 2'-O-methylguanosine-3'-phosphate
ttgtcgatgactttcacattctg

SEQ ID NO: 290 - RNA, 23 nt, synthetic construct
  misc_feature 1..23: note = Description of Artificial Sequence: Synthetic oligonucleotide
  source 1..23: mol_type = other RNA
  modified_base 1: mod_base = OTHER; note = 2'-O-methyluridine-3'-phosphorothioate
  modified_base 2: mod_base = OTHER; note = 2'-fluorouridine -3'-phosphorothioate
  modified_base 3: mod_base = OTHER; note = 2'-O-methylguanosine-3'-phosphate
  modified_base 4: mod_base = OTHER; note = 2'-O-methyluridine-3'-phosphate
  modified_base 5: mod_base = OTHER; note = 2'-O-methylcytidine-3'-phosphate
  modified_base 6: mod_base = OTHER; note = 2'-fluoroguanosine-3'-phosphate
  modified_base 7: mod_base = OTHER; note = 2'-O-methyladenosine-3'-phosphate
  modified_base 8: mod_base = OTHER; note = 2'-O-methyluridine-3'-phosphate
  modified_base 9: mod_base = OTHER; note = 2'-O-methylguanosine-3'-phosphate
  modified_base 10: mod_base = OTHER; note = 2'-O-methyladenosine-3'-phosphate
  modified_base 11: mod_base = OTHER; note = 2'-O-methylcytidine-3'-phosphate
  modified_base 12: mod_base = OTHER; note = 2'-O-methyluridine-3'-phosphate
  modified_base 13: mod_base = OTHER; note = 2'-O-methyluridine-3'-phosphate
  modified_base 14: mod_base = OTHER; note = 2'-fluorouridine-3'-phosphate
  modified_base 15: mod_base = OTHER; note = 2'-O-methylcytidine-3'-phosphate
  modified_base 16: mod_base = OTHER; note = 2'-O-methyladenosine-3'-phosphate
  modified_base 17: mod_base = OTHER; note = 2'-O-methylcytidine-3'-phosphate
  modified_base 18: mod_base = OTHER; note = 2'-O-methyladenosine-3'-phosphate
  modified_base 19: mod_base = OTHER; note = 2'-O-methyluridine-3'-phosphate
  modified_base 20: mod_base = OTHER; note = 2'-O-methyluridine-3'-phosphate
  modified_base 21: mod_base = OTHER; note = 2'-O-methylcytidine-3'- phosphorothioate
  modified_base 22: mod_base = OTHER; note = 2'-O-methyluridine-3'-phosphorothioate
  modified_base 23: mod_base = OTHER; note = 2'-O-methylguanosine-3'-phosphate
ttgtcgatgactttcacattctg

SEQ ID NO: 291 - RNA, 23 nt, synthetic construct
  misc_feature 1..23: note = Description of Artificial Sequence: Synthetic oligonucleotide
  source 1..23: mol_type = other RNA
  modified_base 1: mod_base = OTHER; note = 2'-O-methyluridine-3'-phosphorothioate
  modified_base 2: mod_base = OTHER; note = 2'-fluorouridine -3'-phosphorothioate
  modified_base 3: mod_base = OTHER; note = 2'-O-methylguanosine-3'-phosphate
  modified_base 4: mod_base = OTHER; note = 2'-O-methyluridine-3'-phosphate
  modified_base 5: mod_base = OTHER; note = 2'-O-methylcytidine-3'-phosphate
  modified_base 6: mod_base = OTHER; note = 2'-O-methylguanosine-3'-phosphate
  modified_base 7: mod_base = OTHER; note = 2'-O-methyladenosine-3'-phosphate
  modified_base 8: mod_base = OTHER; note = 2'-O-methyluridine-3'-phosphate
  modified_base 9: mod_base = OTHER; note = 2'-O-methylguanosine-3'-phosphate
  modified_base 10: mod_base = OTHER; note = 2'-O-methyladenosine-3'-phosphate
  modified_base 11: mod_base = OTHER; note = 2'-O-methylcytidine-3'-phosphate
  modified_base 12: mod_base = OTHER; note = 2'-O-methyluridine-3'-phosphate
  modified_base 13: mod_base = OTHER; note = 2'-O-methyluridine-3'-phosphate
  modified_base 14: mod_base = OTHER; note = 2'-fluorouridine-3'-phosphate
  modified_base 15: mod_base = OTHER; note = 2'-O-methylcytidine-3'-phosphate
  modified_base 16: mod_base = OTHER; note = 2'-O-methyladenosine-3'-phosphate
  modified_base 17: mod_base = OTHER; note = 2'-O-methylcytidine-3'-phosphate
  modified_base 18: mod_base = OTHER; note = 2'-O-methyladenosine-3'-phosphate
  modified_base 19: mod_base = OTHER; note = 2'-O-methyluridine-3'-phosphate
  modified_base 20: mod_base = OTHER; note = 2'-O-methyluridine-3'-phosphate
  modified_base 21: mod_base = OTHER; note = 2'-O-methylcytidine-3'- phosphorothioate
  modified_base 22: mod_base = OTHER; note = 2'-O-methyluridine-3'-phosphorothioate
  modified_base 23: mod_base = OTHER; note = 2'-O-methylguanosine-3'-phosphate
ttgtcgatgactttcacattctg

SEQ ID NO: 292 - RNA, 23 nt, synthetic construct
  misc_feature 1..23: note = Description of Artificial Sequence: Synthetic oligonucleotide
  source 1..23: mol_type = other RNA
  modified_base 1: mod_base = OTHER; note = 2'-O-methyluridine-3'-phosphorothioate
  modified_base 2: mod_base = OTHER; note = 2'-fluorouridine -3'-phosphorothioate
  modified_base 3: mod_base = OTHER; note = 2'-O-methylguanosine-3'-phosphate
  modified_base 4: mod_base = OTHER; note = 2'-O-methyluridine-3'-phosphate
  modified_base 5: mod_base = OTHER; note = 2'-O-methylcytidine-3'-phosphate
  modified_base 6: mod_base = OTHER; note = 2'-fluoroguanosine-3'-phosphate
  modified_base 7: mod_base = OTHER; note = 2'-O-methyladenosine-3'-phosphate
  modified_base 8: mod_base = OTHER; note = 2'-fluorouridine-3'-phosphate
  modified_base 9: mod_base = OTHER; note = 2'-O-methylguanosine-3'-phosphate
  modified_base 10: mod_base = OTHER; note = 2'-fluoroadenosine-3'-phosphate
  modified_base 11: mod_base = OTHER; note = 2'-O-methylcytidine-3'-phosphate
  modified_base 12: mod_base = OTHER; note = 2'-O-methyluridine-3'-phosphate
  modified_base 13: mod_base = OTHER; note = 2'-O-methyluridine-3'-phosphate
  modified_base 14: mod_base = OTHER; note = 2'-fluorouridine-3'-phosphate
  modified_base 15: mod_base = OTHER; note = 2'-O-methylcytidine-3'-phosphate
  modified_base 16: mod_base = OTHER; note = 2'-fluoroadenosine-3'-phosphate
  modified_base 17: mod_base = OTHER; note = 2'-O-methylcytidine-3'-phosphate
  modified_base 18: mod_base = OTHER; note = 2'-O-methyladenosine-3'-phosphate
  modified_base 19: mod_base = OTHER; note = 2'-O-methyluridine-3'-phosphate
  modified_base 20: mod_base = OTHER; note = 2'-O-methyluridine-3'-phosphate
  modified_base 21: mod_base = OTHER; note = 2'-O-methylcytidine-3'- phosphorothioate
  modified_base 22: mod_base = OTHER; note = 2'-O-methyluridine-3'-phosphorothioate
  modified_base 23: mod_base = OTHER; note = 2'-O-methylguanosine-3'-phosphate
ttgtcgatgactttcacattctg

SEQ ID NO: 293 - RNA, 23 nt, synthetic construct
  misc_feature 1..23: note = Description of Artificial Sequence: Synthetic oligonucleotide
  source 1..23: mol_type = other RNA
  modified_base 1: mod_base = OTHER; note = 2'-O-methyluridine-3'-phosphorothioate
  modified_base 2: mod_base = OTHER; note = 2'-fluorouridine -3'-phosphorothioate
  modified_base 3: mod_base = OTHER; note = 2'-O-methylguanosine-3'-phosphate
  modified_base 4: mod_base = OTHER; note = 2'-O-methyluridine-3'-phosphate
  modified_base 5: mod_base = OTHER; note = 2'-O-methylcytidine-3'-phosphate
  modified_base 6: mod_base = OTHER; note = 2'-fluoroguanosine-3'-phosphate
  modified_base 7: mod_base = OTHER; note = 2'-O-methyladenosine-3'-phosphate
  modified_base 8: mod_base = OTHER; note = 2'-fluorouridine-3'-phosphate
  modified_base 9: mod_base = OTHER; note = 2'-fluoroguanosine-3'-phosphate
  modified_base 10: mod_base = OTHER; note = 2'-O-methyladenosine-3'-phosphate
  modified_base 11: mod_base = OTHER; note = 2'-O-methylcytidine-3'-phosphate
  modified_base 12: mod_base = OTHER; note = 2'-O-methyluridine-3'-phosphate
  modified_base 13: mod_base = OTHER; note = 2'-O-methyluridine-3'-phosphate
  modified_base 14: mod_base = OTHER; note = 2'-fluorouridine-3'-phosphate
  modified_base 15: mod_base = OTHER; note = 2'-O-methylcytidine-3'-phosphate
  modified_base 16: mod_base = OTHER; note = 2'-fluoroadenosine-3'-phosphate
  modified_base 17: mod_base = OTHER; note = 2'-O-methylcytidine-3'-phosphate
  modified_base 18: mod_base = OTHER; note = 2'-O-methyladenosine-3'-phosphate
  modified_base 19: mod_base = OTHER; note = 2'-O-methyluridine-3'-phosphate
  modified_base 20: mod_base = OTHER; note = 2'-O-methyluridine-3'-phosphate
  modified_base 21: mod_base = OTHER; note = 2'-O-methylcytidine-3'- phosphorothioate
  modified_base 22: mod_base = OTHER; note = 2'-O-methyluridine-3'-phosphorothioate
  modified_base 23: mod_base = OTHER; note = 2'-O-methylguanosine-3'-phosphate
ttgtcgatgactttcacattctg

SEQ ID NO: 294 - RNA, 23 nt, synthetic construct
  misc_feature 1..23: note = Description of Artificial Sequence: Synthetic oligonucleotide
  source 1..23: mol_type = other RNA
  modified_base 1: mod_base = OTHER; note = 2'-O-methyluridine-3'-phosphorothioate
  modified_base 2: mod_base = OTHER; note = 2'-fluorouridine -3'-phosphorothioate
  modified_base 3: mod_base = OTHER; note = 2'-O-methylguanosine-3'-phosphate
  modified_base 4: mod_base = OTHER; note = 2'-O-methyluridine-3'-phosphate
  modified_base 5: mod_base = OTHER; note = 2'-O-methylcytidine-3'-phosphate
  modified_base 6: mod_base = OTHER; note = 2'-fluoroguanosine-3'-phosphate
  modified_base 7: mod_base = OTHER; note = 2'-O-methyladenosine-3'-phosphate
  modified_base 8: mod_base = OTHER; note = 2'-fluorouridine-3'-phosphate
  modified_base 9: mod_base = OTHER; note = 2'-O-methylguanosine-3'-phosphate
  modified_base 10: mod_base = OTHER; note = 2'-fluoroadenosine-3'-phosphate
  modified_base 11: mod_base = OTHER; note = 2'-O-methylcytidine-3'-phosphate
  modified_base 12: mod_base = OTHER; note = 2'-O-methyluridine-3'-phosphate
  modified_base 13: mod_base = OTHER; note = 2'-O-methyluridine-3'-phosphate
  modified_base 14: mod_base = OTHER; note = 2'-fluorouridine-3'-phosphate
  modified_base 15: mod_base = OTHER; note = 2'-O-methylcytidine-3'-phosphate
  modified_base 16: mod_base = OTHER; note = 2'-fluoroadenosine-3'-phosphate
  modified_base 17: mod_base = OTHER; note = 2'-O-methylcytidine-3'-phosphate
  modified_base 18: mod_base = OTHER; note = 2'-O-methyladenosine-3'-phosphate
  modified_base 19: mod_base = OTHER; note = 2'-O-methyluridine-3'-phosphate
  modified_base 20: mod_base = OTHER; note = 2'-O-methyluridine-3'-phosphate
  modified_base 21: mod_base = OTHER; note = 2'-O-methylcytidine-3'- phosphorothioate
  modified_base 22: mod_base = OTHER; note = 2'-O-methyluridine-3'-phosphorothioate
  modified_base 23: mod_base = OTHER; note = 2'-O-methylguanosine-3'-phosphate
ttgtcgatgactttcacattctg

SEQ ID NO: 295 - RNA, 23 nt, synthetic construct
  misc_feature 1..23: note = Description of Artificial Sequence: Synthetic oligonucleotide
  source 1..23: mol_type = other RNA
  modified_base 1: mod_base = OTHER; note = 2'-O-methyluridine-3'-phosphorothioate
  modified_base 2: mod_base = OTHER; note = 2'-fluorouridine -3'-phosphorothioate
  modified_base 3: mod_base = OTHER; note = 2'-O-methylguanosine-3'-phosphate
  modified_base 4: mod_base = OTHER; note = 2'-O-methyluridine-3'-phosphate
  modified_base 5: mod_base = OTHER; note = 2'-O-methylcytidine-3'-phosphate
  modified_base 6: mod_base = OTHER; note = 2'-fluoroguanosine-3'-phosphate
  modified_base 7: mod_base = OTHER; note = 2'-O-methyladenosine-3'-phosphate
  modified_base 8: mod_base = OTHER; note = 2'-fluorouridine-3'-phosphate
  modified_base 9: mod_base = OTHER; note = 2'-fluoroguanosine-3'-phosphate
  modified_base 10: mod_base = OTHER; note = 2'-O-methyladenosine-3'-phosphate
  modified_base 11: mod_base = OTHER; note = 2'-O-methylcytidine-3'-phosphate
  modified_base 12: mod_base = OTHER; note = 2'-O-methyluridine-3'-phosphate
  modified_base 13: mod_base = OTHER; note = 2'-O-methyluridine-3'-phosphate
  modified_base 14: mod_base = OTHER; note = 2'-fluorouridine-3'-phosphate
  modified_base 15: mod_base = OTHER; note = 2'-O-methylcytidine-3'-phosphate
  modified_base 16: mod_base = OTHER; note = 2'-fluoroadenosine-3'-phosphate
  modified_base 17: mod_base = OTHER; note = 2'-O-methylcytidine-3'-phosphate
  modified_base 18: mod_base = OTHER; note = 2'-O-methyladenosine-3'-phosphate
  modified_base 19: mod_base = OTHER; note = 2'-O-methyluridine-3'-phosphate
  modified_base 20: mod_base = OTHER; note = 2'-O-methyluridine-3'-phosphate
  modified_base 21: mod_base = OTHER; note = 2'-O-methylcytidine-3'- phosphorothioate
  modified_base 22: mod_base = OTHER; note = 2'-O-methyluridine-3'-phosphorothioate
  modified_base 23: mod_base = OTHER; note = 2'-O-methylguanosine-3'-phosphate
ttgtcgatgactttcacattctg

SEQ ID NO: 296 - RNA, 23 nt, synthetic construct
  misc_feature 1..23: note = Description of Artificial Sequence: Synthetic oligonucleotide
  source 1..23: mol_type = other RNA
  modified_base 1: mod_base = OTHER; note = 2'-O-methyluridine-3'-phosphorothioate
  modified_base 2: mod_base = OTHER; note = 2'-fluorouridine -3'-phosphorothioate
  modified_base 3: mod_base = OTHER; note = 2'-O-methylguanosine-3'-phosphate
  modified_base 4: mod_base = OTHER; note = 2'-O-methyluridine-3'-phosphate
  modified_base 5: mod_base = OTHER; note = 2'-O-methylcytidine-3'-phosphate
  modified_base 6: mod_base = OTHER; note = 2'-fluoroguanosine-3'-phosphate
  modified_base 7: mod_base = OTHER; note = 2'-O-methyladenosine-3'-phosphate
  modified_base 8: mod_base = OTHER; note = 2'-O-methyluridine-3'-phosphate
  modified_base 9: mod_base = OTHER; note = 2'-O-methylguanosine-3'-phosphate
  modified_base 10: mod_base = OTHER; note = 2'-O-methyladenosine-3'-phosphate
  modified_base 11: mod_base = OTHER; note = 2'-O-methylcytidine-3'-phosphate
  modified_base 12: mod_base = OTHER; note = 2'-O-methyluridine-3'-phosphate
  modified_base 13: mod_base = OTHER; note = 2'-O-methyluridine-3'-phosphate
  modified_base 14: mod_base = OTHER; note = 2'-fluorouridine-3'-phosphate
  modified_base 15: mod_base = OTHER; note = 2'-O-methylcytidine-3'-phosphate
  modified_base 16: mod_base = OTHER; note = 2'-fluoroadenosine-3'-phosphate
  modified_base 17: mod_base = OTHER; note = 2'-O-methylcytidine-3'-phosphate
  modified_base 18: mod_base = OTHER; note = 2'-O-methyladenosine-3'-phosphate
  modified_base 19: mod_base = OTHER; note = 2'-O-methyluridine-3'-phosphate
  modified_base 20: mod_base = OTHER; note = 2'-O-methyluridine-3'-phosphate
  modified_base 21: mod_base = OTHER; note = 2'-O-methylcytidine-3'- phosphorothioate
  modified_base 22: mod_base = OTHER; note = 2'-O-methyluridine-3'-phosphorothioate
  modified_base 23: mod_base = OTHER; note = 2'-O-methylguanosine-3'-phosphate
ttgtcgatgactttcacattctg

SEQ ID NO: 297 - RNA, 23 nt, synthetic construct
  misc_feature 1..23: note = Description of Artificial Sequence: Synthetic oligonucleotide
  source 1..23: mol_type = other RNA
  modified_base 1: mod_base = OTHER; note = 2'-O-methyluridine-3'-phosphorothioate
  modified_base 2: mod_base = OTHER; note = 2'-fluorouridine -3'-phosphorothioate
  modified_base 3: mod_base = OTHER; note = 2'-O-methylguanosine-3'-phosphate
  modified_base 4: mod_base = OTHER; note = 2'-fluorouridine-3'-phosphate
  modified_base 5: mod_base = OTHER; note = 2'-O-methylcytidine-3'-phosphate
  modified_base 6: mod_base = OTHER; note = 2'-fluoroguanosine-3'-phosphate
  modified_base 7: mod_base = OTHER; note = 2'-O-methyladenosine-3'-phosphate
  modified_base 8: mod_base = OTHER; note = 2'-fluorouridine-3'-phosphate
  modified_base 9: mod_base = OTHER; note = 2'-O-methylguanosine-3'-phosphate
  modified_base 10: mod_base = OTHER; note = 2'-fluoroadenosine-3'-phosphate
  modified_base 11: mod_base = OTHER; note = 2'-O-methylcytidine-3'-phosphate
  modified_base 12: mod_base = OTHER; note = 2'-O-methyluridine-3'-phosphate
  modified_base 13: mod_base = OTHER; note = 2'-O-methyluridine-3'-phosphate
  modified_base 14: mod_base = OTHER; note = 2'-fluorouridine-3'-phosphate
  modified_base 15: mod_base = OTHER; note = 2'-O-methylcytidine-3'-phosphate
  modified_base 16: mod_base = OTHER; note = 2'-fluoroadenosine-3'-phosphate
  modified_base 17: mod_base = OTHER; note = 2'-O-methylcytidine-3'-phosphate
  modified_base 18: mod_base = OTHER; note = 2'-fluoroadenosine-3'-phosphate
  modified_base 19: mod_base = OTHER; note = 2'-O-methyluridine-3'-phosphate
  modified_base 20: mod_base = OTHER; note = 2'-fluorouridine-3'-phosphate
  modified_base 21: mod_base = OTHER; note = 2'-O-methylcytidine-3'- phosphorothioate
  modified_base 22: mod_base = OTHER; note = 2'-O-methyluridine-3'-phosphorothioate
  modified_base 23: mod_base = OTHER; note = 2'-O-methylguanosine-3'-phosphate
ttgtcgatgactttcacattctg

SEQ ID NO: 298 - RNA, 23 nt, synthetic construct
  misc_feature 1..23: note = Description of Artificial Sequence: Synthetic oligonucleotide
  source 1..23: mol_type = other RNA
  modified_base 1: mod_base = OTHER; note = 2'-O-methyluridine-3'-phosphorothioate
  modified_base 2: mod_base = OTHER; note = 2'-fluorouridine -3'-phosphorothioate
  modified_base 3: mod_base = OTHER; note = 2'-O-methylguanosine-3'-phosphate
  modified_base 4: mod_base = OTHER; note = 2'-fluorouridine-3'-phosphate
  modified_base 5: mod_base = OTHER; note = 2'-O-methylcytidine-3'-phosphate
  modified_base 6: mod_base = OTHER; note = 2'-fluoroguanosine-3'-phosphate
  modified_base 7: mod_base = OTHER; note = 2'-O-methyladenosine-3'-phosphate
  modified_base 8: mod_base = OTHER; note = 2'-fluorouridine-3'-phosphate
  modified_base 9: mod_base = OTHER; note = 2'-O-methylguanosine-3'-phosphate
  modified_base 10: mod_base = OTHER; note = 2'-fluoroadenosine-3'-phosphate
  modified_base 11: mod_base = OTHER; note = 2'-O-methylcytidine-3'-phosphate
  modified_base 12: mod_base = OTHER; note = 2'-O-methyluridine-3'-phosphate
  modified_base 13: mod_base = OTHER; note = 2'-O-methyluridine-3'-phosphate
  modified_base 14: mod_base = OTHER; note = 2'-fluorouridine-3'-phosphate
  modified_base 15: mod_base = OTHER; note = 2'-O-methylcytidine-3'-phosphate
  modified_base 16: mod_base = OTHER; note = 2'-fluoroadenosine-3'-phosphate
  modified_base 17: mod_base = OTHER; note = 2'-O-methylcytidine-3'-phosphate
  modified_base 18: mod_base = OTHER; note = 2'-fluoroadenosine-3'-phosphate
  modified_base 19: mod_base = OTHER; note = 2'-O-methyluridine-3'-phosphate
  modified_base 20: mod_base = OTHER; note = 2'-fluorouridine-3'-phosphate
  modified_base 21: mod_base = OTHER; note = 2'-O-methylcytidine-3'- phosphorothioate
  modified_base 22: mod_base = OTHER; note = 2'-O-methyluridine-3'-phosphorothioate
  modified_base 23: mod_base = OTHER; note = 2'-O-methylguanosine-3'-phosphate
ttgtcgatgactttcacattctg

SEQ ID NO: 299 - RNA, 23 nt, synthetic construct
  misc_feature 1..23: note = Description of Artificial Sequence: Synthetic oligonucleotide
  source 1..23: mol_type = other RNA
  modified_base 1: mod_base = OTHER; note = 2'-O-methyluridine-3'-phosphorothioate
  modified_base 2: mod_base = OTHER; note = 2'-fluorouridine -3'-phosphorothioate
  modified_base 3: mod_base = OTHER; note = 2'-O-methylguanosine-3'-phosphate
  modified_base 4: mod_base = OTHER; note = 2'-fluorouridine-3'-phosphate
  modified_base 5: mod_base = OTHER; note = 2'-O-methylcytidine-3'-phosphate
  modified_base 6: mod_base = OTHER; note = 2'-fluoroguanosine-3'-phosphate
  modified_base 7: mod_base = OTHER; note = 2'-O-methyladenosine-3'-phosphate
  modified_base 8: mod_base = OTHER; note = 2'-fluorouridine-3'-phosphate
  modified_base 9: mod_base = OTHER; note = 2'-O-methylguanosine-3'-phosphate
  modified_base 10: mod_base = OTHER; note = 2'-fluoroadenosine-3'-phosphate
  modified_base 11: mod_base = OTHER; note = 2'-O-methylcytidine-3'-phosphate
  modified_base 12: mod_base = OTHER; note = 2'-O-methyluridine-3'-phosphate
  modified_base 13: mod_base = OTHER; note = 2'-O-methyluridine-3'-phosphate
  modified_base 14: mod_base = OTHER; note = 2'-fluorouridine-3'-phosphate
  modified_base 15: mod_base = OTHER; note = 2'-O-methylcytidine-3'-phosphate
  modified_base 16: mod_base = OTHER; note = 2'-fluoroadenosine-3'-phosphate
  modified_base 17: mod_base = OTHER; note = 2'-O-methylcytidine-3'-phosphate
  modified_base 18: mod_base = OTHER; note = 2'-fluoroadenosine-3'-phosphate
  modified_base 19: mod_base = OTHER; note = 2'-O-methyluridine-3'-phosphate
  modified_base 20: mod_base = OTHER; note = 2'-fluorouridine-3'-phosphate
  modified_base 21: mod_base = OTHER; note = 2'-O-methylcytidine-3'- phosphorothioate
  modified_base 22: mod_base = OTHER; note = 2'-O-methyluridine-3'-phosphorothioate
  modified_base 23: mod_base = OTHER; note = 2'-O-methylguanosine-3'-phosphate
ttgtcgatgactttcacattctg

SEQ ID NO: 300 - RNA, 23 nt, synthetic construct
  misc_feature 1..23: note = Description of Artificial Sequence: Synthetic oligonucleotide
  source 1..23: mol_type = other RNA
  modified_base 1: mod_base = OTHER; note = 2'-O-methyluridine-3'-phosphorothioate
  modified_base 2: mod_base = OTHER; note = 2'-fluorouridine -3'-phosphorothioate
  modified_base 3: mod_base = OTHER; note = 2'-O-methylguanosine-3'-phosphate
  modified_base 4: mod_base = OTHER; note = 2'-fluorouridine-3'-phosphate
  modified_base 5: mod_base = OTHER; note = 2'-O-methylcytidine-3'-phosphate
  modified_base 6: mod_base = OTHER; note = 2'-fluoroguanosine-3'-phosphate
  modified_base 7: mod_base = OTHER; note = 2'-O-methyladenosine-3'-phosphate
  modified_base 8: mod_base = OTHER; note = 2'-fluorouridine-3'-phosphate
  modified_base 9: mod_base = OTHER; note = 2'-O-methylguanosine-3'-phosphate
  modified_base 10: mod_base = OTHER; note = 2'-fluoroadenosine-3'-phosphate
  modified_base 11: mod_base = OTHER; note = 2'-O-methylcytidine-3'-phosphate
  modified_base 12: mod_base = OTHER; note = 2'-O-methyluridine-3'-phosphate
  modified_base 13: mod_base = OTHER; note = 2'-O-methyluridine-3'-phosphate
  modified_base 14: mod_base = OTHER; note = 2'-fluorouridine-3'-phosphate
  modified_base 15: mod_base = OTHER; note = 2'-O-methylcytidine-3'-phosphate
  modified_base 16: mod_base = OTHER; note = 2'-fluoroadenosine-3'-phosphate
  modified_base 17: mod_base = OTHER; note = 2'-O-methylcytidine-3'-phosphate
  modified_base 18: mod_base = OTHER; note = 2'-fluoroadenosine-3'-phosphate
  modified_base 19: mod_base = OTHER; note = 2'-O-methyluridine-3'-phosphate
  modified_base 20: mod_base = OTHER; note = 2'-fluorouridine-3'-phosphate
  modified_base 21: mod_base = OTHER; note = 2'-O-methylcytidine-3'- phosphorothioate
  modified_base 22: mod_base = OTHER; note = 2'-O-methyluridine-3'-phosphorothioate
  modified_base 23: mod_base = OTHER; note = 2'-O-methylguanosine-3'-phosphate
ttgtcgatgactttcacattctg

SEQ ID NO: 301 - RNA, 23 nt, synthetic construct
  misc_feature 1..23: note = Description of Artificial Sequence: Synthetic oligonucleotide
  source 1..23: mol_type = other RNA
  modified_base 1: mod_base = OTHER; note = 2'-O-methyluridine-3'-phosphorothioate
  modified_base 2: mod_base = OTHER; note = 2'-fluorouridine -3'-phosphorothioate
  modified_base 3: mod_base = OTHER; note = 2'-O-methylguanosine-3'-phosphate
  modified_base 4: mod_base = OTHER; note = 2'-fluorouridine-3'-phosphate
  modified_base 5: mod_base = OTHER; note = 2'-O-methylcytidine-3'-phosphate
  modified_base 6: mod_base = OTHER; note = 2'-fluoroguanosine-3'-phosphate
  modified_base 7: mod_base = OTHER; note = 2'-O-methyladenosine-3'-phosphate
  modified_base 8: mod_base = OTHER; note = 2'-fluorouridine-3'-phosphate
  modified_base 9: mod_base = OTHER; note = 2'-O-methylguanosine-3'-phosphate
  modified_base 10: mod_base = OTHER; note = 2'-fluoroadenosine-3'-phosphate
  modified_base 11: mod_base = OTHER; note = 2'-O-methylcytidine-3'-phosphate
  modified_base 12: mod_base = OTHER; note = 2'-O-methyluridine-3'-phosphate
  modified_base 13: mod_base = OTHER; note = 2'-O-methyluridine-3'-phosphate
  modified_base 14: mod_base = OTHER; note = 2'-fluorouridine-3'-phosphate
  modified_base 15: mod_base = OTHER; note = 2'-O-methylcytidine-3'-phosphate
  modified_base 16: mod_base = OTHER; note = 2'-fluoroadenosine-3'-phosphate
  modified_base 17: mod_base = OTHER; note = 2'-O-methylcytidine-3'-phosphate
  modified_base 18: mod_base = OTHER; note = 2'-fluoroadenosine-3'-phosphate
  modified_base 19: mod_base = OTHER; note = 2'-O-methyluridine-3'-phosphate
  modified_base 20: mod_base = OTHER; note = 2'-fluorouridine-3'-phosphate
  modified_base 21: mod_base = OTHER; note = 2'-O-methylcytidine-3'- phosphorothioate
  modified_base 22: mod_base = OTHER; note = 2'-O-methyluridine-3'-phosphorothioate
  modified_base 23: mod_base = OTHER; note = 2'-O-methylguanosine-3'-phosphate
ttgtcgatgactttcacattctg

SEQ ID NO: 302 - RNA, 23 nt, synthetic construct
  misc_feature 1..23: note = Description of Artificial Sequence: Synthetic oligonucleotide
  source 1..23: mol_type = other RNA
  modified_base 1: mod_base = OTHER; note = 2'-O-methyluridine-3'-phosphorothioate
  modified_base 2: mod_base = OTHER; note = 2'-fluorouridine -3'-phosphorothioate
  modified_base 3: mod_base = OTHER; note = 2'-O-methylguanosine-3'-phosphate
  modified_base 4: mod_base = OTHER; note = 2'-fluorouridine-3'-phosphate
  modified_base 5: mod_base = OTHER; note = 2'-O-methylcytidine-3'-phosphate
  modified_base 6: mod_base = OTHER; note = 2'-fluoroguanosine-3'-phosphate
  modified_base 7: mod_base = OTHER; note = 2'-O-methyladenosine-3'-phosphate
  modified_base 8: mod_base = OTHER; note = 2'-fluorouridine-3'-phosphate
  modified_base 9: mod_base = OTHER; note = 2'-O-methylguanosine-3'-phosphate
  modified_base 10: mod_base = OTHER; note = 2'-fluoroadenosine-3'-phosphate
  modified_base 11: mod_base = OTHER; note = 2'-O-methylcytidine-3'-phosphate
  modified_base 12: mod_base = OTHER; note = 2'-O-methyluridine-3'-phosphate
  modified_base 13: mod_base = OTHER; note = 2'-O-methyluridine-3'-phosphate
  modified_base 14: mod_base = OTHER; note = 2'-fluorouridine-3'-phosphate
  modified_base 15: mod_base = OTHER; note = 2'-O-methylcytidine-3'-phosphate
  modified_base 16: mod_base = OTHER; note = 2'-fluoroadenosine-3'-phosphate
  modified_base 17: mod_base = OTHER; note = 2'-O-methylcytidine-3'-phosphate
  modified_base 18: mod_base = OTHER; note = 2'-fluoroadenosine-3'-phosphate
  modified_base 19: mod_base = OTHER; note = 2'-O-methyluridine-3'-phosphate
  modified_base 20: mod_base = OTHER; note = 2'-fluorouridine-3'-phosphate
  modified_base 21: mod_base = OTHER; note = 2'-O-methylcytidine-3'- phosphorothioate
  modified_base 22: mod_base = OTHER; note = 2'-O-methyluridine-3'-phosphorothioate
  modified_base 23: mod_base = OTHER; note = 2'-O-methylguanosine-3'-phosphate
ttgtcgatgactttcacattctg

SEQ ID NO: 303 - RNA, 23 nt, synthetic construct
  misc_feature 1..23: note = Description of Artificial Sequence: Synthetic oligonucleotide
  source 1..23: mol_type = other RNA
  modified_base 1: mod_base = OTHER; note = 2'-O-methyluridine-3'-phosphorothioate
  modified_base 2: mod_base = OTHER; note = 2'-fluorouridine -3'-phosphorothioate
  modified_base 3: mod_base = OTHER; note = 2'-O-methylguanosine-3'-phosphate
  modified_base 4: mod_base = OTHER; note = 2'-fluorouridine-3'-phosphate
  modified_base 5: mod_base = OTHER; note = 2'-O-methylcytidine-3'-phosphate
  modified_base 6: mod_base = OTHER; note = 2'-fluoroguanosine-3'-phosphate
  modified_base 7: mod_base = OTHER; note = 2'-O-methyladenosine-3'-phosphate
  modified_base 8: mod_base = OTHER; note = 2'-fluorouridine-3'-phosphate
  modified_base 9: mod_base = OTHER; note = 2'-O-methylguanosine-3'-phosphate
  modified_base 10: mod_base = OTHER; note = 2'-fluoroadenosine-3'-phosphate
  modified_base 11: mod_base = OTHER; note = 2'-O-methylcytidine-3'-phosphate
  modified_base 12: mod_base = OTHER; note = 2'-O-methyluridine-3'-phosphate
  modified_base 13: mod_base = OTHER; note = 2'-O-methyluridine-3'-phosphate
  modified_base 14: mod_base = OTHER; note = 2'-fluorouridine-3'-phosphate
  modified_base 15: mod_base = OTHER; note = 2'-O-methylcytidine-3'-phosphate
  modified_base 16: mod_base = OTHER; note = 2'-fluoroadenosine-3'-phosphate
  modified_base 17: mod_base = OTHER; note = 2'-O-methylcytidine-3'-phosphate
  modified_base 18: mod_base = OTHER; note = 2'-fluoroadenosine-3'-phosphate
  modified_base 19: mod_base = OTHER; note = 2'-O-methyluridine-3'-phosphate
  modified_base 20: mod_base = OTHER; note = 2'-fluorouridine-3'-phosphate
  modified_base 21: mod_base = OTHER; note = 2'-O-methylcytidine-3'- phosphorothioate
  modified_base 22: mod_base = OTHER; note = 2'-O-methyluridine-3'-phosphorothioate
  modified_base 23: mod_base = OTHER; note = 2'-O-methylguanosine-3'-phosphate
ttgtcgatgactttcacattctg

SEQ ID NO: 304 - RNA, 23 nt, synthetic construct
  misc_feature 1..23: note = Description of Artificial Sequence: Synthetic oligonucleotide
  source 1..23: mol_type = other RNA
  modified_base 1: mod_base = OTHER; note = 2'-O-methyluridine-3'-phosphorothioate
  modified_base 2: mod_base = OTHER; note = 2'-fluorouridine -3'-phosphorothioate
  modified_base 3: mod_base = OTHER; note = 2'-O-methylguanosine-3'-phosphate
  modified_base 4: mod_base = OTHER; note = 2'-fluorouridine-3'-phosphate
  modified_base 5: mod_base = OTHER; note = 2'-O-methylcytidine-3'-phosphate
  modified_base 6: mod_base = OTHER; note = 2'-fluoroguanosine-3'-phosphate
  modified_base 7: mod_base = OTHER; note = 2'-O-methyladenosine-3'-phosphate
  modified_base 8: mod_base = OTHER; note = 2'-fluorouridine-3'-phosphate
  modified_base 9: mod_base = OTHER; note = 2'-O-methylguanosine-3'-phosphate
  modified_base 10: mod_base = OTHER; note = 2'-fluoroadenosine-3'-phosphate
  modified_base 11: mod_base = OTHER; note = 2'-O-methylcytidine-3'-phosphate
  modified_base 12: mod_base = OTHER; note = 2'-O-methyluridine-3'-phosphate
  modified_base 13: mod_base = OTHER; note = 2'-O-methyluridine-3'-phosphate
  modified_base 14: mod_base = OTHER; note = 2'-fluorouridine-3'-phosphate
  modified_base 15: mod_base = OTHER; note = 2'-O-methylcytidine-3'-phosphate
  modified_base 16: mod_base = OTHER; note = 2'-fluoroadenosine-3'-phosphate
  modified_base 17: mod_base = OTHER; note = 2'-O-methylcytidine-3'-phosphate
  modified_base 18: mod_base = OTHER; note = 2'-fluoroadenosine-3'-phosphate
  modified_base 19: mod_base = OTHER; note = 2'-O-methyluridine-3'-phosphate
  modified_base 20: mod_base = OTHER; note = 2'-fluorouridine-3'-phosphate
  modified_base 21: mod_base = OTHER; note = 2'-O-methylcytidine-3'- phosphorothioate
  modified_base 22: mod_base = OTHER; note = 2'-O-methyluridine-3'-phosphorothioate
  modified_base 23: mod_base = OTHER; note = 2'-O-methylguanosine-3'-phosphate
ttgtcgatgactttcacattctg

SEQ ID NO: 305 - RNA, 23 nt, synthetic construct
  misc_feature 1..23: note = Description of Artificial Sequence: Synthetic oligonucleotide
  source 1..23: mol_type = other RNA
  modified_base 1: mod_base = OTHER; note = 2'-O-methyluridine-3'-phosphorothioate
  modified_base 2: mod_base = OTHER; note = 2'-fluorouridine -3'-phosphorothioate
  modified_base 3: mod_base = OTHER; note = 2'-O-methylguanosine-3'-phosphate
  modified_base 4: mod_base = OTHER; note = 2'-fluorouridine-3'-phosphate
  modified_base 5: mod_base = OTHER; note = 2'-O-methylcytidine-3'-phosphate
  modified_base 6: mod_base = OTHER; note = 2'-fluoroguanosine-3'-phosphate
  modified_base 7: mod_base = OTHER; note = 2'-O-methyladenosine-3'-phosphate
  modified_base 8: mod_base = OTHER; note = 2'-fluorouridine-3'-phosphate
  modified_base 9: mod_base = OTHER; note = 2'-O-methylguanosine-3'-phosphate
  modified_base 10: mod_base = OTHER; note = 2'-fluoroadenosine-3'-phosphate
  modified_base 11: mod_base = OTHER; note = 2'-O-methylcytidine-3'-phosphate
  modified_base 12: mod_base = OTHER; note = 2'-O-methyluridine-3'-phosphate
  modified_base 13: mod_base = OTHER; note = 2'-O-methyluridine-3'-phosphate
  modified_base 14: mod_base = OTHER; note = 2'-fluorouridine-3'-phosphate
  modified_base 15: mod_base = OTHER; note = 2'-O-methylcytidine-3'-phosphate
  modified_base 16: mod_base = OTHER; note = 2'-fluoroadenosine-3'-phosphate
  modified_base 17: mod_base = OTHER; note = 2'-O-methylcytidine-3'-phosphate
  modified_base 18: mod_base = OTHER; note = 2'-fluoroadenosine-3'-phosphate
  modified_base 19: mod_base = OTHER; note = 2'-O-methyluridine-3'-phosphate
  modified_base 20: mod_base = OTHER; note = 2'-fluorouridine-3'-phosphate
  modified_base 21: mod_base = OTHER; note = 2'-O-methylcytidine-3'- phosphorothioate
  modified_base 22: mod_base = OTHER; note = 2'-O-methyluridine-3'-phosphorothioate
  modified_base 23: mod_base = OTHER; note = 2'-O-methylguanosine-3'-phosphate
ttgtcgatgactttcacattctg

SEQ ID NO: 306 - RNA, 23 nt, synthetic construct
  misc_feature 1..23: note = Description of Artificial Sequence: Synthetic oligonucleotide
  source 1..23: mol_type = other RNA
  modified_base 1: mod_base = OTHER; note = 2'-O-methyluridine-3'-phosphorothioate
  modified_base 2: mod_base = OTHER; note = 2'-fluorouridine -3'-phosphorothioate
  modified_base 3: mod_base = OTHER; note = 2'-O-methylguanosine-3'-phosphate
  modified_base 4: mod_base = OTHER; note = 2'-fluorouridine-3'-phosphate
  modified_base 5: mod_base = OTHER; note = 2'-O-methylcytidine-3'-phosphate
  modified_base 6: mod_base = OTHER; note = 2'-fluoroguanosine-3'-phosphate
  modified_base 7: mod_base = OTHER; note = 2'-O-methyladenosine-3'-phosphate
  modified_base 8: mod_base = OTHER; note = 2'-fluorouridine-3'-phosphate
  modified_base 9: mod_base = OTHER; note = 2'-O-methylguanosine-3'-phosphate
  modified_base 10: mod_base = OTHER; note = 2'-fluoroadenosine-3'-phosphate
  modified_base 11: mod_base = OTHER; note = 2'-O-methylcytidine-3'-phosphate
  modified_base 12: mod_base = OTHER; note = 2'-O-methyluridine-3'-phosphate
  modified_base 13: mod_base = OTHER; note = 2'-O-methyluridine-3'-phosphate
  modified_base 14: mod_base = OTHER; note = 2'-fluorouridine-3'-phosphate
  modified_base 15: mod_base = OTHER; note = 2'-O-methylcytidine-3'-phosphate
  modified_base 16: mod_base = OTHER; note = 2'-fluoroadenosine-3'-phosphate
  modified_base 17: mod_base = OTHER; note = 2'-O-methylcytidine-3'-phosphate
  modified_base 18: mod_base = OTHER; note = 2'-fluoroadenosine-3'-phosphate
  modified_base 19: mod_base = OTHER; note = 2'-O-methyluridine-3'-phosphate
  modified_base 20: mod_base = OTHER; note = 2'-fluorouridine-3'-phosphate
  modified_base 21: mod_base = OTHER; note = 2'-O-methylcytidine-3'- phosphorothioate
  modified_base 22: mod_base = OTHER; note = 2'-O-methyluridine-3'-phosphorothioate
  modified_base 23: mod_base = OTHER; note = 2'-O-methylguanosine-3'-phosphate
ttgtcgatgactttcacattctg

SEQ ID NO: 307 - RNA, 23 nt, synthetic construct
  misc_feature 1..23: note = Description of Artificial Sequence: Synthetic oligonucleotide
  source 1..23: mol_type = other RNA
  modified_base 1: mod_base = OTHER; note = 2'-O-methyluridine-3'-phosphorothioate
  modified_base 2: mod_base = OTHER; note = 2'-fluorouridine -3'-phosphorothioate
  modified_base 3: mod_base = OTHER; note = 2'-O-methylguanosine-3'-phosphate
  modified_base 4: mod_base = OTHER; note = 2'-fluorouridine-3'-phosphate
  modified_base 5: mod_base = OTHER; note = 2'-O-methylcytidine-3'-phosphate
  modified_base 6: mod_base = OTHER; note = 2'-fluoroguanosine-3'-phosphate
  modified_base 7: mod_base = OTHER; note = 2'-O-methyladenosine-3'-phosphate
  modified_base 8: mod_base = OTHER; note = 2'-fluorouridine-3'-phosphate
  modified_base 9: mod_base = OTHER; note = 2'-O-methylguanosine-3'-phosphate
  modified_base 10: mod_base = OTHER; note = 2'-fluoroadenosine-3'-phosphate
  modified_base 11: mod_base = OTHER; note = 2'-O-methylcytidine-3'-phosphate
  modified_base 12: mod_base = OTHER; note = 2'-O-methyluridine-3'-phosphate
  modified_base 13: mod_base = OTHER; note = 2'-O-methyluridine-3'-phosphate
  modified_base 14: mod_base = OTHER; note = 2'-fluorouridine-3'-phosphate
  modified_base 15: mod_base = OTHER; note = 2'-O-methylcytidine-3'-phosphate
  modified_base 16: mod_base = OTHER; note = 2'-fluoroadenosine-3'-phosphate
  modified_base 17: mod_base = OTHER; note = 2'-O-methylcytidine-3'-phosphate
  modified_base 18: mod_base = OTHER; note = 2'-fluoroadenosine-3'-phosphate
  modified_base 19: mod_base = OTHER; note = 2'-O-methyluridine-3'-phosphate
  modified_base 20: mod_base = OTHER; note = 2'-fluorouridine-3'-phosphate
  modified_base 21: mod_base = OTHER; note = 2'-O-methylcytidine-3'- phosphorothioate
  modified_base 22: mod_base = OTHER; note = 2'-O-methyluridine-3'-phosphorothioate
  modified_base 23: mod_base = OTHER; note = 2'-O-methylguanosine-3'-phosphate
ttgtcgatgactttcacattctg

SEQ ID NO: 308 - RNA, 23 nt, synthetic construct
  misc_feature 1..23: note = Description of Artificial Sequence: Synthetic oligonucleotide
  source 1..23: mol_type = other RNA
  modified_base 1: mod_base = OTHER; note = 2'-O-methyluridine-3'-phosphorothioate
  modified_base 2: mod_base = OTHER; note = 2'-fluorouridine -3'-phosphorothioate
  modified_base 3: mod_base = OTHER; note = 2'-O-methylguanosine-3'-phosphate
  modified_base 4: mod_base = OTHER; note = 2'-fluorouridine-3'-phosphate
  modified_base 5: mod_base = OTHER; note = 2'-O-methylcytidine-3'-phosphate
  modified_base 6: mod_base = OTHER; note = 2'-fluoroguanosine-3'-phosphate
  modified_base 7: mod_base = OTHER; note = 2'-O-methyladenosine-3'-phosphate
  modified_base 8: mod_base = OTHER; note = 2'-fluorouridine-3'-phosphate
  modified_base 9: mod_base = OTHER; note = 2'-O-methylguanosine-3'-phosphate
  modified_base 10: mod_base = OTHER; note = 2'-fluoroadenosine-3'-phosphate
  modified_base 11: mod_base = OTHER; note = 2'-O-methylcytidine-3'-phosphate
  modified_base 12: mod_base = OTHER; note = 2'-O-methyluridine-3'-phosphate
  modified_base 13: mod_base = OTHER; note = 2'-O-methyluridine-3'-phosphate
  modified_base 14: mod_base = OTHER; note = 2'-fluorouridine-3'-phosphate
  modified_base 15: mod_base = OTHER; note = 2'-O-methylcytidine-3'-phosphate
  modified_base 16: mod_base = OTHER; note = 2'-fluoroadenosine-3'-phosphate
  modified_base 17: mod_base = OTHER; note = 2'-O-methylcytidine-3'-phosphate
  modified_base 18: mod_base = OTHER; note = 2'-fluoroadenosine-3'-phosphate
  modified_base 19: mod_base = OTHER; note = 2'-O-methyluridine-3'-phosphate
  modified_base 20: mod_base = OTHER; note = 2'-fluorouridine-3'-phosphate
  modified_base 21: mod_base = OTHER; note = 2'-O-methylcytidine-3'- phosphorothioate
  modified_base 22: mod_base = OTHER; note = 2'-O-methyluridine-3'-phosphorothioate
  modified_base 23: mod_base = OTHER; note = 2'-O-methylguanosine-3'-phosphate
ttgtcgatgactttcacattctg

SEQ ID NO: 309 - DNA, 23 bp, synthetic construct
  misc_feature 1..23: note = Description of Artificial Sequence: Synthetic oligonucleotide
  source 1..23: mol_type = other DNA
  modified_base 1: mod_base = OTHER; note = 2'-O-methyluridine-3'-phosphorothioate
  modified_base 2: mod_base = OTHER; note = 2'-deoxythymidine-3'-phosphorothioate
  modified_base 3: mod_base = OTHER; note = 2'-O-methylguanosine-3'-phosphate
  modified_base 4: mod_base = OTHER; note = 2'-O-methyluridine-3'-phosphate
  modified_base 5: mod_base = OTHER; note = 2'-O-methylcytidine-3'-phosphate
  modified_base 6: mod_base = OTHER; note = 2'-O-methylguanosine-3'-phosphate
  modified_base 7: mod_base = OTHER; note = 2'-O-methyladenosine-3'-phosphate
  modified_base 8: mod_base = OTHER; note = 2'-O-methyluridine-3'-phosphate
  modified_base 9: mod_base = OTHER; note = 2'-O-methylguanosine-3'-phosphate
  modified_base 11: mod_base = OTHER; note = 2'-O-methylcytidine-3'-phosphate
  modified_base 12: mod_base = OTHER; note = 2'-O-methyluridine-3'-phosphate
  modified_base 13: mod_base = OTHER; note = 2'-O-methyluridine-3'-phosphate
  modified_base 15: mod_base = OTHER; note = 2'-O-methylcytidine-3'-phosphate
  modified_base 16: mod_base = OTHER; note = 2'-O-methyladenosine-3'-phosphate
  modified_base 17: mod_base = OTHER; note = 2'-O-methylcytidine-3'-phosphate
  modified_base 18: mod_base = OTHER; note = 2'-O-methyladenosine-3'-phosphate
  modified_base 19: mod_base = OTHER; note = 2'-O-methyluridine-3'-phosphate
  modified_base 20: mod_base = OTHER; note = 2'-O-methyluridine-3'-phosphate
  modified_base 21: mod_base = OTHER; note = 2'-O-methylcytidine-3'- phosphorothioate
  modified_base 22: mod_base = OTHER; note = 2'-O-methyluridine-3'-phosphorothioate
  modified_base 23: mod_base = OTHER; note = 2'-O-methylguanosine-3'-phosphate
  misc_feature 1: note = RNA
  misc_feature 2: note = DNA
  misc_feature 3..9: note = RNA
  misc_feature 10: note = DNA
  misc_feature 11..13: note = RNA
  misc_feature 14: note = DNA
  misc_feature 15..23: note = RNA
ttgtcgatgactttcacattctg

SEQ ID NO: 310 - DNA, 23 bp, synthetic construct
  misc_feature 1..23: note = Description of Artificial Sequence: Synthetic oligonucleotide
  source 1..23: mol_type = other DNA
  modified_base 1: mod_base = OTHER; note = 2'-O-methyluridine-3'-phosphorothioate
  modified_base 2: mod_base = OTHER; note = uridine -3'-phosphorothioate
  modified_base 3: mod_base = OTHER; note = 2'-O-methylguanosine-3'-phosphate
  modified_base 4: mod_base = OTHER; note = 2'-O-methyluridine-3'-phosphate
  modified_base 5: mod_base = OTHER; note = 2'-O-methylcytidine-3'-phosphate
  modified_base 6: mod_base = OTHER; note = 2'-O-methylguanosine-3'-phosphate
  modified_base 7: mod_base = OTHER; note = 2'-O-methyladenosine-3'-phosphate
  modified_base 8: mod_base = OTHER; note = 2'-O-methyluridine-3'-phosphate
  modified_base 9: mod_base = OTHER; note = 2'-O-methylguanosine-3'-phosphate
  modified_base 10: mod_base = OTHER; note = 2'-O-methyladenosine-3'-phosphate
  modified_base 11: mod_base = OTHER; note = 2'-O-methylcytidine-3'-phosphate
  modified_base 12: mod_base = OTHER; note = 2'-O-methyluridine-3'-phosphate
  modified_base 13: mod_base = OTHER; note = 2'-O-methyluridine-3'-phosphate
  modified_base 15: mod_base = OTHER; note = 2'-O-methylcytidine-3'-phosphate
  modified_base 16: mod_base = OTHER; note = 2'-O-methyladenosine-3'-phosphate
  modified_base 17: mod_base = OTHER; note = 2'-O-methylcytidine-3'-phosphate
  modified_base 18: mod_base = OTHER; note = 2'-O-methyladenosine-3'-phosphate
  modified_base 19: mod_base = OTHER; note = 2'-O-methyluridine-3'-phosphate
  modified_base 20: mod_base = OTHER; note = 2'-O-methyluridine-3'-phosphate
  modified_base 21: mod_base = OTHER; note = 2'-O-methylcytidine-3'- phosphorothioate
  modified_base 22: mod_base = OTHER; note = 2'-O-methyluridine-3'-phosphorothioate
  modified_base 23: mod_base = OTHER; note = 2'-O-methylguanosine-3'-phosphate
  misc_feature 1..13: note = RNA
  misc_feature 14: note = DNA
  misc_feature 15..23: note = RNA
ttgtcgatgactttcacattctg

SEQ ID NO: 311 - DNA, 23 bp, synthetic construct
  misc_feature 1..23: note = Description of Artificial Sequence: Synthetic oligonucleotide
  source 1..23: mol_type = other DNA
  modified_base 1: mod_base = OTHER; note = 2'-O-methyluridine-3'-phosphorothioate
  modified_base 2: mod_base = OTHER; note = 2'-deoxythymidine-3'-phosphorothioate
  modified_base 3: mod_base = OTHER; note = 2'-O-methylguanosine-3'-phosphate
  modified_base 4: mod_base = OTHER; note = 2'-O-methyluridine-3'-phosphate
  modified_base 5: mod_base = OTHER; note = 2'-O-methylcytidine-3'-phosphate
  modified_base 7: mod_base = OTHER; note = 2'-O-methyladenosine-3'-phosphate
  modified_base 8: mod_base = OTHER; note = 2'-O-methyluridine-3'-phosphate
  modified_base 9: mod_base = OTHER; note = 2'-O-methylguanosine-3'-phosphate
  modified_base 10: mod_base = OTHER; note = 2'-O-methyladenosine-3'-phosphate
  modified_base 11: mod_base = OTHER; note = 2'-O-methylcytidine-3'-phosphate
  modified_base 12: mod_base = OTHER; note = 2'-O-methyluridine-3'-phosphate
  modified_base 13: mod_base = OTHER; note = 2'-O-methyluridine-3'-phosphate
  modified_base 15: mod_base = OTHER; note = 2'-O-methylcytidine-3'-phosphate
  modified_base 16: mod_base = OTHER; note = 2'-O-methyladenosine-3'-phosphate
  modified_base 17: mod_base = OTHER; note = 2'-O-methylcytidine-3'-phosphate
  modified_base 18: mod_base = OTHER; note = 2'-O-methyladenosine-3'-phosphate
  modified_base 19: mod_base = OTHER; note = 2'-O-methyluridine-3'-phosphate
  modified_base 20: mod_base = OTHER; note = 2'-O-methyluridine-3'-phosphate
  modified_base 21: mod_base = OTHER; note = 2'-O-methylcytidine-3'- phosphorothioate
  modified_base 22: mod_base = OTHER; note = 2'-O-methyluridine-3'-phosphorothioate
  modified_base 23: mod_base = OTHER; note = 2'-O-methylguanosine-3'-phosphate
  misc_feature 1: note = RNA
  misc_feature 2: note = DNA
  misc_feature 3..5: note = RNA
  misc_feature 6: note = DNA
  misc_feature 7..13: note = RNA
  misc_feature 14: note = DNA
  misc_feature 15..23: note = RNA
ttgtcgatgactttcacattctg

SEQ ID NO: 312 - DNA, 23 bp, synthetic construct
  misc_feature 1..23: note = Description of Artificial Sequence: Synthetic oligonucleotide
  source 1..23: mol_type = other DNA
  modified_base 1: mod_base = OTHER; note = 2'-O-methyluridine-3'-phosphorothioate
  modified_base 2: mod_base = OTHER; note = uridine -3'-phosphorothioate
  modified_base 3: mod_base = OTHER; note = 2'-O-methylguanosine-3'-phosphate
  modified_base 4: mod_base = OTHER; note = 2'-O-methyluridine-3'-phosphate
  modified_base 5: mod_base = OTHER; note = 2'-O-methylcytidine-3'-phosphate
  modified_base 7: mod_base = OTHER; note = 2'-O-methyladenosine-3'-phosphate
  modified_base 8: mod_base = OTHER; note = 2'-O-methyluridine-3'-phosphate
  modified_base 9: mod_base = OTHER; note = 2'-O-methylguanosine-3'-phosphate
  modified_base 10: mod_base = OTHER; note = 2'-O-methyladenosine-3'-phosphate
  modified_base 11: mod_base = OTHER; note = 2'-O-methylcytidine-3'-phosphate
  modified_base 12: mod_base = OTHER; note = 2'-O-methyluridine-3'-phosphate
  modified_base 13: mod_base = OTHER; note = 2'-O-methyluridine-3'-phosphate
  modified_base 15: mod_base = OTHER; note = 2'-O-methylcytidine-3'-phosphate
  modified_base 16: mod_base = OTHER; note = 2'-O-methyladenosine-3'-phosphate
  modified_base 17: mod_base = OTHER; note = 2'-O-methylcytidine-3'-phosphate
  modified_base 18: mod_base = OTHER; note = 2'-O-methyladenosine-3'-phosphate
  modified_base 19: mod_base = OTHER; note = 2'-O-methyluridine-3'-phosphate
  modified_base 20: mod_base = OTHER; note = 2'-O-methyluridine-3'-phosphate
  modified_base 21: mod_base = OTHER; note = 2'-O-methylcytidine-3'- phosphorothioate
  modified_base 22: mod_base = OTHER; note = 2'-O-methyluridine-3'-phosphorothioate
  modified_base 23: mod_base = OTHER; note = 2'-O-methylguanosine-3'-phosphate
  misc_feature 1..5: note = RNA
  misc_feature 6: note = DNA
  misc_feature 7..13: note = RNA
  misc_feature 14: note = DNA
  misc_feature 15..23: note = RNA
ttgtcgatgactttcacattctg

SEQ ID NO: 313 - DNA, 23 bp, synthetic construct
  misc_feature 1..23: note = Description of Artificial Sequence: Synthetic oligonucleotide
  source 1..23: mol_type = other DNA
  modified_base 1: mod_base = OTHER; note = 2'-O-methyluridine-3'-phosphorothioate
  modified_base 2: mod_base = OTHER; note = 2'-deoxythymidine-3'-phosphorothioate
  modified_base 3: mod_base = OTHER; note = 2'-O-methylguanosine-3'-phosphate
  modified_base 4: mod_base = OTHER; note = 2'-O-methyluridine-3'-phosphate
  modified_base 5: mod_base = OTHER; note = 2'-O-methylcytidine-3'-phosphate
  modified_base 6: mod_base = OTHER; note = 2'-O-methylguanosine-3'-phosphate
  modified_base 7: mod_base = OTHER; note = 2'-O-methyladenosine-3'-phosphate
  modified_base 8: mod_base = OTHER; note = 2'-O-methyluridine-3'-phosphate
  modified_base 9: mod_base = OTHER; note = 2'-O-methylguanosine-3'-phosphate
  modified_base 10: mod_base = OTHER; note = 2'-O-methyladenosine-3'-phosphate
  modified_base 11: mod_base = OTHER; note = 2'-O-methylcytidine-3'-phosphate
  modified_base 12: mod_base = OTHER; note = 2'-O-methyluridine-3'-phosphate
  modified_base 13: mod_base = OTHER; note = 2'-O-methyluridine-3'-phosphate
  modified_base 15: mod_base = OTHER; note = 2'-O-methylcytidine-3'-phosphate
  modified_base 17: mod_base = OTHER; note = 2'-O-methylcytidine-3'-phosphate
  modified_base 18: mod_base = OTHER; note = 2'-O-methyladenosine-3'-phosphate
  modified_base 19: mod_base = OTHER; note = 2'-O-methyluridine-3'-phosphate
  modified_base 20: mod_base = OTHER; note = 2'-O-methyluridine-3'-phosphate
  modified_base 21: mod_base = OTHER; note = 2'-O-methylcytidine-3'- phosphorothioate
  modified_base 22: mod_base = OTHER; note = 2'-O-methyluridine-3'-phosphorothioate
  modified_base 23: mod_base = OTHER; note = 2'-O-methylguanosine-3'-phosphate
  misc_feature 1: note = RNA
  misc_feature 2: note = DNA
  misc_feature 3..13: note = RNA
  misc_feature 14: note = DNA
  misc_feature 15: note = RNA
  misc_feature 16: note = DNA
  misc_feature 17..23: note = RNA
ttgtcgatgactttcacattctg

SEQ ID NO: 314 - DNA, 23 bp, synthetic construct
  misc_feature 1..23: note = Description of Artificial Sequence: Synthetic oligonucleotide
  source 1..23: mol_type = other DNA
  modified_base 1: mod_base = OTHER; note = 2'-O-methyluridine-3'-phosphorothioate
  modified_base 2: mod_base = OTHER; note = 2'-deoxythymidine-3'-phosphorothioate
  modified_base 3: mod_base = OTHER; note = 2'-O-methylguanosine-3'-phosphate
  modified_base 4: mod_base = OTHER; note = 2'-O-methyluridine-3'-phosphate
  modified_base 5: mod_base = OTHER; note = 2'-O-methylcytidine-3'-phosphate
  modified_base 7: mod_base = OTHER; note = 2'-O-methyladenosine-3'-phosphate
  modified_base 8: mod_base = OTHER; note = 2'-O-methyluridine-3'-phosphate
  modified_base 9: mod_base = OTHER; note = 2'-O-methylguanosine-3'-phosphate
  modified_base 10: mod_base = OTHER; note = 2'-O-methyladenosine-3'-phosphate
  modified_base 11: mod_base = OTHER; note = 2'-O-methylcytidine-3'-phosphate
  modified_base 12: mod_base = OTHER; note = 2'-O-methyluridine-3'-phosphate
  modified_base 13: mod_base = OTHER; note = 2'-O-methyluridine-3'-phosphate
  modified_base 15: mod_base = OTHER; note = 2'-O-methylcytidine-3'-phosphate
  modified_base 17: mod_base = OTHER; note = 2'-O-methylcytidine-3'-phosphate
  modified_base 18: mod_base = OTHER; note = 2'-O-methyladenosine-3'-phosphate
  modified_base 19: mod_base = OTHER; note = 2'-O-methyluridine-3'-phosphate
  modified_base 20: mod_base = OTHER; note = 2'-O-methyluridine-3'-phosphate
  modified_base 21: mod_base = OTHER; note = 2'-O-methylcytidine-3'- phosphorothioate
  modified_base 22: mod_base = OTHER; note = 2'-O-methyluridine-3'-phosphorothioate
  modified_base 23: mod_base = OTHER; note = 2'-O-methylguanosine-3'-phosphate
  misc_feature 1: note = RNA
  misc_feature 2: note = DNA
  misc_feature 3..5: note = RNA
  misc_feature 6: note = DNA
  misc_feature 7..13: note = RNA
  misc_feature 14: note = DNA
  misc_feature 15: note = RNA
  misc_feature 16: note = DNA
  misc_feature 17..23: note = RNA
ttgtcgatgactttcacattctg

SEQ ID NO: 315 - DNA, 23 bp, synthetic construct
  misc_feature 1..23: note = Description of Artificial Sequence: Synthetic oligonucleotide
  source 1..23: mol_type = other DNA
  modified_base 1: mod_base = OTHER; note = 2'-O-methyluridine-3'-phosphorothioate
  modified_base 2: mod_base = OTHER; note = 2'-deoxythymidine-3'-phosphorothioate
  modified_base 3: mod_base = OTHER; note = 2'-O-methylguanosine-3'-phosphate
  modified_base 4: mod_base = OTHER; note = 2'-O-methyluridine-3'-phosphate
  modified_base 5: mod_base = OTHER; note = 2'-O-methylcytidine-3'-phosphate
  modified_base 6: mod_base = OTHER; note = 2'-O-methylguanosine-3'-phosphate
  modified_base 7: mod_base = OTHER; note = 2'-O-methyladenosine-3'-phosphate
  modified_base 8: mod_base = OTHER; note = 2'-O-methyluridine-3'-phosphate
  modified_base 9: mod_base = OTHER; note = 2'-O-methylguanosine-3'-phosphate
  modified_base 11: mod_base = OTHER; note = 2'-O-methylcytidine-3'-phosphate
  modified_base 12: mod_base = OTHER; note = 2'-O-methyluridine-3'-phosphate
  modified_base 13: mod_base = OTHER; note = 2'-O-methyluridine-3'-phosphate
  modified_base 15: mod_base = OTHER; note = 2'-O-methylcytidine-3'-phosphate
  modified_base 16: mod_base = OTHER; note = 2'-O-methyladenosine-3'-phosphate
  modified_base 17: mod_base = OTHER; note = 2'-O-methylcytidine-3'-phosphate
  modified_base 18: mod_base = OTHER; note = 2'-O-methyladenosine-3'-phosphate
  modified_base 19: mod_base = OTHER; note = 2'-O-methyluridine-3'-phosphate
  modified_base 20: mod_base = OTHER; note = 2'-O-methyluridine-3'-phosphate
  modified_base 21: mod_base = OTHER; note = 2'-O-methylcytidine-3'- phosphorothioate
  modified_base 22: mod_base = OTHER; note = 2'-O-methyluridine-3'-phosphorothioate
  modified_base 23: mod_base = OTHER; note = 2'-O-methylguanosine-3'-phosphate
  misc_feature 1: note = RNA
  misc_feature 2: note = DNA
  misc_feature 3..9: note = RNA
  misc_feature 10: note = DNA
  misc_feature 11..13: note = RNA
  misc_feature 14: note = DNA
  misc_feature 15..23: note = RNA
ttgtcgatgactttcacattctg

SEQ ID NO: 316 - RNA, 23 nt, synthetic construct
  misc_feature 1..23: note = Description of Artificial Sequence: Synthetic oligonucleotide
  source 1..23: mol_type = other RNA
  modified_base 1: mod_base = OTHER; note = 2'-O-methyluridine-3'-phosphorothioate
  modified_base 2: mod_base = OTHER; note = 2'-fluoroadenosine-3'-phosphorothioate
  modified_base 3: mod_base = OTHER; note = 2'-O-methyluridine-3'-phosphate
  modified_base 4: mod_base = OTHER; note = 2'-fluoroadenosine-3'-phosphate
  modified_base 5: mod_base = OTHER; note = 2'-O-methyluridine-3'-phosphate
  modified_base 6: mod_base = OTHER; note = 2'-fluorouridine-3'-phosphate
  modified_base 7: mod_base = OTHER; note = 2'-O-methyluridine-3'-phosphate
  modified_base 8: mod_base = OTHER; note = 2'-fluorocytidine-3'-phosphate
  modified_base 9: mod_base = OTHER; note = 2'-O-methylcytidine-3'-phosphate
  modified_base 10: mod_base = OTHER; note = 2'-fluoroadenosine-3'-phosphate
  modified_base 11: mod_base = OTHER; note = 2'-O-methylguanosine-3'-phosphate
  modified_base 12: mod_base = OTHER; note = 2'-O-methylguanosine-3'-phosphate
  modified_base 13: mod_base = OTHER; note = 2'-O-methyladenosine-3'-phosphate
  modified_base 14: mod_base = OTHER; note = 2'-fluorouridine-3'-phosphate
  modified_base 15: mod_base = OTHER; note = 2'-O-methylguanosine-3'-phosphate
  modified_base 16: mod_base = OTHER; note = 2'-fluoroadenosine-3'-phosphate
  modified_base 17: mod_base = OTHER; note = 2'-O-methyladenosine-3'-phosphate
  modified_base 18: mod_base = OTHER; note = 2'-fluoroadenosine-3'-phosphate
  modified_base 19: mod_base = OTHER; note = 2'-O-methylguanosine-3'-phosphate
  modified_base 20: mod_base = OTHER; note = 2'-fluorouridine-3'-phosphate
  modified_base 21: mod_base = OTHER; note = 2'-O-methylcytidine-3'- phosphorothioate
  modified_base 22: mod_base = OTHER; note = 2'-O-methylcytidine-3'- phosphorothioate
  modified_base 23: mod_base = OTHER; note = 2'-O-methyladenosine-3'-phosphate
tatatttccaggatgaaagtcca

SEQ ID NO: 317 - RNA, 23 nt, synthetic construct
  misc_feature 1..23: note = Description of Artificial Sequence: Synthetic oligonucleotide
  source 1..23: mol_type = other RNA
  modified_base 1: mod_base = OTHER; note = 2'-O-methyluridine-3'-phosphorothioate
  modified_base 2: mod_base = OTHER; note = 2'-fluoroadenosine-3'-phosphorothioate
  modified_base 3: mod_base = OTHER; note = 2'-O-methyluridine-3'-phosphate
  modified_base 4: mod_base = OTHER; note = 2'-fluoroadenosine-3'-phosphate
  modified_base 5: mod_base = OTHER; note = 2'-O-methyluridine-3'-phosphate
  modified_base 6: mod_base = OTHER; note = 2'-fluorouridine-3'-phosphate
  modified_base 7: mod_base = OTHER; note = 2'-O-methyluridine-3'-phosphate
  modified_base 8: mod_base = OTHER; note = 2'-fluorocytidine-3'-phosphate
  modified_base 9: mod_base = OTHER; note = 2'-O-methylcytidine-3'-phosphate
  modified_base 10: mod_base = OTHER; note = 2'-fluoroadenosine-3'-phosphate
  modified_base 11: mod_base = OTHER; note = 2'-O-methylguanosine-3'-phosphate
  modified_base 12: mod_base = OTHER; note = 2'-O-methylguanosine-3'-phosphate
  modified_base 13: mod_base = OTHER; note = 2'-O-methyladenosine-3'-phosphate
  modified_base 14: mod_base = OTHER; note = 2'-fluorouridine-3'-phosphate
  modified_base 15: mod_base = OTHER; note = 2'-O-methylguanosine-3'-phosphate
  modified_base 16: mod_base = OTHER; note = 2'-fluoroadenosine-3'-phosphate
  modified_base 17: mod_base = OTHER; note = 2'-O-methyladenosine-3'-phosphate
  modified_base 18: mod_base = OTHER; note = 2'-fluoroadenosine-3'-phosphate
  modified_base 19: mod_base = OTHER; note = 2'-O-methylguanosine-3'-phosphate
  modified_base 20: mod_base = OTHER; note = 2'-fluorouridine-3'-phosphate
  modified_base 21: mod_base = OTHER; note = 2'-O-methylcytidine-3'- phosphorothioate
  modified_base 22: mod_base = OTHER; note = 2'-O-methylcytidine-3'- phosphorothioate
  modified_base 23: mod_base = OTHER; note = 2'-O-methyladenosine-3'-phosphate
tatatttccaggatgaaagtcca

SEQ ID NO: 318 - RNA, 23 nt, synthetic construct
  misc_feature 1..23: note = Description of Artificial Sequence: Synthetic oligonucleotide
  source 1..23: mol_type = other RNA
  modified_base 1: mod_base = OTHER; note = 2'-O-methyluridine-3'-phosphorothioate
  modified_base 2: mod_base = OTHER; note = 2'-fluoroadenosine-3'-phosphorothioate
  modified_base 3: mod_base = OTHER; note = 2'-O-methyluridine-3'-phosphate
  modified_base 4: mod_base = OTHER; note = 2'-fluoroadenosine-3'-phosphate
  modified_base 5: mod_base = OTHER; note = 2'-O-methyluridine-3'-phosphate
  modified_base 6: mod_base = OTHER; note = 2'-fluorouridine-3'-phosphate
  modified_base 7: mod_base = OTHER; note = 2'-O-methyluridine-3'-phosphate
  modified_base 8: mod_base = OTHER; note = 2'-fluorocytidine-3'-phosphate
  modified_base 9: mod_base = OTHER; note = 2'-O-methylcytidine-3'-phosphate
  modified_base 10: mod_base = OTHER; note = 2'-fluoroadenosine-3'-phosphate
  modified_base 11: mod_base = OTHER; note = 2'-O-methylguanosine-3'-phosphate
  modified_base 12: mod_base = OTHER; note = 2'-O-methylguanosine-3'-phosphate
  modified_base 13: mod_base = OTHER; note = 2'-O-methyladenosine-3'-phosphate
  modified_base 14: mod_base = OTHER; note = 2'-fluorouridine-3'-phosphate
  modified_base 15: mod_base = OTHER; note = 2'-O-methylguanosine-3'-phosphate
  modified_base 16: mod_base = OTHER; note = 2'-fluoroadenosine-3'-phosphate
  modified_base 17: mod_base = OTHER; note = 2'-O-methyladenosine-3'-phosphate
  modified_base 18: mod_base = OTHER; note = 2'-fluoroadenosine-3'-phosphate
  modified_base 19: mod_base = OTHER; note = 2'-O-methylguanosine-3'-phosphate
  modified_base 20: mod_base = OTHER; note = 2'-fluorouridine-3'-phosphate
  modified_base 21: mod_base = OTHER; note = 2'-O-methylcytidine-3'- phosphorothioate
  modified_base 22: mod_base = OTHER; note = 2'-O-methylcytidine-3'- phosphorothioate
  modified_base 23: mod_base = OTHER; note = 2'-O-methyladenosine-3'-phosphate
tatatttccaggatgaaagtcca

SEQ ID NO: 319 - RNA, 23 nt, synthetic construct
  misc_feature 1..23: note = Description of Artificial Sequence: Synthetic oligonucleotide
  source 1..23: mol_type = other RNA
  modified_base 1: mod_base = OTHER; note = 2'-O-methyluridine-3'-phosphorothioate
  modified_base 2: mod_base = OTHER; note = 2'-fluoroadenosine-3'-phosphorothioate
  modified_base 3: mod_base = OTHER; note = 2'-O-methyluridine-3'-phosphate
  modified_base 4: mod_base = OTHER; note = 2'-fluoroadenosine-3'-phosphate
  modified_base 5: mod_base = OTHER; note = 2'-O-methyluridine-3'-phosphate
  modified_base 6: mod_base = OTHER; note = 2'-fluorouridine-3'-phosphate
  modified_base 7: mod_base = OTHER; note = 2'-O-methyluridine-3'-phosphate
  modified_base 8: mod_base = OTHER; note = 2'-fluorocytidine-3'-phosphate
  modified_base 9: mod_base = OTHER; note = 2'-O-methylcytidine-3'-phosphate
  modified_base 10: mod_base = OTHER; note = 2'-fluoroadenosine-3'-phosphate
  modified_base 11: mod_base = OTHER; note = 2'-O-methylguanosine-3'-phosphate
  modified_base 12: mod_base = OTHER; note = 2'-O-methylguanosine-3'-phosphate
  modified_base 13: mod_base = OTHER; note = 2'-O-methyladenosine-3'-phosphate
  modified_base 14: mod_base = OTHER; note = 2'-fluorouridine-3'-phosphate
  modified_base 15: mod_base = OTHER; note = 2'-O-methylguanosine-3'-phosphate
  modified_base 16: mod_base = OTHER; note = 2'-fluoroadenosine-3'-phosphate
  modified_base 17: mod_base = OTHER; note = 2'-O-methyladenosine-3'-phosphate
  modified_base 18: mod_base = OTHER; note = 2'-fluoroadenosine-3'-phosphate
  modified_base 19: mod_base = OTHER; note = 2'-O-methylguanosine-3'-phosphate
  modified_base 20: mod_base = OTHER; note = 2'-fluorouridine-3'-phosphate
  modified_base 21: mod_base = OTHER; note = 2'-O-methylcytidine-3'- phosphorothioate
  modified_base 22: mod_base = OTHER; note = 2'-O-methylcytidine-3'- phosphorothioate
  modified_base 23: mod_base = OTHER; note = 2'-O-methyladenosine-3'-phosphate
tatatttccaggatgaaagtcca

SEQ ID NO: 320 - RNA, 23 nt, synthetic construct
  misc_feature 1..23: note = Description of Artificial Sequence: Synthetic oligonucleotide
  source 1..23: mol_type = other RNA
  modified_base 1: mod_base = OTHER; note = 2'-O-methyluridine-3'-phosphorothioate
  modified_base 2: mod_base = OTHER; note = 2'-fluoroadenosine-3'-phosphorothioate
  modified_base 3: mod_base = OTHER; note = 2'-O-methyluridine-3'-phosphate
  modified_base 4: mod_base = OTHER; note = 2'-fluoroadenosine-3'-phosphate
  modified_base 5: mod_base = OTHER; note = 2'-O-methyluridine-3'-phosphate
  modified_base 6: mod_base = OTHER; note = 2'-fluorouridine-3'-phosphate
  modified_base 7: mod_base = OTHER; note = 2'-O-methyluridine-3'-phosphate
  modified_base 8: mod_base = OTHER; note = 2'-fluorocytidine-3'-phosphate
  modified_base 9: mod_base = OTHER; note = 2'-O-methylcytidine-3'-phosphate
  modified_base 10: mod_base = OTHER; note = 2'-fluoroadenosine-3'-phosphate
  modified_base 11: mod_base = OTHER; note = 2'-O-methylguanosine-3'-phosphate
  modified_base 12: mod_base = OTHER; note = 2'-O-methylguanosine-3'-phosphate
  modified_base 13: mod_base = OTHER; note = 2'-O-methyladenosine-3'-phosphate
  modified_base 14: mod_base = OTHER; note = 2'-fluorouridine-3'-phosphate
  modified_base 15: mod_base = OTHER; note = 2'-O-methylguanosine-3'-phosphate
  modified_base 16: mod_base = OTHER; note = 2'-fluoroadenosine-3'-phosphate
  modified_base 17: mod_base = OTHER; note = 2'-O-methyladenosine-3'-phosphate
  modified_base 18: mod_base = OTHER; note = 2'-fluoroadenosine-3'-phosphate
  modified_base 19: mod_base = OTHER; note = 2'-O-methylguanosine-3'-phosphate
  modified_base 20: mod_base = OTHER; note = 2'-fluorouridine-3'-phosphate
  modified_base 21: mod_base = OTHER; note = 2'-O-methylcytidine-3'- phosphorothioate
  modified_base 22: mod_base = OTHER; note = 2'-O-methylcytidine-3'- phosphorothioate
  modified_base 23: mod_base = OTHER; note = 2'-O-methyladenosine-3'-phosphate
tatatttccaggatgaaagtcca

SEQ ID NO: 321 - RNA, 23 nt, synthetic construct
  misc_feature 1..23: note = Description of Artificial Sequence: Synthetic oligonucleotide
  source 1..23: mol_type = other RNA
  modified_base 1: mod_base = OTHER; note = 2'-O-methyluridine-3'-phosphorothioate
  modified_base 2: mod_base = OTHER; note = 2'-fluoroadenosine-3'-phosphorothioate
  modified_base 3: mod_base = OTHER; note = 2'-O-methyluridine-3'-phosphate
  modified_base 4: mod_base = OTHER; note = 2'-fluoroadenosine-3'-phosphate
  modified_base 5: mod_base = OTHER; note = 2'-O-methyluridine-3'-phosphate
  modified_base 6: mod_base = OTHER; note = 2'-fluorouridine-3'-phosphate
  modified_base 7: mod_base = OTHER; note = 2'-O-methyluridine-3'-phosphate
  modified_base 8: mod_base = OTHER; note = 2'-fluorocytidine-3'-phosphate
  modified_base 9: mod_base = OTHER; note = 2'-O-methylcytidine-3'-phosphate
  modified_base 10: mod_base = OTHER; note = 2'-fluoroadenosine-3'-phosphate
  modified_base 11: mod_base = OTHER; note = 2'-O-methylguanosine-3'-phosphate
  modified_base 12: mod_base = OTHER; note = 2'-O-methylguanosine-3'-phosphate
  modified_base 13: mod_base = OTHER; note = 2'-O-methyladenosine-3'-phosphate
  modified_base 14: mod_base = OTHER; note = 2'-fluorouridine-3'-phosphate
  modified_base 15: mod_base = OTHER; note = 2'-O-methylguanosine-3'-phosphate
  modified_base 16: mod_base = OTHER; note = 2'-fluoroadenosine-3'-phosphate
  modified_base 17: mod_base = OTHER; note = 2'-O-methyladenosine-3'-phosphate
  modified_base 18: mod_base = OTHER; note = 2'-fluoroadenosine-3'-phosphate
  modified_base 19: mod_base = OTHER; note = 2'-O-methylguanosine-3'-phosphate
  modified_base 20: mod_base = OTHER; note = 2'-fluorouridine-3'-phosphate
  modified_base 21: mod_base = OTHER; note = 2'-O-methylcytidine-3'- phosphorothioate
  modified_base 22: mod_base = OTHER; note = 2'-O-methylcytidine-3'- phosphorothioate
  modified_base 23: mod_base = OTHER; note = 2'-O-methyladenosine-3'-phosphate
tatatttccaggatgaaagtcca

SEQ ID NO: 322 - RNA, 21 nt, synthetic construct
  misc_feature 1..21: note = Description of Artificial Sequence: Synthetic oligonucleotide
  source 1..21: mol_type = other RNA
  modified_base 1: mod_base = OTHER; note = 2'-O-methyluridine-3'-phosphorothioate
  modified_base 2: mod_base = OTHER; note = 2'-fluoroadenosine-3'-phosphorothioate
  modified_base 3: mod_base = OTHER; note = 2'-O-methyluridine-3'-phosphate
  modified_base 4: mod_base = OTHER; note = 2'-fluoroadenosine-3'-phosphate
  modified_base 5: mod_base = OTHER; note = 2'-O-methyluridine-3'-phosphate
  modified_base 6: mod_base = OTHER; note = 2'-fluorouridine-3'-phosphate
  modified_base 7: mod_base = OTHER; note = 2'-O-methyluridine-3'-phosphate
  modified_base 8: mod_base = OTHER; note = 2'-fluorocytidine-3'-phosphate
  modified_base 9: mod_base = OTHER; note = 2'-O-methylcytidine-3'-phosphate
  modified_base 10: mod_base = OTHER; note = 2'-fluoroadenosine-3'-phosphate
  modified_base 11: mod_base = OTHER; note = 2'-O-methylguanosine-3'-phosphate
  modified_base 12: mod_base = OTHER; note = 2'-O-methylguanosine-3'-phosphate
  modified_base 13: mod_base = OTHER; note = 2'-O-methyladenosine-3'-phosphate
  modified_base 14: mod_base = OTHER; note = 2'-fluorouridine-3'-phosphate
  modified_base 15: mod_base = OTHER; note = 2'-O-methylguanosine-3'-phosphate
  modified_base 16: mod_base = OTHER; note = 2'-fluoroadenosine-3'-phosphate
  modified_base 17: mod_base = OTHER; note = 2'-O-methyladenosine-3'-phosphate
  modified_base 18: mod_base = OTHER; note = 2'-fluoroadenosine-3'-phosphate
  modified_base 19: mod_base = OTHER; note = 2'-O-methylguanosine-3'- phosphorothioate
  modified_base 20: mod_base = OTHER; note = 2'-O-methyluridine-3'-phosphorothioate
  modified_base 21: mod_base = OTHER; note = 2'-O-methylcytidine-3'-phosphate
tatatttccaggatgaaagtc

SEQ ID NO: 323 - RNA, 21 nt, synthetic construct
  misc_feature 1..21: note = Description of Artificial Sequence: Synthetic oligonucleotide
  source 1..21: mol_type = other RNA
  modified_base 1: mod_base = OTHER; note = 2'-O-methyluridine-3'-phosphorothioate
  modified_base 2: mod_base = OTHER; note = 2'-fluoroadenosine-3'-phosphorothioate
  modified_base 3: mod_base = OTHER; note = 2'-O-methyluridine-3'-phosphate
  modified_base 4: mod_base = OTHER; note = 2'-O-methyladenosine-3'-phosphate
  modified_base 5: mod_base = OTHER; note = 2'-O-methyluridine-3'-phosphate
  modified_base 6: mod_base = OTHER; note = 2'-fluorouridine-3'-phosphate
  modified_base 7: mod_base = OTHER; note = 2'-O-methyluridine-3'-phosphate
  modified_base 8: mod_base = OTHER; note = 2'-O-methylcytidine-3'-phosphate
  modified_base 9: mod_base = OTHER; note = 2'-O-methylcytidine-3'-phosphate
  modified_base 10: mod_base = OTHER; note = 2'-O-methyladenosine-3'-phosphate
  modified_base 11: mod_base = OTHER; note = 2'-O-methylguanosine-3'-phosphate
  modified_base 12: mod_base = OTHER; note = 2'-O-methylguanosine-3'-phosphate
  modified_base 13: mod_base = OTHER; note = 2'-O-methyladenosine-3'-phosphate
  modified_base 14: mod_base = OTHER; note = 2'-fluorouridine-3'-phosphate
  modified_base 15: mod_base = OTHER; note = 2'-O-methylguanosine-3'-phosphate
  modified_base 16: mod_base = OTHER; note = 2'-fluoroadenosine-3'-phosphate
  modified_base 17: mod_base = OTHER; note = 2'-O-methyladenosine-3'-phosphate
  modified_base 18: mod_base = OTHER; note = 2'-O-methyladenosine-3'-phosphate
  modified_base 19: mod_base = OTHER; note = 2'-O-methylguanosine-3'- phosphorothioate
  modified_base 20: mod_base = OTHER; note = 2'-O-methyluridine-3'-phosphorothioate
  modified_base 21: mod_base = OTHER; note = 2'-O-methylcytidine-3'-phosphate
tatatttccaggatgaaagtc

SEQ ID NO: 324 - RNA, 23 nt, synthetic construct
  misc_feature 1..23: note = Description of Artificial Sequence: Synthetic oligonucleotide
  source 1..23: mol_type = other RNA
  modified_base 1: mod_base = OTHER; note = 2'-O-methyluridine-3'-phosphorothioate
  modified_base 2: mod_base = OTHER; note = 2'-fluoroadenosine-3'-phosphorothioate
  modified_base 3: mod_base = OTHER; note = 2'-O-methyluridine-3'-phosphate
  modified_base 4: mod_base = OTHER; note = 2'-O-methyladenosine-3'-phosphate
  modified_base 5: mod_base = OTHER; note = 2'-O-methyluridine-3'-phosphate
  modified_base 6: mod_base = OTHER; note = 2'-fluorouridine-3'-phosphate
  modified_base 7: mod_base = OTHER; note = 2'-O-methyluridine-3'-phosphate
  modified_base 8: mod_base = OTHER; note = 2'-fluorocytidine-3'-phosphate
  modified_base 9: mod_base = OTHER; note = 2'-O-methylcytidine-3'-phosphate
  modified_base 10: mod_base = OTHER; note = 2'-fluoroadenosine-3'-phosphate
  modified_base 11: mod_base = OTHER; note = 2'-O-methylguanosine-3'-phosphate
  modified_base 12: mod_base = OTHER; note = 2'-O-methylguanosine-3'-phosphate
  modified_base 13: mod_base = OTHER; note = 2'-O-methyladenosine-3'-phosphate
  modified_base 14: mod_base = OTHER; note = 2'-fluorouridine-3'-phosphate
  modified_base 15: mod_base = OTHER; note = 2'-O-methylguanosine-3'-phosphate
  modified_base 16: mod_base = OTHER; note = 2'-fluoroadenosine-3'-phosphate
  modified_base 17: mod_base = OTHER; note = 2'-O-methyladenosine-3'-phosphate
  modified_base 18: mod_base = OTHER; note = 2'-O-methyladenosine-3'-phosphate
  modified_base 19: mod_base = OTHER; note = 2'-O-methylguanosine-3'-phosphate
  modified_base 20: mod_base = OTHER; note = 2'-O-methyluridine-3'-phosphate
  modified_base 21: mod_base = OTHER; note = 2'-O-methylcytidine-3'- phosphorothioate
  modified_base 22: mod_base = OTHER; note = 2'-O-methylcytidine-3'- phosphorothioate
  modified_base 23: mod_base = OTHER; note = 2'-O-methyladenosine-3'-phosphate
tatatttccaggatgaaagtcca

SEQ ID NO: 325 - RNA, 23 nt, synthetic construct
  misc_feature 1..23: note = Description of Artificial Sequence: Synthetic oligonucleotide
  source 1..23: mol_type = other RNA
  modified_base 1: mod_base = OTHER; note = 2'-O-methyluridine-3'-phosphorothioate
  modified_base 2: mod_base = OTHER; note = 2'-fluoroadenosine-3'-phosphorothioate
  modified_base 3: mod_base = OTHER; note = 2'-O-methyluridine-3'-phosphate
  modified_base 4: mod_base = OTHER; note = 2'-O-methyladenosine-3'-phosphate
  modified_base 5: mod_base = OTHER; note = 2'-O-methyluridine-3'-phosphate
  modified_base 6: mod_base = OTHER; note = 2'-fluorouridine-3'-phosphate
  modified_base 7: mod_base = OTHER; note = 2'-O-methyluridine-3'-phosphate
  modified_base 8: mod_base = OTHER; note = 2'-fluorocytidine-3'-phosphate
  modified_base 9: mod_base = OTHER; note = 2'-fluorocytidine-3'-phosphate
  modified_base 10: mod_base = OTHER; note = 2'-O-methyladenosine-3'-phosphate
  modified_base 11: mod_base = OTHER; note = 2'-O-methylguanosine-3'-phosphate
  modified_base 12: mod_base = OTHER; note = 2'-O-methylguanosine-3'-phosphate
  modified_base 13: mod_base = OTHER; note = 2'-O-methyladenosine-3'-phosphate
  modified_base 14: mod_base = OTHER; note = 2'-fluorouridine-3'-phosphate
  modified_base 15: mod_base = OTHER; note = 2'-O-methylguanosine-3'-phosphate
  modified_base 16: mod_base = OTHER; note = 2'-fluoroadenosine-3'-phosphate
  modified_base 17: mod_base = OTHER; note = 2'-O-methyladenosine-3'-phosphate
  modified_base 18: mod_base = OTHER; note = 2'-O-methyladenosine-3'-phosphate
  modified_base 19: mod_base = OTHER; note = 2'-O-methylguanosine-3'-phosphate
  modified_base 20: mod_base = OTHER; note = 2'-O-methyluridine-3'-phosphate
  modified_base 21: mod_base = OTHER; note = 2'-O-methylcytidine-3'- phosphorothioate
  modified_base 22: mod_base = OTHER; note = 2'-O-methylcytidine-3'- phosphorothioate
  modified_base 23: mod_base = OTHER; note = 2'-O-methyladenosine-3'-phosphate
tatatttccaggatgaaagtcca

SEQ ID NO: 326 - RNA, 23 nt, synthetic construct
  misc_feature 1..23: note = Description of Artificial Sequence: Synthetic oligonucleotide
  source 1..23: mol_type = other RNA
  modified_base 1: mod_base = OTHER; note = 2'-O-methyluridine-3'-phosphorothioate
  modified_base 2: mod_base = OTHER; note = 2'-fluoroadenosine-3'-phosphorothioate
  modified_base 3: mod_base = OTHER; note = 2'-O-methyluridine-3'-phosphate
  modified_base 4: mod_base = OTHER; note = 2'-O-methyladenosine-3'-phosphate
  modified_base 5: mod_base = OTHER; note = 2'-O-methyluridine-3'-phosphate
  modified_base 6: mod_base = OTHER; note = 2'-fluorouridine-3'-phosphate
  modified_base 7: mod_base = OTHER; note = 2'-O-methyluridine-3'-phosphate
  modified_base 8: mod_base = OTHER; note = 2'-O-methylcytidine-3'-phosphate
  modified_base 9: mod_base = OTHER; note = 2'-O-methylcytidine-3'-phosphate
  modified_base 10: mod_base = OTHER; note = 2'-O-methyladenosine-3'-phosphate
  modified_base 11: mod_base = OTHER; note = 2'-O-methylguanosine-3'-phosphate
  modified_base 12: mod_base = OTHER; note = 2'-O-methylguanosine-3'-phosphate
  modified_base 13: mod_base = OTHER; note = 2'-O-methyladenosine-3'-phosphate
  modified_base 14: mod_base = OTHER; note = 2'-fluorouridine-3'-phosphate
  modified_base 15: mod_base = OTHER; note = 2'-O-methylguanosine-3'-phosphate
  modified_base 16: mod_base = OTHER; note = 2'-fluoroadenosine-3'-phosphate
  modified_base 17: mod_base = OTHER; note = 2'-O-methyladenosine-3'-phosphate
  modified_base 18: mod_base = OTHER; note = 2'-O-methyladenosine-3'-phosphate
  modified_base 19: mod_base = OTHER; note = 2'-O-methylguanosine-3'-phosphate
  modified_base 20: mod_base = OTHER; note = 2'-O-methyluridine-3'-phosphate
  modified_base 21: mod_base = OTHER; note = 2'-O-methylcytidine-3'- phosphorothioate
  modified_base 22: mod_base = OTHER; note = 2'-O-methylcytidine-3'- phosphorothioate
  modified_base 23: mod_base = OTHER; note = 2'-O-methyladenosine-3'-phosphate
tatatttccaggatgaaagtcca

SEQ ID NO: 327 - RNA, 23 nt, synthetic construct
  misc_feature 1..23: note = Description of Artificial Sequence: Synthetic oligonucleotide
  source 1..23: mol_type = other RNA
  modified_base 1: mod_base = OTHER; note = 2'-O-methyluridine-3'-phosphorothioate
  modified_base 2: mod_base = OTHER; note = 2'-fluoroadenosine-3'-phosphorothioate
  modified_base 3: mod_base = OTHER; note = 2'-O-methyluridine-3'-phosphate
  modified_base 4: mod_base = OTHER; note = 2'-O-methyladenosine-3'-phosphate
  modified_base 5: mod_base = OTHER; note = 2'-O-methyluridine-3'-phosphate
  modified_base 6: mod_base = OTHER; note = 2'-fluorouridine-3'-phosphate
  modified_base 7: mod_base = OTHER; note = 2'-O-methyluridine-3'-phosphate
  modified_base 8: mod_base = OTHER; note = 2'-O-methylcytidine-3'-phosphate
  modified_base 9: mod_base = OTHER; note = 2'-O-methylcytidine-3'-phosphate
  modified_base 10: mod_base = OTHER; note = 2'-O-methyladenosine-3'-phosphate
  modified_base 11: mod_base = OTHER; note = 2'-O-methylguanosine-3'-phosphate
  modified_base 12: mod_base = OTHER; note = 2'-O-methylguanosine-3'-phosphate
  modified_base 13: mod_base = OTHER; note = 2'-O-methyladenosine-3'-phosphate
  modified_base 14: mod_base = OTHER; note = 2'-fluorouridine-3'-phosphate
  modified_base 15: mod_base = OTHER; note = 2'-O-methylguanosine-3'-phosphate
  modified_base 16: mod_base = OTHER; note = 2'-O-methyladenosine-3'-phosphate
  modified_base 17: mod_base = OTHER; note = 2'-O-methyladenosine-3'-phosphate
  modified_base 18: mod_base = OTHER; note = 2'-O-methyladenosine-3'-phosphate
  modified_base 19: mod_base = OTHER; note = 2'-O-methylguanosine-3'-phosphate
  modified_base 20: mod_base = OTHER; note = 2'-O-methyluridine-3'-phosphate
  modified_base 21: mod_base = OTHER; note = 2'-O-methylcytidine-3'- phosphorothioate
  modified_base 22: mod_base = OTHER; note = 2'-O-methylcytidine-3'- phosphorothioate
  modified_base 23: mod_base = OTHER; note = 2'-O-methyladenosine-3'-phosphate
tatatttccaggatgaaagtcca

SEQ ID NO: 328 - RNA, 23 nt, synthetic construct
  misc_feature 1..23: note = Description of Artificial Sequence: Synthetic oligonucleotide
  source 1..23: mol_type = other RNA
  modified_base 1: mod_base = OTHER; note = 2'-O-methyluridine-3'-phosphorothioate
  modified_base 2: mod_base = OTHER; note = 2'-fluoroadenosine-3'-phosphorothioate
  modified_base 3: mod_base = OTHER; note = 2'-O-methyluridine-3'-phosphate
  modified_base 4: mod_base = OTHER; note = 2'-O-methyladenosine-3'-phosphate
  modified_base 5: mod_base = OTHER; note = 2'-O-methyluridine-3'-phosphate
  modified_base 6: mod_base = OTHER; note = 2'-O-methyluridine-3'-phosphate
  modified_base 7: mod_base = OTHER; note = 2'-O-methyluridine-3'-phosphate
  modified_base 8: mod_base = OTHER; note = 2'-O-methylcytidine-3'-phosphate
  modified_base 9: mod_base = OTHER; note = 2'-O-methylcytidine-3'-phosphate
  modified_base 10: mod_base = OTHER; note = 2'-O-methyladenosine-3'-phosphate
  modified_base 11: mod_base = OTHER; note = 2'-O-methylguanosine-3'-phosphate
  modified_base 12: mod_base = OTHER; note = 2'-O-methylguanosine-3'-phosphate
  modified_base 13: mod_base = OTHER; note = 2'-O-methyladenosine-3'-phosphate
  modified_base 14: mod_base = OTHER; note = 2'-fluorouridine-3'-phosphate
  modified_base 15: mod_base = OTHER; note = 2'-O-methylguanosine-3'-phosphate
  modified_base 16: mod_base = OTHER; note = 2'-O-methyladenosine-3'-phosphate
  modified_base 17: mod_base = OTHER; note = 2'-O-methyladenosine-3'-phosphate
  modified_base 18: mod_base = OTHER; note = 2'-O-methyladenosine-3'-phosphate
  modified_base 19: mod_base = OTHER; note = 2'-O-methylguanosine-3'-phosphate
  modified_base 20: mod_base = OTHER; note = 2'-O-methyluridine-3'-phosphate
  modified_base 21: mod_base = OTHER; note = 2'-O-methylcytidine-3'- phosphorothioate
  modified_base 22: mod_base = OTHER; note = 2'-O-methylcytidine-3'- phosphorothioate
  modified_base 23: mod_base = OTHER; note = 2'-O-methyladenosine-3'-phosphate
tatatttccaggatgaaagtcca

SEQ ID NO: 329 - RNA, 23 nt, synthetic construct
  misc_feature 1..23: note = Description of Artificial Sequence: Synthetic oligonucleotide
  source 1..23: mol_type = other RNA
  modified_base 1: mod_base = OTHER; note = 2'-O-methyluridine-3'-phosphorothioate
  modified_base 2: mod_base = OTHER; note = 2'-fluoroadenosine-3'-phosphorothioate
  modified_base 3: mod_base = OTHER; note = 2'-O-methyluridine-3'-phosphate
  modified_base 4: mod_base = OTHER; note = 2'-O-methyladenosine-3'-phosphate
  modified_base 5: mod_base = OTHER; note = 2'-O-methyluridine-3'-phosphate
  modified_base 6: mod_base = OTHER; note = 2'-fluorouridine-3'-phosphate
  modified_base 7: mod_base = OTHER; note = 2'-O-methyluridine-3'-phosphate
  modified_base 8: mod_base = OTHER; note = 2'-fluorocytidine-3'-phosphate
  modified_base 9: mod_base = OTHER; note = 2'-O-methylcytidine-3'-phosphate
  modified_base 10: mod_base = OTHER; note = 2'-fluoroadenosine-3'-phosphate
  modified_base 11: mod_base = OTHER; note = 2'-O-methylguanosine-3'-phosphate
  modified_base 12: mod_base = OTHER; note = 2'-O-methylguanosine-3'-phosphate
  modified_base 13: mod_base = OTHER; note = 2'-O-methyladenosine-3'-phosphate
  modified_base 14: mod_base = OTHER; note = 2'-fluorouridine-3'-phosphate
  modified_base 15: mod_base = OTHER; note = 2'-O-methylguanosine-3'-phosphate
  modified_base 16: mod_base = OTHER; note = 2'-fluoroadenosine-3'-phosphate
  modified_base 17: mod_base = OTHER; note = 2'-O-methyladenosine-3'-phosphate
  modified_base 18: mod_base = OTHER; note = 2'-O-methyladenosine-3'-phosphate
  modified_base 19: mod_base = OTHER; note = 2'-O-methylguanosine-3'-phosphate
  modified_base 20: mod_base = OTHER; note = 2'-O-methyluridine-3'-phosphate
  modified_base 21: mod_base = OTHER; note = 2'-O-methylcytidine-3'- phosphorothioate
  modified_base 22: mod_base = OTHER; note = 2'-O-methylcytidine-3'- phosphorothioate
  modified_base 23: mod_base = OTHER; note = 2'-O-methyladenosine-3'-phosphate
tatatttccaggatgaaagtcca

SEQ ID NO: 330 - RNA, 23 nt, synthetic construct
  misc_feature 1..23: note = Description of Artificial Sequence: Synthetic oligonucleotide
  source 1..23: mol_type = other RNA
  modified_base 1: mod_base = OTHER; note = 2'-O-methyluridine-3'-phosphorothioate
  modified_base 2: mod_base = OTHER; note = 2'-fluoroadenosine-3'-phosphorothioate
  modified_base 3: mod_base = OTHER; note = 2'-O-methyluridine-3'-phosphate
  modified_base 4: mod_base = OTHER; note = 2'-O-methyladenosine-3'-phosphate
  modified_base 5: mod_base = OTHER; note = 2'-O-methyluridine-3'-phosphate
  modified_base 6: mod_base = OTHER; note = 2'-fluorouridine-3'-phosphate
  modified_base 7: mod_base = OTHER; note = 2'-O-methyluridine-3'-phosphate
  modified_base 8: mod_base = OTHER; note = 2'-fluorocytidine-3'-phosphate
  modified_base 9: mod_base = OTHER; note = 2'-fluorocytidine-3'-phosphate
  modified_base 10: mod_base = OTHER; note = 2'-O-methyladenosine-3'-phosphate
  modified_base 11: mod_base = OTHER; note = 2'-O-methylguanosine-3'-phosphate
  modified_base 12: mod_base = OTHER; note = 2'-O-methylguanosine-3'-phosphate
  modified_base 13: mod_base = OTHER; note = 2'-O-methyladenosine-3'-phosphate
  modified_base 14: mod_base = OTHER; note = 2'-fluorouridine-3'-phosphate
  modified_base 15: mod_base = OTHER; note = 2'-O-methylguanosine-3'-phosphate
  modified_base 16: mod_base = OTHER; note = 2'-fluoroadenosine-3'-phosphate
  modified_base 17: mod_base = OTHER; note = 2'-O-methyladenosine-3'-phosphate
  modified_base 18: mod_base = OTHER; note = 2'-O-methyladenosine-3'-phosphate
  modified_base 19: mod_base = OTHER; note = 2'-O-methylguanosine-3'-phosphate
  modified_base 20: mod_base = OTHER; note = 2'-O-methyluridine-3'-phosphate
  modified_base 21: mod_base = OTHER; note = 2'-O-methylcytidine-3'- phosphorothioate
  modified_base 22: mod_base = OTHER; note = 2'-O-methylcytidine-3'- phosphorothioate
  modified_base 23: mod_base = OTHER; note = 2'-O-methyladenosine-3'-phosphate
tatatttccaggatgaaagtcca

SEQ ID NO: 331 - RNA, 23 nt, synthetic construct
  misc_feature 1..23: note = Description of Artificial Sequence: Synthetic oligonucleotide
  source 1..23: mol_type = other RNA
  modified_base 1: mod_base = OTHER; note = 2'-O-methyluridine-3'-phosphorothioate
  modified_base 2: mod_base = OTHER; note = 2'-fluoroadenosine-3'-phosphorothioate
  modified_base 3: mod_base = OTHER; note = 2'-O-methyluridine-3'-phosphate
  modified_base 4: mod_base = OTHER; note = 2'-O-methyladenosine-3'-phosphate
  modified_base 5: mod_base = OTHER; note = 2'-O-methyluridine-3'-phosphate
  modified_base 6: mod_base = OTHER; note = 2'-fluorouridine-3'-phosphate
  modified_base 7: mod_base = OTHER; note = 2'-O-methyluridine-3'-phosphate
  modified_base 8: mod_base = OTHER; note = 2'-O-methylcytidine-3'-phosphate
  modified_base 9: mod_base = OTHER; note = 2'-O-methylcytidine-3'-phosphate
  modified_base 10: mod_base = OTHER; note = 2'-O-methyladenosine-3'-phosphate
  modified_base 11: mod_base = OTHER; note = 2'-O-methylguanosine-3'-phosphate
  modified_base 12: mod_base = OTHER; note = 2'-O-methylguanosine-3'-phosphate
  modified_base 13: mod_base = OTHER; note = 2'-O-methyladenosine-3'-phosphate
  modified_base 14: mod_base = OTHER; note = 2'-fluorouridine-3'-phosphate
  modified_base 15: mod_base = OTHER; note = 2'-O-methylguanosine-3'-phosphate
  modified_base 16: mod_base = OTHER; note = 2'-fluoroadenosine-3'-phosphate
  modified_base 17: mod_base = OTHER; note = 2'-O-methyladenosine-3'-phosphate
  modified_base 18: mod_base = OTHER; note = 2'-O-methyladenosine-3'-phosphate
  modified_base 19: mod_base = OTHER; note = 2'-O-methylguanosine-3'-phosphate
  modified_base 20: mod_base = OTHER; note = 2'-O-methyluridine-3'-phosphate
  modified_base 21: mod_base = OTHER; note = 2'-O-methylcytidine-3'- phosphorothioate
  modified_base 22: mod_base = OTHER; note = 2'-O-methylcytidine-3'- phosphorothioate
  modified_base 23: mod_base = OTHER; note = 2'-O-methyladenosine-3'-phosphate
tatatttccaggatgaaagtcca

SEQ ID NO: 332 - RNA, 23 nt, synthetic construct
  misc_feature 1..23: note = Description of Artificial Sequence: Synthetic oligonucleotide
  source 1..23: mol_type = other RNA
  modified_base 1: mod_base = OTHER; note = 2'-O-methyluridine-3'-phosphorothioate
  modified_base 2: mod_base = OTHER; note = 2'-fluoroadenosine-3'-phosphorothioate
  modified_base 3: mod_base = OTHER; note = 2'-O-methyluridine-3'-phosphate
  modified_base 4: mod_base = OTHER; note = 2'-O-methyladenosine-3'-phosphate
  modified_base 5: mod_base = OTHER; note = 2'-O-methyluridine-3'-phosphate
  modified_base 6: mod_base = OTHER; note = 2'-fluorouridine-3'-phosphate
  modified_base 7: mod_base = OTHER; note = 2'-O-methyluridine-3'-phosphate
  modified_base 8: mod_base = OTHER; note = 2'-fluorocytidine-3'-phosphate
  modified_base 9: mod_base = OTHER; note = 2'-O-methylcytidine-3'-phosphate
  modified_base 10: mod_base = OTHER; note = 2'-fluoroadenosine-3'-phosphate
  modified_base 11: mod_base = OTHER; note = 2'-O-methylguanosine-3'-phosphate
  modified_base 12: mod_base = OTHER; note = 2'-O-methylguanosine-3'-phosphate
  modified_base 13: mod_base = OTHER; note = 2'-O-methyladenosine-3'-phosphate
  modified_base 14: mod_base = OTHER; note = 2'-fluorouridine-3'-phosphate
  modified_base 15: mod_base = OTHER; note = 2'-O-methylguanosine-3'-phosphate
  modified_base 16: mod_base = OTHER; note = 2'-fluoroadenosine-3'-phosphate
  modified_base 17: mod_base = OTHER; note = 2'-O-methyladenosine-3'-phosphate
  modified_base 18: mod_base = OTHER; note = 2'-O-methyladenosine-3'-phosphate
  modified_base 19: mod_base = OTHER; note = 2'-O-methylguanosine-3'-phosphate
  modified_base 20: mod_base = OTHER; note = 2'-O-methyluridine-3'-phosphate
  modified_base 21: mod_base = OTHER; note = 2'-O-methylcytidine-3'- phosphorothioate
  modified_base 22: mod_base = OTHER; note = 2'-O-methylcytidine-3'- phosphorothioate
  modified_base 23: mod_base = OTHER; note = 2'-O-methyladenosine-3'-phosphate
tatatttccaggatgaaagtcca

SEQ ID NO: 333 - RNA, 23 nt, synthetic construct
  misc_feature 1..23: note = Description of Artificial Sequence: Synthetic oligonucleotide
  source 1..23: mol_type = other RNA
  modified_base 1: mod_base = OTHER; note = 2'-O-methyluridine-3'-phosphorothioate
  modified_base 2: mod_base = OTHER; note = 2'-fluoroadenosine-3'-phosphorothioate
  modified_base 3: mod_base = OTHER; note = 2'-O-methyluridine-3'-phosphate
  modified_base 4: mod_base = OTHER; note = 2'-O-methyladenosine-3'-phosphate
  modified_base 5: mod_base = OTHER; note = 2'-O-methyluridine-3'-phosphate
  modified_base 6: mod_base = OTHER; note = 2'-fluorouridine-3'-phosphate
  modified_base 7: mod_base = OTHER; note = 2'-O-methyluridine-3'-phosphate
  modified_base 8: mod_base = OTHER; note = 2'-fluorocytidine-3'-phosphate
  modified_base 9: mod_base = OTHER; note = 2'-fluorocytidine-3'-phosphate
  modified_base 10: mod_base = OTHER; note = 2'-O-methyladenosine-3'-phosphate
  modified_base 11: mod_base = OTHER; note = 2'-O-methylguanosine-3'-phosphate
  modified_base 12: mod_base = OTHER; note = 2'-O-methylguanosine-3'-phosphate
  modified_base 13: mod_base = OTHER; note = 2'-O-methyladenosine-3'-phosphate
  modified_base 14: mod_base = OTHER; note = 2'-fluorouridine-3'-phosphate
  modified_base 15: mod_base = OTHER; note = 2'-O-methylguanosine-3'-phosphate
  modified_base 16: mod_base = OTHER; note = 2'-fluoroadenosine-3'-phosphate
  modified_base 17: mod_base = OTHER; note = 2'-O-methyladenosine-3'-phosphate
  modified_base 18: mod_base = OTHER; note = 2'-O-methyladenosine-3'-phosphate
  modified_base 19: mod_base = OTHER; note = 2'-O-methylguanosine-3'-phosphate
  modified_base 20: mod_base = OTHER; note = 2'-O-methyluridine-3'-phosphate
  modified_base 21: mod_base = OTHER; note = 2'-O-methylcytidine-3'- phosphorothioate
  modified_base 22: mod_base = OTHER; note = 2'-O-methylcytidine-3'- phosphorothioate
  modified_base 23: mod_base = OTHER; note = 2'-O-methyladenosine-3'-phosphate
tatatttccaggatgaaagtcca

SEQ ID NO: 334 - RNA, 23 nt, synthetic construct
  misc_feature 1..23: note = Description of Artificial Sequence: Synthetic oligonucleotide
  source 1..23: mol_type = other RNA
  modified_base 1: mod_base = OTHER; note = 2'-O-methyluridine-3'-phosphorothioate
  modified_base 2: mod_base = OTHER; note = 2'-fluoroadenosine-3'-phosphorothioate
  modified_base 3: mod_base = OTHER; note = 2'-O-methyluridine-3'-phosphate
  modified_base 4: mod_base = OTHER; note = 2'-O-methyladenosine-3'-phosphate
  modified_base 5: mod_base = OTHER; note = 2'-O-methyluridine-3'-phosphate
  modified_base 6: mod_base = OTHER; note = 2'-fluorouridine-3'-phosphate
  modified_base 7: mod_base = OTHER; note = 2'-O-methyluridine-3'-phosphate
  modified_base 8: mod_base = OTHER; note = 2'-O-methylcytidine-3'-phosphate
  modified_base 9: mod_base = OTHER; note = 2'-O-methylcytidine-3'-phosphate
  modified_base 10: mod_base = OTHER; note = 2'-O-methyladenosine-3'-phosphate
  modified_base 11: mod_base = OTHER; note = 2'-O-methylguanosine-3'-phosphate
  modified_base 12: mod_base = OTHER; note = 2'-O-methylguanosine-3'-phosphate
  modified_base 13: mod_base = OTHER; note = 2'-O-methyladenosine-3'-phosphate
  modified_base 14: mod_base = OTHER; note = 2'-fluorouridine-3'-phosphate
  modified_base 15: mod_base = OTHER; note = 2'-O-methylguanosine-3'-phosphate
  modified_base 16: mod_base = OTHER; note = 2'-fluoroadenosine-3'-phosphate
  modified_base 17: mod_base = OTHER; note = 2'-O-methyladenosine-3'-phosphate
  modified_base 18: mod_base = OTHER; note = 2'-O-methyladenosine-3'-phosphate
  modified_base 19: mod_base = OTHER; note = 2'-O-methylguanosine-3'-phosphate
  modified_base 20: mod_base = OTHER; note = 2'-O-methyluridine-3'-phosphate
  modified_base 21: mod_base = OTHER; note = 2'-O-methylcytidine-3'- phosphorothioate
  modified_base 22: mod_base = OTHER; note = 2'-O-methylcytidine-3'- phosphorothioate
  modified_base 23: mod_base = OTHER; note = 2'-O-methyladenosine-3'-phosphate
tatatttccaggatgaaagtcca

SEQ ID NO: 335 - RNA, 23 nt, synthetic construct
  misc_feature 1..23: note = Description of Artificial Sequence: Synthetic oligonucleotide
  source 1..23: mol_type = other RNA
  modified_base 1: mod_base = OTHER; note = 2'-O-methyluridine-3'-phosphorothioate
  modified_base 2: mod_base = OTHER; note = 2'-fluoroadenosine-3'-phosphorothioate
  modified_base 3: mod_base = OTHER; note = 2'-O-methyluridine-3'-phosphate
  modified_base 4: mod_base = OTHER; note = 2'-fluoroadenosine-3'-phosphate
  modified_base 5: mod_base = OTHER; note = 2'-O-methyluridine-3'-phosphate
  modified_base 6: mod_base = OTHER; note = 2'-fluorouridine-3'-phosphate
  modified_base 7: mod_base = OTHER; note = 2'-O-methyluridine-3'-phosphate
  modified_base 8: mod_base = OTHER; note = 2'-fluorocytidine-3'-phosphate
  modified_base 9: mod_base = OTHER; note = 2'-O-methylcytidine-3'-phosphate
  modified_base 10: mod_base = OTHER; note = 2'-fluoroadenosine-3'-phosphate
  modified_base 11: mod_base = OTHER; note = 2'-O-methylguanosine-3'-phosphate
  modified_base 12: mod_base = OTHER; note = 2'-O-methylguanosine-3'-phosphate
  modified_base 13: mod_base = OTHER; note = 2'-O-methyladenosine-3'-phosphate
  modified_base 14: mod_base = OTHER; note = 2'-fluorouridine-3'-phosphate
  modified_base 15: mod_base = OTHER; note = 2'-O-methylguanosine-3'-phosphate
  modified_base 16: mod_base = OTHER; note = 2'-fluoroadenosine-3'-phosphate
  modified_base 17: mod_base = OTHER; note = 2'-O-methyladenosine-3'-phosphate
  modified_base 18: mod_base = OTHER; note = 2'-fluoroadenosine-3'-phosphate
  modified_base 19: mod_base = OTHER; note = 2'-O-methylguanosine-3'-phosphate
  modified_base 20: mod_base = OTHER; note = 2'-fluorouridine-3'-phosphate
  modified_base 21: mod_base = OTHER; note = 2'-O-methylcytidine-3'- phosphorothioate
  modified_base 22: mod_base = OTHER; note = 2'-O-methylcytidine-3'- phosphorothioate
  modified_base 23: mod_base = OTHER; note = 2'-O-methyladenosine-3'-phosphate
tatatttccaggatgaaagtcca

SEQ ID NO: 336 - RNA, 23 nt, synthetic construct
  misc_feature 1..23: note = Description of Artificial Sequence: Synthetic oligonucleotide
  source 1..23: mol_type = other RNA
  modified_base 1: mod_base = OTHER; note = 2'-O-methyluridine-3'-phosphorothioate
  modified_base 2: mod_base = OTHER; note = 2'-fluoroadenosine-3'-phosphorothioate
  modified_base 3: mod_base = OTHER; note = 2'-O-methyluridine-3'-phosphate
  modified_base 4: mod_base = OTHER; note = 2'-fluoroadenosine-3'-phosphate
  modified_base 5: mod_base = OTHER; note = 2'-O-methyluridine-3'-phosphate
  modified_base 6: mod_base = OTHER; note = 2'-fluorouridine-3'-phosphate
  modified_base 7: mod_base = OTHER; note = 2'-O-methyluridine-3'-phosphate
  modified_base 8: mod_base = OTHER; note = 2'-fluorocytidine-3'-phosphate
  modified_base 9: mod_base = OTHER; note = 2'-O-methylcytidine-3'-phosphate
  modified_base 10: mod_base = OTHER; note = 2'-fluoroadenosine-3'-phosphate
  modified_base 11: mod_base = OTHER; note = 2'-O-methylguanosine-3'-phosphate
  modified_base 12: mod_base = OTHER; note = 2'-O-methylguanosine-3'-phosphate
  modified_base 13: mod_base = OTHER; note = 2'-O-methyladenosine-3'-phosphate
  modified_base 14: mod_base = OTHER; note = 2'-fluorouridine-3'-phosphate
  modified_base 15: mod_base = OTHER; note = 2'-O-methylguanosine-3'-phosphate
  modified_base 16: mod_base = OTHER; note = 2'-fluoroadenosine-3'-phosphate
  modified_base 17: mod_base = OTHER; note = 2'-O-methyladenosine-3'-phosphate
  modified_base 18: mod_base = OTHER; note = 2'-fluoroadenosine-3'-phosphate
  modified_base 19: mod_base = OTHER; note = 2'-O-methylguanosine-3'-phosphate
  modified_base 20: mod_base = OTHER; note = 2'-fluorouridine-3'-phosphate
  modified_base 21: mod_base = OTHER; note = 2'-O-methylcytidine-3'- phosphorothioate
  modified_base 22: mod_base = OTHER; note = 2'-O-methylcytidine-3'- phosphorothioate
  modified_base 23: mod_base = OTHER; note = 2'-O-methyladenosine-3'-phosphate
tatatttccaggatgaaagtcca

SEQ ID NO: 337 - RNA, 23 nt, synthetic construct
  misc_feature 1..23: note = Description of Artificial Sequence: Synthetic oligonucleotide
  source 1..23: mol_type = other RNA
  modified_base 1: mod_base = OTHER; note = 2'-O-methyluridine-3'-phosphorothioate
  modified_base 2: mod_base = OTHER; note = 2'-fluoroadenosine-3'-phosphorothioate
  modified_base 3: mod_base = OTHER; note = 2'-O-methyluridine-3'-phosphate
  modified_base 4: mod_base = OTHER; note = 2'-fluoroadenosine-3'-phosphate
  modified_base 5: mod_base = OTHER; note = 2'-O-methyluridine-3'-phosphate
  modified_base 6: mod_base = OTHER; note = 2'-fluorouridine-3'-phosphate
  modified_base 7: mod_base = OTHER; note = 2'-O-methyluridine-3'-phosphate
  modified_base 8: mod_base = OTHER; note = 2'-fluorocytidine-3'-phosphate
  modified_base 9: mod_base = OTHER; note = 2'-O-methylcytidine-3'-phosphate
  modified_base 10: mod_base = OTHER; note = 2'-fluoroadenosine-3'-phosphate
  modified_base 11: mod_base = OTHER; note = 2'-O-methylguanosine-3'-phosphate
  modified_base 12: mod_base = OTHER; note = 2'-O-methylguanosine-3'-phosphate
  modified_base 13: mod_base = OTHER; note = 2'-O-methyladenosine-3'-phosphate
  modified_base 14: mod_base = OTHER; note = 2'-fluorouridine-3'-phosphate
  modified_base 15: mod_base = OTHER; note = 2'-O-methylguanosine-3'-phosphate
  modified_base 16: mod_base = OTHER; note = 2'-fluoroadenosine-3'-phosphate
  modified_base 17: mod_base = OTHER; note = 2'-O-methyladenosine-3'-phosphate
  modified_base 18: mod_base = OTHER; note = 2'-fluoroadenosine-3'-phosphate
  modified_base 19: mod_base = OTHER; note = 2'-O-methylguanosine-3'-phosphate
  modified_base 20: mod_base = OTHER; note = 2'-fluorouridine-3'-phosphate
  modified_base 21: mod_base = OTHER; note = 2'-O-methylcytidine-3'- phosphorothioate
  modified_base 22: mod_base = OTHER; note = 2'-O-methylcytidine-3'- phosphorothioate
  modified_base 23: mod_base = OTHER; note = 2'-O-methyladenosine-3'-phosphate
tatatttccaggatgaaagtcca

SEQ ID NO: 338 - RNA, 23 nt, synthetic construct
  misc_feature 1..23: note = Description of Artificial Sequence: Synthetic oligonucleotide
  source 1..23: mol_type = other RNA
  modified_base 1: mod_base = OTHER; note = 2'-O-methyluridine-3'-phosphorothioate
  modified_base 2: mod_base = OTHER; note = 2'-fluoroadenosine-3'-phosphorothioate
  modified_base 3: mod_base = OTHER; note = 2'-O-methyluridine-3'-phosphate
  modified_base 4: mod_base = OTHER; note = 2'-fluoroadenosine-3'-phosphate
  modified_base 5: mod_base = OTHER; note = 2'-O-methyluridine-3'-phosphate
  modified_base 6: mod_base = OTHER; note = 2'-fluorouridine-3'-phosphate
  modified_base 7: mod_base = OTHER; note = 2'-O-methyluridine-3'-phosphate
  modified_base 8: mod_base = OTHER; note = 2'-fluorocytidine-3'-phosphate
  modified_base 9: mod_base = OTHER; note = 2'-O-methylcytidine-3'-phosphate
  modified_base 10: mod_base = OTHER; note = 2'-fluoroadenosine-3'-phosphate
  modified_base 11: mod_base = OTHER; note = 2'-O-methylguanosine-3'-phosphate
  modified_base 12: mod_base = OTHER; note = 2'-O-methylguanosine-3'-phosphate
  modified_base 13: mod_base = OTHER; note = 2'-O-methyladenosine-3'-phosphate
  modified_base 14: mod_base = OTHER; note = 2'-fluorouridine-3'-phosphate
  modified_base 15: mod_base = OTHER; note = 2'-O-methylguanosine-3'-phosphate
  modified_base 16: mod_base = OTHER; note = 2'-fluoroadenosine-3'-phosphate
  modified_base 17: mod_base = OTHER; note = 2'-O-methyladenosine-3'-phosphate
  modified_base 18: mod_base = OTHER; note = 2'-fluoroadenosine-3'-phosphate
  modified_base 19: mod_base = OTHER; note = 2'-O-methylguanosine-3'-phosphate
  modified_base 20: mod_base = OTHER; note = 2'-fluorouridine-3'-phosphate
  modified_base 21: mod_base = OTHER; note = 2'-O-methylcytidine-3'- phosphorothioate
  modified_base 22: mod_base = OTHER; note = 2'-O-methylcytidine-3'- phosphorothioate
  modified_base 23: mod_base = OTHER; note = 2'-O-methyladenosine-3'-phosphate
tatatttccaggatgaaagtcca

SEQ ID NO: 339 - RNA, 23 nt, synthetic construct
  misc_feature 1..23: note = Description of Artificial Sequence: Synthetic oligonucleotide
  source 1..23: mol_type = other RNA
  modified_base 1: mod_base = OTHER; note = 2'-O-methyluridine-3'-phosphorothioate
  modified_base 2: mod_base = OTHER; note = 2'-fluoroadenosine-3'-phosphorothioate
  modified_base 3: mod_base = OTHER; note = 2'-O-methyluridine-3'-phosphate
  modified_base 4: mod_base = OTHER; note = 2'-fluoroadenosine-3'-phosphate
  modified_base 5: mod_base = OTHER; note = 2'-O-methyluridine-3'-phosphate
  modified_base 6: mod_base = OTHER; note = 2'-fluorouridine-3'-phosphate
  modified_base 7: mod_base = OTHER; note = 2'-O-methyluridine-3'-phosphate
  modified_base 8: mod_base = OTHER; note = 2'-fluorocytidine-3'-phosphate
  modified_base 9: mod_base = OTHER; note = 2'-O-methylcytidine-3'-phosphate
  modified_base 10: mod_base = OTHER; note = 2'-fluoroadenosine-3'-phosphate
  modified_base 11: mod_base = OTHER; note = 2'-O-methylguanosine-3'-phosphate
  modified_base 12: mod_base = OTHER; note = 2'-O-methylguanosine-3'-phosphate
  modified_base 13: mod_base = OTHER; note = 2'-O-methyladenosine-3'-phosphate
  modified_base 14: mod_base = OTHER; note = 2'-fluorouridine-3'-phosphate
  modified_base 15: mod_base = OTHER; note = 2'-O-methylguanosine-3'-phosphate
  modified_base 16: mod_base = OTHER; note = 2'-fluoroadenosine-3'-phosphate
  modified_base 17: mod_base = OTHER; note = 2'-O-methyladenosine-3'-phosphate
  modified_base 18: mod_base = OTHER; note = 2'-fluoroadenosine-3'-phosphate
  modified_base 19: mod_base = OTHER; note = 2'-O-methylguanosine-3'-phosphate
  modified_base 20: mod_base = OTHER; note = 2'-fluorouridine-3'-phosphate
  modified_base 21: mod_base = OTHER; note = 2'-O-methylcytidine-3'- phosphorothioate
  modified_base 22: mod_base = OTHER; note = 2'-O-methylcytidine-3'- phosphorothioate
  modified_base 23: mod_base = OTHER; note = 2'-O-methyladenosine-3'-phosphate
tatatttccaggatgaaagtcca

SEQ ID NO: 340 - RNA, 23 nt, synthetic construct
  misc_feature 1..23: note = Description of Artificial Sequence: Synthetic oligonucleotide
  source 1..23: mol_type = other RNA
  modified_base 1: mod_base = OTHER; note = 2'-O-methyluridine-3'-phosphorothioate
  modified_base 2: mod_base = OTHER; note = 2'-fluoroadenosine-3'-phosphorothioate
  modified_base 3: mod_base = OTHER; note = 2'-O-methyluridine-3'-phosphate
  modified_base 4: mod_base = OTHER; note = 2'-fluoroadenosine-3'-phosphate
  modified_base 5: mod_base = OTHER; note = 2'-O-methyluridine-3'-phosphate
  modified_base 6: mod_base = OTHER; note = 2'-fluorouridine-3'-phosphate
  modified_base 7: mod_base = OTHER; note = 2'-O-methyluridine-3'-phosphate
  modified_base 8: mod_base = OTHER; note = 2'-fluorocytidine-3'-phosphate
  modified_base 9: mod_base = OTHER; note = 2'-O-methylcytidine-3'-phosphate
  modified_base 10: mod_base = OTHER; note = 2'-fluoroadenosine-3'-phosphate
  modified_base 11: mod_base = OTHER; note = 2'-O-methylguanosine-3'-phosphate
  modified_base 12: mod_base = OTHER; note = 2'-O-methylguanosine-3'-phosphate
  modified_base 13: mod_base = OTHER; note = 2'-O-methyladenosine-3'-phosphate
  modified_base 14: mod_base = OTHER; note = 2'-fluorouridine-3'-phosphate
  modified_base 15: mod_base = OTHER; note = 2'-O-methylguanosine-3'-phosphate
  modified_base 16: mod_base = OTHER; note = 2'-fluoroadenosine-3'-phosphate
  modified_base 17: mod_base = OTHER; note = 2'-O-methyladenosine-3'-phosphate
  modified_base 18: mod_base = OTHER; note = 2'-fluoroadenosine-3'-phosphate
  modified_base 19: mod_base = OTHER; note = 2'-O-methylguanosine-3'-phosphate
  modified_base 20: mod_base = OTHER; note = 2'-fluorouridine-3'-phosphate
  modified_base 21: mod_base = OTHER; note = 2'-O-methylcytidine-3'- phosphorothioate
  modified_base 22: mod_base = OTHER; note = 2'-O-methylcytidine-3'- phosphorothioate
  modified_base 23: mod_base = OTHER; note = 2'-O-methyladenosine-3'-phosphate
tatatttccaggatgaaagtcca

SEQ ID NO: 341 - RNA, 23 nt, synthetic construct
  misc_feature 1..23: note = Description of Artificial Sequence: Synthetic oligonucleotide
  source 1..23: mol_type = other RNA
  modified_base 1: mod_base = OTHER; note = 2'-O-methyluridine-3'-phosphorothioate
  modified_base 2: mod_base = OTHER; note = 2'-fluoroadenosine-3'-phosphorothioate
  modified_base 3: mod_base = OTHER; note = 2'-O-methyluridine-3'-phosphate
  modified_base 4: mod_base = OTHER; note = 2'-fluoroadenosine-3'-phosphate
  modified_base 5: mod_base = OTHER; note = 2'-O-methyluridine-3'-phosphate
  modified_base 6: mod_base = OTHER; note = 2'-fluorouridine-3'-phosphate
  modified_base 7: mod_base = OTHER; note = 2'-O-methyluridine-3'-phosphate
  modified_base 8: mod_base = OTHER; note = 2'-fluorocytidine-3'-phosphate
  modified_base 9: mod_base = OTHER; note = 2'-O-methylcytidine-3'-phosphate
  modified_base 10: mod_base = OTHER; note = 2'-fluoroadenosine-3'-phosphate
  modified_base 11: mod_base = OTHER; note = 2'-O-methylguanosine-3'-phosphate
  modified_base 12: mod_base = OTHER; note = 2'-O-methylguanosine-3'-phosphate
  modified_base 13: mod_base = OTHER; note = 2'-O-methyladenosine-3'-phosphate
  modified_base 14: mod_base = OTHER; note = 2'-fluorouridine-3'-phosphate
  modified_base 15: mod_base = OTHER; note = 2'-O-methylguanosine-3'-phosphate
  modified_base 16: mod_base = OTHER; note = 2'-fluoroadenosine-3'-phosphate
  modified_base 17: mod_base = OTHER; note = 2'-O-methyladenosine-3'-phosphate
  modified_base 18: mod_base = OTHER; note = 2'-fluoroadenosine-3'-phosphate
  modified_base 19: mod_base = OTHER; note = 2'-O-methylguanosine-3'-phosphate
  modified_base 20: mod_base = OTHER; note = 2'-fluorouridine-3'-phosphate
  modified_base 21: mod_base = OTHER; note = 2'-O-methylcytidine-3'- phosphorothioate
  modified_base 22: mod_base = OTHER; note = 2'-O-methylcytidine-3'- phosphorothioate
  modified_base 23: mod_base = OTHER; note = 2'-O-methyladenosine-3'-phosphate
tatatttccaggatgaaagtcca

SEQ ID NO: 342 - RNA, 23 nt, synthetic construct
  misc_feature 1..23: note = Description of Artificial Sequence: Synthetic oligonucleotide
  source 1..23: mol_type = other RNA
  modified_base 1: mod_base = OTHER; note = 2'-O-methyluridine-3'-phosphorothioate
  modified_base 2: mod_base = OTHER; note = 2'-fluoroadenosine-3'-phosphorothioate
  modified_base 3: mod_base = OTHER; note = 2'-O-methyluridine-3'-phosphate
  modified_base 4: mod_base = OTHER; note = 2'-fluoroadenosine-3'-phosphate
  modified_base 5: mod_base = OTHER; note = 2'-O-methyluridine-3'-phosphate
  modified_base 6: mod_base = OTHER; note = 2'-fluorouridine-3'-phosphate
  modified_base 7: mod_base = OTHER; note = 2'-O-methyluridine-3'-phosphate
  modified_base 8: mod_base = OTHER; note = 2'-fluorocytidine-3'-phosphate
  modified_base 9: mod_base = OTHER; note = 2'-O-methylcytidine-3'-phosphate
  modified_base 10: mod_base = OTHER; note = 2'-fluoroadenosine-3'-phosphate
  modified_base 11: mod_base = OTHER; note = 2'-O-methylguanosine-3'-phosphate
  modified_base 12: mod_base = OTHER; note = 2'-O-methylguanosine-3'-phosphate
  modified_base 13: mod_base = OTHER; note = 2'-O-methyladenosine-3'-phosphate
  modified_base 14: mod_base = OTHER; note = 2'-fluorouridine-3'-phosphate
  modified_base 15: mod_base = OTHER; note = 2'-O-methylguanosine-3'-phosphate
  modified_base 16: mod_base = OTHER; note = 2'-fluoroadenosine-3'-phosphate
  modified_base 17: mod_base = OTHER; note = 2'-O-methyladenosine-3'-phosphate
  modified_base 18: mod_base = OTHER; note = 2'-fluoroadenosine-3'-phosphate
  modified_base 19: mod_base = OTHER; note = 2'-O-methylguanosine-3'-phosphate
  modified_base 20: mod_base = OTHER; note = 2'-fluorouridine-3'-phosphate
  modified_base 21: mod_base = OTHER; note = 2'-O-methylcytidine-3'- phosphorothioate
  modified_base 22: mod_base = OTHER; note = 2'-O-methylcytidine-3'- phosphorothioate
  modified_base 23: mod_base = OTHER; note = 2'-O-methyladenosine-3'-phosphate
tatatttccaggatgaaagtcca

SEQ ID NO: 343 - RNA, 23 nt, synthetic construct
  misc_feature 1..23: note = Description of Artificial Sequence: Synthetic oligonucleotide
  source 1..23: mol_type = other RNA
  modified_base 1: mod_base = OTHER; note = 2'-O-methyluridine-3'-phosphorothioate
  modified_base 2: mod_base = OTHER; note = 2'-fluoroadenosine-3'-phosphorothioate
  modified_base 3: mod_base = OTHER; note = 2'-O-methyluridine-3'-phosphate
  modified_base 4: mod_base = OTHER; note = 2'-fluoroadenosine-3'-phosphate
  modified_base 5: mod_base = OTHER; note = 2'-O-methyluridine-3'-phosphate
  modified_base 6: mod_base = OTHER; note = 2'-fluorouridine-3'-phosphate
  modified_base 7: mod_base = OTHER; note = 2'-O-methyluridine-3'-phosphate
  modified_base 8: mod_base = OTHER; note = 2'-fluorocytidine-3'-phosphate
  modified_base 9: mod_base = OTHER; note = 2'-O-methylcytidine-3'-phosphate
  modified_base 10: mod_base = OTHER; note = 2'-fluoroadenosine-3'-phosphate
  modified_base 11: mod_base = OTHER; note = 2'-O-methylguanosine-3'-phosphate
  modified_base 12: mod_base = OTHER; note = 2'-O-methylguanosine-3'-phosphate
  modified_base 13: mod_base = OTHER; note = 2'-O-methyladenosine-3'-phosphate
  modified_base 14: mod_base = OTHER; note = 2'-fluorouridine-3'-phosphate
  modified_base 15: mod_base = OTHER; note = 2'-O-methylguanosine-3'-phosphate
  modified_base 16: mod_base = OTHER; note = 2'-fluoroadenosine-3'-phosphate
  modified_base 17: mod_base = OTHER; note = 2'-O-methyladenosine-3'-phosphate
  modified_base 18: mod_base = OTHER; note = 2'-fluoroadenosine-3'-phosphate
  modified_base 19: mod_base = OTHER; note = 2'-O-methylguanosine-3'-phosphate
  modified_base 20: mod_base = OTHER; note = 2'-fluorouridine-3'-phosphate
  modified_base 21: mod_base = OTHER; note = 2'-O-methylcytidine-3'- phosphorothioate
  modified_base 22: mod_base = OTHER; note = 2'-O-methylcytidine-3'- phosphorothioate
  modified_base 23: mod_base = OTHER; note = 2'-O-methyladenosine-3'-phosphate
tatatttccaggatgaaagtcca

SEQ ID NO: 344 - RNA, 23 nt, synthetic construct
  misc_feature 1..23: note = Description of Artificial Sequence: Synthetic oligonucleotide
  source 1..23: mol_type = other RNA
  modified_base 1: mod_base = OTHER; note = 2'-O-methyluridine-3'-phosphorothioate
  modified_base 2: mod_base = OTHER; note = 2'-fluoroadenosine-3'-phosphorothioate
  modified_base 3: mod_base = OTHER; note = 2'-O-methyluridine-3'-phosphate
  modified_base 4: mod_base = OTHER; note = 2'-fluoroadenosine-3'-phosphate
  modified_base 5: mod_base = OTHER; note = 2'-O-methyluridine-3'-phosphate
  modified_base 6: mod_base = OTHER; note = 2'-fluorouridine-3'-phosphate
  modified_base 7: mod_base = OTHER; note = 2'-O-methyluridine-3'-phosphate
  modified_base 8: mod_base = OTHER; note = 2'-fluorocytidine-3'-phosphate
  modified_base 9: mod_base = OTHER; note = 2'-O-methylcytidine-3'-phosphate
  modified_base 10: mod_base = OTHER; note = 2'-fluoroadenosine-3'-phosphate
  modified_base 11: mod_base = OTHER; note = 2'-O-methylguanosine-3'-phosphate
  modified_base 12: mod_base = OTHER; note = 2'-O-methylguanosine-3'-phosphate
  modified_base 13: mod_base = OTHER; note = 2'-O-methyladenosine-3'-phosphate
  modified_base 14: mod_base = OTHER; note = 2'-fluorouridine-3'-phosphate
  modified_base 15: mod_base = OTHER; note = 2'-O-methylguanosine-3'-phosphate
  modified_base 16: mod_base = OTHER; note = 2'-fluoroadenosine-3'-phosphate
  modified_base 17: mod_base = OTHER; note = 2'-O-methyladenosine-3'-phosphate
  modified_base 18: mod_base = OTHER; note = 2'-fluoroadenosine-3'-phosphate
  modified_base 19: mod_base = OTHER; note = 2'-O-methylguanosine-3'-phosphate
  modified_base 20: mod_base = OTHER; note = 2'-fluorouridine-3'-phosphate
  modified_base 21: mod_base = OTHER; note = 2'-O-methylcytidine-3'- phosphorothioate
  modified_base 22: mod_base = OTHER; note = 2'-O-methylcytidine-3'- phosphorothioate
  modified_base 23: mod_base = OTHER; note = 2'-O-methyladenosine-3'-phosphate
tatatttccaggatgaaagtcca

SEQ ID NO: 345 - RNA, 23 nt, synthetic construct
  misc_feature 1..23: note = Description of Artificial Sequence: Synthetic oligonucleotide
  source 1..23: mol_type = other RNA
  modified_base 1: mod_base = OTHER; note = 2'-O-methyluridine-3'-phosphorothioate
  modified_base 2: mod_base = OTHER; note = 2'-fluoroadenosine-3'-phosphorothioate
  modified_base 3: mod_base = OTHER; note = 2'-O-methyluridine-3'-phosphate
  modified_base 4: mod_base = OTHER; note = 2'-fluoroadenosine-3'-phosphate
  modified_base 5: mod_base = OTHER; note = 2'-O-methyluridine-3'-phosphate
  modified_base 6: mod_base = OTHER; note = 2'-fluorouridine-3'-phosphate
  modified_base 7: mod_base = OTHER; note = 2'-O-methyluridine-3'-phosphate
  modified_base 8: mod_base = OTHER; note = 2'-fluorocytidine-3'-phosphate
  modified_base 9: mod_base = OTHER; note = 2'-O-methylcytidine-3'-phosphate
  modified_base 10: mod_base = OTHER; note = 2'-fluoroadenosine-3'-phosphate
  modified_base 11: mod_base = OTHER; note = 2'-O-methylguanosine-3'-phosphate
  modified_base 12: mod_base = OTHER; note = 2'-O-methylguanosine-3'-phosphate
  modified_base 13: mod_base = OTHER; note = 2'-O-methyladenosine-3'-phosphate
  modified_base 14: mod_base = OTHER; note = 2'-fluorouridine-3'-phosphate
  modified_base 15: mod_base = OTHER; note = 2'-O-methylguanosine-3'-phosphate
  modified_base 16: mod_base = OTHER; note = 2'-fluoroadenosine-3'-phosphate
  modified_base 17: mod_base = OTHER; note = 2'-O-methyladenosine-3'-phosphate
  modified_base 18: mod_base = OTHER; note = 2'-fluoroadenosine-3'-phosphate
  modified_base 19: mod_base = OTHER; note = 2'-O-methylguanosine-3'-phosphate
  modified_base 20: mod_base = OTHER; note = 2'-fluorouridine-3'-phosphate
  modified_base 21: mod_base = OTHER; note = 2'-O-methylcytidine-3'- phosphorothioate
  modified_base 22: mod_base = OTHER; note = 2'-O-methylcytidine-3'- phosphorothioate
  modified_base 23: mod_base = OTHER; note = 2'-O-methyladenosine-3'-phosphate
tatatttccaggatgaaagtcca

SEQ ID NO: 346 - RNA, 23 nt, synthetic construct
  misc_feature 1..23: note = Description of Artificial Sequence: Synthetic oligonucleotide
  source 1..23: mol_type = other RNA
  modified_base 1: mod_base = OTHER; note = 2'-O-methyluridine-3'-phosphorothioate
  modified_base 2: mod_base = OTHER; note = 2'-fluoroadenosine-3'-phosphorothioate
  modified_base 3: mod_base = OTHER; note = 2'-O-methyluridine-3'-phosphate
  modified_base 4: mod_base = OTHER; note = 2'-fluoroadenosine-3'-phosphate
  modified_base 5: mod_base = OTHER; note = 2'-O-methyluridine-3'-phosphate
  modified_base 6: mod_base = OTHER; note = 2'-fluorouridine-3'-phosphate
  modified_base 7: mod_base = OTHER; note = 2'-O-methyluridine-3'-phosphate
  modified_base 8: mod_base = OTHER; note = 2'-fluorocytidine-3'-phosphate
  modified_base 9: mod_base = OTHER; note = 2'-O-methylcytidine-3'-phosphate
  modified_base 10: mod_base = OTHER; note = 2'-fluoroadenosine-3'-phosphate
  modified_base 11: mod_base = OTHER; note = 2'-O-methylguanosine-3'-phosphate
  modified_base 12: mod_base = OTHER; note = 2'-O-methylguanosine-3'-phosphate
  modified_base 13: mod_base = OTHER; note = 2'-O-methyladenosine-3'-phosphate
  modified_base 14: mod_base = OTHER; note = 2'-fluorouridine-3'-phosphate
  modified_base 15: mod_base = OTHER; note = 2'-O-methylguanosine-3'-phosphate
  modified_base 16: mod_base = OTHER; note = 2'-fluoroadenosine-3'-phosphate
  modified_base 17: mod_base = OTHER; note = 2'-O-methyladenosine-3'-phosphate
  modified_base 18: mod_base = OTHER; note = 2'-fluoroadenosine-3'-phosphate
  modified_base 19: mod_base = OTHER; note = 2'-O-methylguanosine-3'-phosphate
  modified_base 20: mod_base = OTHER; note = 2'-fluorouridine-3'-phosphate
  modified_base 21: mod_base = OTHER; note = 2'-O-methylcytidine-3'- phosphorothioate
  modified_base 22: mod_base = OTHER; note = 2'-O-methylcytidine-3'- phosphorothioate
  modified_base 23: mod_base = OTHER; note = 2'-O-methyladenosine-3'-phosphate
tatatttccaggatgaaagtcca

SEQ ID NO: 347 - DNA, 23 bp, synthetic construct
  misc_feature 1..23: note = Description of Artificial Sequence: Synthetic oligonucleotide
  source 1..23: mol_type = other DNA
  modified_base 1: mod_base = OTHER; note = 2'-O-methyluridine-3'-phosphorothioate
  modified_base 2: mod_base = OTHER; note = 2'-deoxyadenosine-3'-phosphorothioate
  modified_base 3: mod_base = OTHER; note = 2'-O-methyluridine-3'-phosphate
  modified_base 4: mod_base = OTHER; note = 2'-O-methyladenosine-3'-phosphate
  modified_base 5: mod_base = OTHER; note = 2'-O-methyluridine-3'-phosphate
  modified_base 6: mod_base = OTHER; note = 2'-O-methyluridine-3'-phosphate
  modified_base 7: mod_base = OTHER; note = 2'-O-methyluridine-3'-phosphate
  modified_base 8: mod_base = OTHER; note = 2'-O-methylcytidine-3'-phosphate
  modified_base 9: mod_base = OTHER; note = 2'-O-methylcytidine-3'-phosphate
  modified_base 11: mod_base = OTHER; note = 2'-O-methylguanosine-3'-phosphate
  modified_base 12: mod_base = OTHER; note = 2'-O-methylguanosine-3'-phosphate
  modified_base 13: mod_base = OTHER; note = 2'-O-methyladenosine-3'-phosphate
  modified_base 15: mod_base = OTHER; note = 2'-O-methylguanosine-3'-phosphate
  modified_base 16: mod_base = OTHER; note = 2'-O-methyladenosine-3'-phosphate
  modified_base 17: mod_base = OTHER; note = 2'-O-methyladenosine-3'-phosphate
  modified_base 18: mod_base = OTHER; note = 2'-O-methyladenosine-3'-phosphate
  modified_base 19: mod_base = OTHER; note = 2'-O-methylguanosine-3'-phosphate
  modified_base 20: mod_base = OTHER; note = 2'-O-methyluridine-3'-phosphate
  modified_base 21: mod_base = OTHER; note = 2'-O-methylcytidine-3'- phosphorothioate
  modified_base 22: mod_base = OTHER; note = 2'-O-methylcytidine-3'- phosphorothioate
  modified_base 23: mod_base = OTHER; note = 2'-O-methyladenosine-3'-phosphate
  misc_feature 1: note = RNA
  misc_feature 2: note = DNA
  misc_feature 3..9: note = RNA
  misc_feature 10: note = DNA
  misc_feature 11..13: note = RNA
  misc_feature 14: note = DNA
  misc_feature 15..23: note = RNA
tatatttccaggatgaaagtcca

SEQ ID NO: 348 - DNA, 23 bp, synthetic construct
  misc_feature 1..23: note = Description of Artificial Sequence: Synthetic oligonucleotide
  source 1..23: mol_type = other DNA
  modified_base 1: mod_base = OTHER; note = 2'-O-methyluridine-3'-phosphorothioate
  modified_base 2: mod_base = OTHER; note = 2'-deoxyadenosine-3'-phosphorothioate
  modified_base 3: mod_base = OTHER; note = 2'-O-methyluridine-3'-phosphate
  modified_base 4: mod_base = OTHER; note = 2'-O-methyladenosine-3'-phosphate
  modified_base 5: mod_base = OTHER; note = 2'-O-methyluridine-3'-phosphate
  modified_base 6: mod_base = OTHER; note = 2'-O-methyluridine-3'-phosphate
  modified_base 7: mod_base = OTHER; note = 2'-O-methyluridine-3'-phosphate
  modified_base 8: mod_base = OTHER; note = 2'-O-methylcytidine-3'-phosphate
  modified_base 9: mod_base = OTHER; note = 2'-O-methylcytidine-3'-phosphate
  modified_base 10: mod_base = OTHER; note = 2'-O-methyladenosine-3'-phosphate
  modified_base 11: mod_base = OTHER; note = 2'-O-methylguanosine-3'-phosphate
  modified_base 12: mod_base = OTHER; note = 2'-O-methylguanosine-3'-phosphate
  modified_base 13: mod_base = OTHER; note = 2'-O-methyladenosine-3'-phosphate
  modified_base 15: mod_base = OTHER; note = 2'-O-methylguanosine-3'-phosphate
  modified_base 16: mod_base = OTHER; note = 2'-O-methyladenosine-3'-phosphate
  modified_base 17: mod_base = OTHER; note = 2'-O-methyladenosine-3'-phosphate
  modified_base 18: mod_base = OTHER; note = 2'-O-methyladenosine-3'-phosphate
  modified_base 19: mod_base = OTHER; note = 2'-O-methylguanosine-3'-phosphate
  modified_base 20: mod_base = OTHER; note = 2'-O-methyluridine-3'-phosphate
  modified_base 21: mod_base = OTHER; note = 2'-O-methylcytidine-3'- phosphorothioate
  modified_base 22: mod_base = OTHER; note = 2'-O-methylcytidine-3'- phosphorothioate
  modified_base 23: mod_base = OTHER; note = 2'-O-methyladenosine-3'-phosphate
  misc_feature 1: note = RNA
  misc_feature 2: note = DNA
  misc_feature 3..13: note = RNA
  misc_feature 14: note = DNA
  misc_feature 15..23: note = RNA
tatatttccaggatgaaagtcca

SEQ ID NO: 349 - DNA, 23 bp, synthetic construct
  misc_feature 1..23: note = Description of Artificial Sequence: Synthetic oligonucleotide
  source 1..23: mol_type = other DNA
  modified_base 1: mod_base = OTHER; note = 2'-O-methyluridine-3'-phosphorothioate
  modified_base 2: mod_base = OTHER; note = adenosine-3'-phosphorothioate
  modified_base 3: mod_base = OTHER; note = 2'-O-methyluridine-3'-phosphate
  modified_base 4: mod_base = OTHER; note = 2'-O-methyladenosine-3'-phosphate
  modified_base 5: mod_base = OTHER; note = 2'-O-methyluridine-3'-phosphate
  modified_base 6: mod_base = OTHER; note = 2'-O-methyluridine-3'-phosphate
  modified_base 7: mod_base = OTHER; note = 2'-O-methyluridine-3'-phosphate
  modified_base 8: mod_base = OTHER; note = 2'-O-methylcytidine-3'-phosphate
  modified_base 9: mod_base = OTHER; note = 2'-O-methylcytidine-3'-phosphate
  modified_base 10: mod_base = OTHER; note = 2'-O-methyladenosine-3'-phosphate
  modified_base 11: mod_base = OTHER; note = 2'-O-methylguanosine-3'-phosphate
  modified_base 12: mod_base = OTHER; note = 2'-O-methylguanosine-3'-phosphate
  modified_base 13: mod_base = OTHER; note = 2'-O-methyladenosine-3'-phosphate
  modified_base 15: mod_base = OTHER; note = 2'-O-methylguanosine-3'-phosphate
  modified_base 16: mod_base = OTHER; note = 2'-O-methyladenosine-3'-phosphate
  modified_base 17: mod_base = OTHER; note = 2'-O-methyladenosine-3'-phosphate
  modified_base 18: mod_base = OTHER; note = 2'-O-methyladenosine-3'-phosphate
  modified_base 19: mod_base = OTHER; note = 2'-O-methylguanosine-3'-phosphate
  modified_base 20: mod_base = OTHER; note = 2'-O-methyluridine-3'-phosphate
  modified_base 21: mod_base = OTHER; note = 2'-O-methylcytidine-3'- phosphorothioate
  modified_base 22: mod_base = OTHER; note = 2'-O-methylcytidine-3'- phosphorothioate
  modified_base 23: mod_base = OTHER; note = 2'-O-methyladenosine-3'-phosphate
  misc_feature 1..13: note = RNA
  misc_feature 14: note = DNA
  misc_feature 15..23: note = RNA
tatatttccaggatgaaagtcca

SEQ ID NO: 350 - DNA, 23 bp, synthetic construct
  misc_feature 1..23: note = Description of Artificial Sequence: Synthetic oligonucleotide
  source 1..23: mol_type = other DNA
  modified_base 1: mod_base = OTHER; note = 2'-O-methyluridine-3'-phosphorothioate
  modified_base 2: mod_base = OTHER; note = 2'-deoxyadenosine-3'-phosphorothioate
  modified_base 3: mod_base = OTHER; note = 2'-O-methyluridine-3'-phosphate
  modified_base 4: mod_base = OTHER; note = 2'-O-methyladenosine-3'-phosphate
  modified_base 5: mod_base = OTHER; note = 2'-O-methyluridine-3'-phosphate
  modified_base 7: mod_base = OTHER; note = 2'-O-methyluridine-3'-phosphate
  modified_base 8: mod_base = OTHER; note = 2'-O-methylcytidine-3'-phosphate
  modified_base 9: mod_base = OTHER; note = 2'-O-methylcytidine-3'-phosphate
  modified_base 10: mod_base = OTHER; note = 2'-O-methyladenosine-3'-phosphate
  modified_base 11: mod_base = OTHER; note = 2'-O-methylguanosine-3'-phosphate
  modified_base 12: mod_base = OTHER; note = 2'-O-methylguanosine-3'-phosphate
  modified_base 13: mod_base = OTHER; note = 2'-O-methyladenosine-3'-phosphate
  modified_base 15: mod_base = OTHER; note = 2'-O-methylguanosine-3'-phosphate
  modified_base 16: mod_base = OTHER; note = 2'-O-methyladenosine-3'-phosphate
  modified_base 17: mod_base = OTHER; note = 2'-O-methyladenosine-3'-phosphate
  modified_base 18: mod_base = OTHER; note = 2'-O-methyladenosine-3'-phosphate
  modified_base 19: mod_base = OTHER; note = 2'-O-methylguanosine-3'-phosphate
  modified_base 20: mod_base = OTHER; note = 2'-O-methyluridine-3'-phosphate
  modified_base 21: mod_base = OTHER; note = 2'-O-methylcytidine-3'- phosphorothioate
  modified_base 22: mod_base = OTHER; note = 2'-O-methylcytidine-3'- phosphorothioate
  modified_base 23: mod_base = OTHER; note = 2'-O-methyladenosine-3'-phosphate
  misc_feature 1: note = RNA
  misc_feature 2: note = DNA
  misc_feature 3..5: note = RNA
  misc_feature 6: note = DNA
  misc_feature 7..13: note = RNA
  misc_feature 14: note = DNA
  misc_feature 15..23: note = RNA
tatatttccaggatgaaagtcca

SEQ ID NO: 351 - DNA, 23 bp, synthetic construct
  misc_feature 1..23: note = Description of Artificial Sequence: Synthetic oligonucleotide
  source 1..23: mol_type = other DNA
  modified_base 1: mod_base = OTHER; note = 2'-O-methyluridine-3'-phosphorothioate
  modified_base 2: mod_base = OTHER; note = adenosine-3'-phosphorothioate
  modified_base 3: mod_base = OTHER; note = 2'-O-methyluridine-3'-phosphate
  modified_base 4: mod_base = OTHER; note = 2'-O-methyladenosine-3'-phosphate
  modified_base 5: mod_base = OTHER; note = 2'-O-methyluridine-3'-phosphate
  modified_base 7: mod_base = OTHER; note = 2'-O-methyluridine-3'-phosphate
  modified_base 8: mod_base = OTHER; note = 2'-O-methylcytidine-3'-phosphate
  modified_base 9: mod_base = OTHER; note = 2'-O-methylcytidine-3'-phosphate
  modified_base 10: mod_base = OTHER; note = 2'-O-methyladenosine-3'-phosphate
  modified_base 11: mod_base = OTHER; note = 2'-O-methylguanosine-3'-phosphate
  modified_base 12: mod_base = OTHER; note = 2'-O-methylguanosine-3'-phosphate
  modified_base 13: mod_base = OTHER; note = 2'-O-methyladenosine-3'-phosphate
  modified_base 15: mod_base = OTHER; note = 2'-O-methylguanosine-3'-phosphate
  modified_base 16: mod_base = OTHER; note = 2'-O-methyladenosine-3'-phosphate
  modified_base 17: mod_base = OTHER; note = 2'-O-methyladenosine-3'-phosphate
  modified_base 18: mod_base = OTHER; note = 2'-O-methyladenosine-3'-phosphate
  modified_base 19: mod_base = OTHER; note = 2'-O-methylguanosine-3'-phosphate
  modified_base 20: mod_base = OTHER; note = 2'-O-methyluridine-3'-phosphate
  modified_base 21: mod_base = OTHER; note = 2'-O-methylcytidine-3'- phosphorothioate
  modified_base 22: mod_base = OTHER; note = 2'-O-methylcytidine-3'- phosphorothioate
  modified_base 23: mod_base = OTHER; note = 2'-O-methyladenosine-3'-phosphate
  misc_feature 1..5: note = RNA
  misc_feature 6: note = DNA
  misc_feature 7..13: note = RNA
  misc_feature 14: note = DNA
  misc_feature 15..23: note = RNA
tatatttccaggatgaaagtcca

SEQ ID NO: 352 - DNA, 23 bp, synthetic construct
  misc_feature 1..23: note = Description of Artificial Sequence: Synthetic oligonucleotide
  source 1..23: mol_type = other DNA
  modified_base 1: mod_base = OTHER; note = 2'-O-methyluridine-3'-phosphorothioate
  modified_base 2: mod_base = OTHER; note = 2'-deoxyadenosine-3'-phosphorothioate
  modified_base 3: mod_base = OTHER; note = 2'-O-methyluridine-3'-phosphate
  modified_base 4: mod_base = OTHER; note = 2'-O-methyladenosine-3'-phosphate
  modified_base 5: mod_base = OTHER; note = 2'-O-methyluridine-3'-phosphate
  modified_base 6: mod_base = OTHER; note = 2'-O-methyluridine-3'-phosphate
  modified_base 7: mod_base = OTHER; note = 2'-O-methyluridine-3'-phosphate
  modified_base 8: mod_base = OTHER; note = 2'-O-methylcytidine-3'-phosphate
  modified_base 9: mod_base = OTHER; note = 2'-O-methylcytidine-3'-phosphate
  modified_base 10: mod_base = OTHER; note = 2'-O-methyladenosine-3'-phosphate
  modified_base 11: mod_base = OTHER; note = 2'-O-methylguanosine-3'-phosphate
  modified_base 12: mod_base = OTHER; note = 2'-O-methylguanosine-3'-phosphate
  modified_base 13: mod_base = OTHER; note = 2'-O-methyladenosine-3'-phosphate
  modified_base 15: mod_base = OTHER; note = 2'-O-methylguanosine-3'-phosphate
  modified_base 17: mod_base = OTHER; note = 2'-O-methyladenosine-3'-phosphate
  modified_base 18: mod_base = OTHER; note = 2'-O-methyladenosine-3'-phosphate
  modified_base 19: mod_base = OTHER; note = 2'-O-methylguanosine-3'-phosphate
  modified_base 20: mod_base = OTHER; note = 2'-O-methyluridine-3'-phosphate
  modified_base 21: mod_base = OTHER; note = 2'-O-methylcytidine-3'- phosphorothioate
  modified_base 22: mod_base = OTHER; note = 2'-O-methylcytidine-3'- phosphorothioate
  modified_base 23: mod_base = OTHER; note = 2'-O-methyladenosine-3'-phosphate
  misc_feature 1: note = RNA
  misc_feature 2: note = DNA
  misc_feature 3..13: note = RNA
  misc_feature 14: note = DNA
  misc_feature 15: note = RNA
  misc_feature 16: note = DNA
  misc_feature 17..23: note = RNA
tatatttccaggatgaaagtcca

SEQ ID NO: 353 - DNA, 23 bp, synthetic construct
  misc_feature 1..23: note = Description of Artificial Sequence: Synthetic oligonucleotide
  source 1..23: mol_type = other DNA
  modified_base 1: mod_base = OTHER; note = 2'-O-methyluridine-3'-phosphorothioate
  modified_base 2: mod_base = OTHER; note = 2'-deoxyadenosine-3'-phosphorothioate
  modified_base 3: mod_base = OTHER; note = 2'-O-methyluridine-3'-phosphate
  modified_base 4: mod_base = OTHER; note = 2'-O-methyladenosine-3'-phosphate
  modified_base 5: mod_base = OTHER; note = 2'-O-methyluridine-3'-phosphate
  modified_base 7: mod_base = OTHER; note = 2'-O-methyluridine-3'-phosphate
  modified_base 8: mod_base = OTHER; note = 2'-O-methylcytidine-3'-phosphate
  modified_base 9: mod_base = OTHER; note = 2'-O-methylcytidine-3'-phosphate
  modified_base 10: mod_base = OTHER; note = 2'-O-methyladenosine-3'-phosphate
  modified_base 11: mod_base = OTHER; note = 2'-O-methylguanosine-3'-phosphate
  modified_base 12: mod_base = OTHER; note = 2'-O-methylguanosine-3'-phosphate
  modified_base 13: mod_base = OTHER; note = 2'-O-methyladenosine-3'-phosphate
  modified_base 15: mod_base = OTHER; note = 2'-O-methylguanosine-3'-phosphate
  modified_base 17: mod_base = OTHER; note = 2'-O-methyladenosine-3'-phosphate
  modified_base 18: mod_base = OTHER; note = 2'-O-methyladenosine-3'-phosphate
  modified_base 19: mod_base = OTHER; note = 2'-O-methylguanosine-3'-phosphate
  modified_base 20: mod_base = OTHER; note = 2'-O-methyluridine-3'-phosphate
  modified_base 21: mod_base = OTHER; note = 2'-O-methylcytidine-3'- phosphorothioate
  modified_base 22: mod_base = OTHER; note = 2'-O-methylcytidine-3'- phosphorothioate
  modified_base 23: mod_base = OTHER; note = 2'-O-methyladenosine-3'-phosphate
  misc_feature 1: note = RNA
  misc_feature 2: note = DNA
  misc_feature 3..5: note = RNA
  misc_feature 6: note = DNA
  misc_feature 7..13: note = RNA
  misc_feature 14: note = DNA
  misc_feature 15: note = RNA
  misc_feature 16: note = DNA
  misc_feature 17..23: note = RNA
tatatttccaggatgaaagtcca

SEQ ID NO: 354 - DNA, 23 bp, synthetic construct
  misc_feature 1..23: note = Description of Artificial Sequence: Synthetic oligonucleotide
  source 1..23: mol_type = other DNA
  modified_base 1: mod_base = OTHER; note = 2'-O-methyluridine-3'-phosphorothioate
  modified_base 2: mod_base = OTHER; note = 2'-deoxyadenosine-3'-phosphorothioate
  modified_base 3: mod_base = OTHER; note = 2'-O-methyluridine-3'-phosphate
  modified_base 4: mod_base = OTHER; note = 2'-O-methyladenosine-3'-phosphate
  modified_base 5: mod_base = OTHER; note = 2'-O-methyluridine-3'-phosphate
  modified_base 6: mod_base = OTHER; note = 2'-O-methyluridine-3'-phosphate
  modified_base 7: mod_base = OTHER; note = 2'-O-methyluridine-3'-phosphate
  modified_base 8: mod_base = OTHER; note = 2'-O-methylcytidine-3'-phosphate
  modified_base 9: mod_base = OTHER; note = 2'-O-methylcytidine-3'-phosphate
  modified_base 11: mod_base = OTHER; note = 2'-O-methylguanosine-3'-phosphate
  modified_base 12: mod_base = OTHER; note = 2'-O-methylguanosine-3'-phosphate
  modified_base 13: mod_base = OTHER; note = 2'-O-methyladenosine-3'-phosphate
  modified_base 15: mod_base = OTHER; note = 2'-O-methylguanosine-3'-phosphate
  modified_base 16: mod_base = OTHER; note = 2'-O-methyladenosine-3'-phosphate
  modified_base 17: mod_base = OTHER; note = 2'-O-methyladenosine-3'-phosphate
  modified_base 18: mod_base = OTHER; note = 2'-O-methyladenosine-3'-phosphate
  modified_base 19: mod_base = OTHER; note = 2'-O-methylguanosine-3'-phosphate
  modified_base 20: mod_base = OTHER; note = 2'-O-methyluridine-3'-phosphate
  modified_base 21: mod_base = OTHER; note = 2'-O-methylcytidine-3'- phosphorothioate
  modified_base 22: mod_base = OTHER; note = 2'-O-methylcytidine-3'- phosphorothioate
  modified_base 23: mod_base = OTHER; note = 2'-O-methyladenosine-3'-phosphate
  misc_feature 1: note = RNA
  misc_feature 2: note = DNA
  misc_feature 3..9: note = RNA
  misc_feature 10: note = DNA
  misc_feature 11..13: note = RNA
  misc_feature 14: note = DNA
  misc_feature 15..23: note = RNA
tatatttccaggatgaaagtcca

SEQ ID NO: 355 - RNA, 23 nt, synthetic construct
  misc_feature 1..23: note = Description of Artificial Sequence: Synthetic oligonucleotide
  source 1..23: mol_type = other RNA
  modified_base 1: mod_base = OTHER; note = 2'-O-methyluridine-3'-phosphorothioate
  modified_base 2: mod_base = OTHER; note = 2'-fluoroguanosine-3'-phosphorothioate
  modified_base 3: mod_base = OTHER; note = 2'-O-methyladenosine-3'-phosphate
  modified_base 4: mod_base = OTHER; note = 2'-O-methylcytidine-3'-phosphate
  modified_base 5: mod_base = OTHER; note = 2'-O-methyladenosine-3'-phosphate
  modified_base 6: mod_base = OTHER; note = 2'-fluorouridine-3'-phosphate
  modified_base 7: mod_base = OTHER; note = 2'-O-methylcytidine-3'-phosphate
  modified_base 8: mod_base = OTHER; note = 2'-fluorouridine-3'-phosphate
  modified_base 9: mod_base = OTHER; note = 2'-fluorouridine-3'-phosphate
  modified_base 10: mod_base = OTHER; note = 2'-O-methylguanosine-3'-phosphate
  modified_base 11: mod_base = OTHER; note = 2'-O-methyladenosine-3'-phosphate
  modified_base 12: mod_base = OTHER; note = 2'-O-methyladenosine-3'-phosphate
  modified_base 13: mod_base = OTHER; note = 2'-O-methylcytidine-3'-phosphate
  modified_base 14: mod_base = OTHER; note = 2'-fluoroadenosine-3'-phosphate
  modified_base 15: mod_base = OTHER; note = 2'-O-methylcytidine-3'-phosphate
  modified_base 16: mod_base = OTHER; note = 2'-fluorocytidine-3'-phosphate
  modified_base 17: mod_base = OTHER; note = 2'-O-methyluridine-3'-phosphate
  modified_base 18: mod_base = OTHER; note = 2'-O-methyluridine-3'-phosphate
  modified_base 19: mod_base = OTHER; note = 2'-O-methyluridine-3'-phosphate
  modified_base 20: mod_base = OTHER; note = 2'-O-methylcytidine-3'-phosphate
  modified_base 21: mod_base = OTHER; note = 2'-O-methyluridine-3'-phosphorothioate
  modified_base 22: mod_base = OTHER; note = 2'-O-methylcytidine-3'- phosphorothioate
  modified_base 23: mod_base = OTHER; note = 2'-O-methylcytidine-3'-phosphate
tgacatcttgaacacctttctcc

SEQ ID NO: 356 - RNA, 23 nt, synthetic construct
  misc_feature 1..23: note = Description of Artificial Sequence: Synthetic oligonucleotide
  source 1..23: mol_type = other RNA
  modified_base 1: mod_base = OTHER; note = 2'-O-methyladenosine-3'- phosphorothioate
  modified_base 2: mod_base = OTHER; note = 2'-fluoroguanosine-3'-phosphorothioate
  modified_base 3: mod_base = OTHER; note = 2'-O-methyluridine-3'-phosphate
  modified_base 4: mod_base = OTHER; note = 2'-O-methyluridine-3'-phosphate
  modified_base 5: mod_base = OTHER; note = 2'-O-methyladenosine-3'-phosphate
  modified_base 6: mod_base = OTHER; note = 2'-fluoroadenosine-3'-phosphate
  modified_base 7: mod_base = OTHER; note = 2'-O-methyluridine-3'-phosphate
  modified_base 8: mod_base = OTHER; note = 2'-fluoroadenosine-3'-phosphate
  modified_base 9: mod_base = OTHER; note = 2'-fluorouridine-3'-phosphate
  modified_base 10: mod_base = OTHER; note = 2'-O-methyladenosine-3'-phosphate
  modified_base 11: mod_base = OTHER; note = 2'-O-methyluridine-3'-phosphate
  modified_base 12: mod_base = OTHER; note = 2'-O-methyluridine-3'-phosphate
  modified_base 13: mod_base = OTHER; note = 2'-O-methyluridine-3'-phosphate
  modified_base 14: mod_base = OTHER; note = 2'-fluorocytidine-3'-phosphate
  modified_base 15: mod_base = OTHER; note = 2'-O-methylcytidine-3'-phosphate
  modified_base 16: mod_base = OTHER; note = 2'-fluoroadenosine-3'-phosphate
  modified_base 17: mod_base = OTHER; note = 2'-O-methylguanosine-3'-phosphate
  modified_base 18: mod_base = OTHER; note = 2'-O-methylguanosine-3'-phosphate
  modified_base 19: mod_base = OTHER; note = 2'-O-methyladenosine-3'-phosphate
  modified_base 20: mod_base = OTHER; note = 2'-O-methyluridine-3'-phosphate
  modified_base 21: mod_base = OTHER; note = 2'-O-methylguanosine-3'- phosphorothioate
  modified_base 22: mod_base = OTHER; note = 2'-O-methyladenosine-3'- phosphorothioate
  modified_base 23: mod_base = OTHER; note = 2'-O-methyladenosine-3'-phosphate
agttaatatatttccaggatgaa

SEQ ID NO: 357 - RNA, 23 nt, synthetic construct
  misc_feature 1..23: note = Description of Artificial Sequence: Synthetic oligonucleotide
  source 1..23: mol_type = other RNA
  modified_base 1: mod_base = OTHER; note = 2'-O-methyluridine-3'-phosphorothioate
  modified_base 2: mod_base = OTHER; note = 2'-fluorouridine -3'-phosphorothioate
  modified_base 3: mod_base = OTHER; note = 2'-O-methylguanosine-3'-phosphate
  modified_base 4: mod_base = OTHER; note = 2'-O-methyluridine-3'-phosphate
  modified_base 5: mod_base = OTHER; note = 2'-O-methylcytidine-3'-phosphate
  modified_base 6: mod_base = OTHER; note = 2'-fluoroguanosine-3'-phosphate
  modified_base 7: mod_base = OTHER; note = 2'-O-methyladenosine-3'-phosphate
  modified_base 8: mod_base = OTHER; note = 2'-fluorouridine-3'-phosphate
  modified_base 9: mod_base = OTHER; note = 2'-fluoroguanosine-3'-phosphate
  modified_base 10: mod_base = OTHER; note = 2'-O-methyladenosine-3'-phosphate
  modified_base 11: mod_base = OTHER; note = 2'-O-methylcytidine-3'-phosphate
  modified_base 12: mod_base = OTHER; note = 2'-O-methyluridine-3'-phosphate
  modified_base 13: mod_base = OTHER; note = 2'-O-methyluridine-3'-phosphate
  modified_base 14: mod_base = OTHER; note = 2'-fluorouridine-3'-phosphate
  modified_base 15: mod_base = OTHER; note = 2'-O-methylcytidine-3'-phosphate
  modified_base 16: mod_base = OTHER; note = 2'-fluoroadenosine-3'-phosphate
  modified_base 17: mod_base = OTHER; note = 2'-O-methylcytidine-3'-phosphate
  modified_base 18: mod_base = OTHER; note = 2'-O-methyladenosine-3'-phosphate
  modified_base 19: mod_base = OTHER; note = 2'-O-methyluridine-3'-phosphate
  modified_base 20: mod_base = OTHER; note = 2'-O-methyluridine-3'-phosphate
  modified_base 21: mod_base = OTHER; note = 2'-O-methylcytidine-3'- phosphorothioate
  modified_base 22: mod_base = OTHER; note = 2'-O-methyluridine-3'-phosphorothioate
  modified_base 23: mod_base = OTHER; note = 2'-O-methylguanosine-3'-phosphate
ttgtcgatgactttcacattctg

SEQ ID NO: 358 - RNA, 23 nt, synthetic construct
  misc_feature 1..23: note = Description of Artificial Sequence: Synthetic oligonucleotide
  source 1..23: mol_type = other RNA
  modified_base 1: mod_base = OTHER; note = 2'-O-methyluridine-3'-phosphorothioate
  modified_base 2: mod_base = OTHER; note = 2'-fluoroadenosine-3'-phosphorothioate
  modified_base 3: mod_base = OTHER; note = 2'-O-methyluridine-3'-phosphate
  modified_base 4: mod_base = OTHER; note = 2'-O-methylguanosine-3'-phosphate
  modified_base 5: mod_base = OTHER; note = 2'-O-methylguanosine-3'-phosphate
  modified_base 6: mod_base = OTHER; note = 2'-fluoroguanosine-3'-phosphate
  modified_base 7: mod_base = OTHER; note = 2'-O-methyladenosine-3'-phosphate
  modified_base 8: mod_base = OTHER; note = 2'-fluoroadenosine-3'-phosphate
  modified_base 9: mod_base = OTHER; note = 2'-fluoroadenosine-3'-phosphate
  modified_base 10: mod_base = OTHER; note = 2'-O-methyladenosine-3'-phosphate
  modified_base 11: mod_base = OTHER; note = 2'-O-methyluridine-3'-phosphate
  modified_base 12: mod_base = OTHER; note = 2'-O-methyladenosine-3'-phosphate
  modified_base 13: mod_base = OTHER; note = 2'-O-methyluridine-3'-phosphate
  modified_base 14: mod_base = OTHER; note = 2'-fluorouridine-3'-phosphate
  modified_base 15: mod_base = OTHER; note = 2'-O-methylguanosine-3'-phosphate
  modified_base 16: mod_base = OTHER; note = 2'-fluorouridine-3'-phosphate
  modified_base 17: mod_base = OTHER; note = 2'-O-methylguanosine-3'-phosphate
  modified_base 18: mod_base = OTHER; note = 2'-O-methylcytidine-3'-phosphate
  modified_base 19: mod_base = OTHER; note = 2'-O-methyladenosine-3'-phosphate
  modified_base 20: mod_base = OTHER; note = 2'-O-methylcytidine-3'-phosphate
  modified_base 21: mod_base = OTHER; note = 2'-O-methyluridine-3'-phosphorothioate
  modified_base 22: mod_base = OTHER; note = 2'-O-methylguanosine-3'- phosphorothioate
  modified_base 23: mod_base = OTHER; note = 2'-O-methyluridine-3'-phosphate
tatgggaaaatattgtgcactgt

SEQ ID NO: 359 - RNA, 23 nt, synthetic construct
  misc_feature 1..23: note = Description of Artificial Sequence: Synthetic oligonucleotide
  source 1..23: mol_type = other RNA
  modified_base 1: mod_base = OTHER; note = 2'-O-methyladenosine-3'- phosphorothioate
  modified_base 2: mod_base = OTHER; note = 2'-fluoroadenosine-3'-phosphorothioate
  modified_base 3: mod_base = OTHER; note = 2'-O-methyluridine-3'-phosphate
  modified_base 4: mod_base = OTHER; note = 2'-O-methylguanosine-3'-phosphate
  modified_base 5: mod_base = OTHER; note = 2'-O-methyluridine-3'-phosphate
  modified_base 6: mod_base = OTHER; note = 2'-fluorocytidine-3'-phosphate
  modified_base 7: mod_base = OTHER; note = 2'-O-methyluridine-3'-phosphate
  modified_base 8: mod_base = OTHER; note = 2'-fluorouridine-3'-phosphate
  modified_base 9: mod_base = OTHER; note = 2'-fluoroguanosine-3'-phosphate
  modified_base 10: mod_base = OTHER; note = 2'-O-methyluridine-3'-phosphate
  modified_base 11: mod_base = OTHER; note = 2'-O-methylcytidine-3'-phosphate
  modified_base 12: mod_base = OTHER; note = 2'-O-methylguanosine-3'-phosphate
  modified_base 13: mod_base = OTHER; note = 2'-O-methyladenosine-3'-phosphate
  modified_base 14: mod_base = OTHER; note = 2'-fluorouridine-3'-phosphate
  modified_base 15: mod_base = OTHER; note = 2'-O-methylguanosine-3'-phosphate
  modified_base 16: mod_base = OTHER; note = 2'-fluoroadenosine-3'-phosphate
  modified_base 17: mod_base = OTHER; note = 2'-O-methylcytidine-3'-phosphate
  modified_base 18: mod_base = OTHER; note = 2'-O-methyluridine-3'-phosphate
  modified_base 19: mod_base = OTHER; note = 2'-O-methyluridine-3'-phosphate
  modified_base 20: mod_base = OTHER; note = 2'-O-methyluridine-3'-phosphate
  modified_base 21: mod_base = OTHER; note = 2'-O-methylcytidine-3'- phosphorothioate
  modified_base 22: mod_base = OTHER; note = 2'-O-methyladenosine-3'- phosphorothioate
  modified_base 23: mod_base = OTHER; note = 2'-O-methylcytidine-3'-phosphate
aatgtcttgtcgatgactttcac

SEQ ID NO: 360 - RNA, 23 nt, synthetic construct
  misc_feature 1..23: note = Description of Artificial Sequence: Synthetic oligonucleotide
  source 1..23: mol_type = other RNA
  modified_base 1: mod_base = OTHER; note = 2'-O-methyluridine-3'-phosphorothioate
  modified_base 2: mod_base = OTHER; note = 2'-fluorouridine -3'-phosphorothioate
  modified_base 3: mod_base = OTHER; note = 2'-O-methyluridine-3'-phosphate
  modified_base 4: mod_base = OTHER; note = 2'-O-methylguanosine-3'-phosphate
  modified_base 5: mod_base = OTHER; note = 2'-O-methyluridine-3'-phosphate
  modified_base 6: mod_base = OTHER; note = 2'-fluorocytidine-3'-phosphate
  modified_base 7: mod_base = OTHER; note = 2'-O-methylguanosine-3'-phosphate
  modified_base 8: mod_base = OTHER; note = 2'-fluoroadenosine-3'-phosphate
  modified_base 9: mod_base = OTHER; note = 2'-fluorouridine-3'-phosphate
  modified_base 10: mod_base = OTHER; note = 2'-O-methylguanosine-3'-phosphate
  modified_base 11: mod_base = OTHER; note = 2'-O-methyladenosine-3'-phosphate
  modified_base 12: mod_base = OTHER; note = 2'-O-methylcytidine-3'-phosphate
  modified_base 13: mod_base = OTHER; note = 2'-O-methyluridine-3'-phosphate
  modified_base 14: mod_base = OTHER; note = 2'-fluorouridine-3'-phosphate
  modified_base 15: mod_base = OTHER; note = 2'-O-methyluridine-3'-phosphate
  modified_base 16: mod_base = OTHER; note = 2'-fluorocytidine-3'-phosphate
  modified_base 17: mod_base = OTHER; note = 2'-O-methyladenosine-3'-phosphate
  modified_base 18: mod_base = OTHER; note = 2'-O-methylcytidine-3'-phosphate
  modified_base 19: mod_base = OTHER; note = 2'-O-methyladenosine-3'-phosphate
  modified_base 20: mod_base = OTHER; note = 2'-O-methyluridine-3'-phosphate
  modified_base 21: mod_base = OTHER; note = 2'-O-methyluridine-3'-phosphorothioate
  modified_base 22: mod_base = OTHER; note = 2'-O-methylcytidine-3'- phosphorothioate
  modified_base 23: mod_base = OTHER; note = 2'-O-methyluridine-3'-phosphate
tttgtcgatgactttcacattct

SEQ ID NO: 361 - RNA, 23 nt, synthetic construct
  misc_feature 1..23: note = Description of Artificial Sequence: Synthetic oligonucleotide
  source 1..23: mol_type = other RNA
  modified_base 1: mod_base = OTHER; note = 2'-O-methyluridine-3'-phosphorothioate
  modified_base 2: mod_base = OTHER; note = 2'-fluoroadenosine-3'-phosphorothioate
  modified_base 3: mod_base = OTHER; note = 2'-O-methyladenosine-3'-phosphate
  modified_base 4: mod_base = OTHER; note = 2'-O-methylcytidine-3'-phosphate
  modified_base 5: mod_base = OTHER; note = 2'-O-methyladenosine-3'-phosphate
  modified_base 6: mod_base = OTHER; note = 2'-fluoroguanosine-3'-phosphate
  modified_base 7: mod_base = OTHER; note = 2'-O-methyluridine-3'-phosphate
  modified_base 8: mod_base = OTHER; note = 2'-fluorouridine-3'-phosphate
  modified_base 9: mod_base = OTHER; note = 2'-fluoroadenosine-3'-phosphate
  modified_base 10: mod_base = OTHER; note = 2'-O-methyladenosine-3'-phosphate
  modified_base 11: mod_base = OTHER; note = 2'-O-methyluridine-3'-phosphate
  modified_base 12: mod_base = OTHER; note = 2'-O-methyladenosine-3'-phosphate
  modified_base 13: mod_base = OTHER; note = 2'-O-methyluridine-3'-phosphate
  modified_base 14: mod_base = OTHER; note = 2'-fluoroadenosine-3'-phosphate
  modified_base 15: mod_base = OTHER; note = 2'-O-methyluridine-3'-phosphate
  modified_base 16: mod_base = OTHER; note = 2'-fluorouridine-3'-phosphate
  modified_base 17: mod_base = OTHER; note = 2'-O-methyluridine-3'-phosphate
  modified_base 18: mod_base = OTHER; note = 2'-O-methylcytidine-3'-phosphate
  modified_base 19: mod_base = OTHER; note = 2'-O-methylcytidine-3'-phosphate
  modified_base 20: mod_base = OTHER; note = 2'-O-methyladenosine-3'-phosphate
  modified_base 21: mod_base = OTHER; note = 2'-O-methylguanosine-3'- phosphorothioate
  modified_base 22: mod_base = OTHER; note = 2'-O-methylguanosine-3'- phosphorothioate
  modified_base 23: mod_base = OTHER; note = 2'-O-methyladenosine-3'-phosphate
taacagttaatatatttccagga

SEQ ID NO: 362 - RNA, 23 nt, synthetic construct
  misc_feature 1..23: note = Description of Artificial Sequence: Synthetic oligonucleotide
  source 1..23: mol_type = other RNA
  modified_base 1: mod_base = OTHER; note = 2'-O-methyladenosine-3'- phosphorothioate
  modified_base 2: mod_base = OTHER; note = 2'-fluoroadenosine-3'-phosphorothioate
  modified_base 3: mod_base = OTHER; note = 2'-O-methyladenosine-3'-phosphate
  modified_base 4: mod_base = OTHER; note = 2'-O-methyluridine-3'-phosphate
  modified_base 5: mod_base = OTHER; note = 2'-O-methyladenosine-3'-phosphate
  modified_base 6: mod_base = OTHER; note = 2'-fluoroadenosine-3'-phosphate
  modified_base 7: mod_base = OTHER; note = 2'-O-methyluridine-3'-phosphate
  modified_base 8: mod_base = OTHER; note = 2'-fluoroadenosine-3'-phosphate
  modified_base 9: mod_base = OTHER; note = 2'-fluorocytidine-3'-phosphate
  modified_base 10: mod_base = OTHER; note = 2'-O-methyladenosine-3'-phosphate
  modified_base 11: mod_base = OTHER; note = 2'-O-methylguanosine-3'-phosphate
  modified_base 12: mod_base = OTHER; note = 2'-O-methyladenosine-3'-phosphate
  modified_base 13: mod_base = OTHER; note = 2'-O-methyluridine-3'-phosphate
  modified_base 14: mod_base = OTHER; note = 2'-fluoroguanosine-3'-phosphate
  modified_base 15: mod_base = OTHER; note = 2'-O-methylguanosine-3'-phosphate
  modified_base 16: mod_base = OTHER; note = 2'-fluoroguanosine-3'-phosphate
  modified_base 17: mod_base = OTHER; note = 2'-O-methyladenosine-3'-phosphate
  modified_base 18: mod_base = OTHER; note = 2'-O-methyladenosine-3'-phosphate
  modified_base 19: mod_base = OTHER; note = 2'-O-methyladenosine-3'-phosphate
  modified_base 20: mod_base = OTHER; note = 2'-O-methyladenosine-3'-phosphate
  modified_base 21: mod_base = OTHER; note = 2'-O-methyluridine-3'-phosphorothioate
  modified_base 22: mod_base = OTHER; note = 2'-O-methyladenosine-3'- phosphorothioate
  modified_base 23: mod_base = OTHER; note = 2'-O-methyluridine-3'-phosphate
aaataatacagatgggaaaatat

SEQ ID NO: 363 - RNA, 23 nt, synthetic construct
  misc_feature 1..23: note = Description of Artificial Sequence: Synthetic oligonucleotide
  source 1..23: mol_type = other RNA
  modified_base 1: mod_base = OTHER; note = 2'-O-methyluridine-3'-phosphorothioate
  modified_base 2: mod_base = OTHER; note = 2'-fluorouridine -3'-phosphorothioate
  modified_base 3: mod_base = OTHER; note = 2'-O-methyluridine-3'-phosphate
  modified_base 4: mod_base = OTHER; note = 2'-O-methyluridine-3'-phosphate
  modified_base 5: mod_base = OTHER; note = 2'-O-methylguanosine-3'-phosphate
  modified_base 6: mod_base = OTHER; note = 2'-fluorouridine-3'-phosphate
  modified_base 7: mod_base = OTHER; note = 2'-O-methyluridine-3'-phosphate
  modified_base 8: mod_base = OTHER; note = 2'-fluoroguanosine-3'-phosphate
  modified_base 9: mod_base = OTHER; note = 2'-fluoroguanosine-3'-phosphate
  modified_base 10: mod_base = OTHER; note = 2'-O-methyladenosine-3'-phosphate
  modified_base 11: mod_base = OTHER; note = 2'-O-methyladenosine-3'-phosphate
  modified_base 12: mod_base = OTHER; note = 2'-O-methyladenosine-3'-phosphate
  modified_base 13: mod_base = OTHER; note = 2'-O-methyladenosine-3'-phosphate
  modified_base 14: mod_base = OTHER; note = 2'-fluoroguanosine-3'-phosphate
  modified_base 15: mod_base = OTHER; note = 2'-O-methyladenosine-3'-phosphate
  modified_base 16: mod_base = OTHER; note = 2'-fluoroadenosine-3'-phosphate
  modified_base 17: mod_base = OTHER; note = 2'-O-methylcytidine-3'-phosphate
  modified_base 18: mod_base = OTHER; note = 2'-O-methylguanosine-3'-phosphate
  modified_base 19: mod_base = OTHER; note = 2'-O-methyladenosine-3'-phosphate
  modified_base 20: mod_base = OTHER; note = 2'-O-methylcytidine-3'-phosphate
  modified_base 21: mod_base = OTHER; note = 2'-O-methyladenosine-3'- phosphorothioate
  modified_base 22: mod_base = OTHER; note = 2'-O-methylcytidine-3'- phosphorothioate
  modified_base 23: mod_base = OTHER; note = 2'-O-methylcytidine-3'-phosphate
ttttgttggaaaagaacgacacc

SEQ ID NO: 364 - RNA, 23 nt, synthetic construct
  misc_feature 1..23: note = Description of Artificial Sequence: Synthetic oligonucleotide
  source 1..23: mol_type = other RNA
  modified_base 1: mod_base = OTHER; note = 2'-O-methyluridine-3'-phosphorothioate
  modified_base 2: mod_base = OTHER; note = 2'-fluoroadenosine-3'-phosphorothioate
  modified_base 3: mod_base = OTHER; note = 2'-O-methylguanosine-3'-phosphate
  modified_base 4: mod_base = OTHER; note = 2'-O-methyluridine-3'-phosphate
  modified_base 5: mod_base = OTHER; note = 2'-O-methyluridine-3'-phosphate
  modified_base 6: mod_base = OTHER; note = 2'-fluoroadenosine-3'-phosphate
  modified_base 7: mod_base = OTHER; note = 2'-O-methyladenosine-3'-phosphate
  modified_base 8: mod_base = OTHER; note = 2'-fluorouridine-3'-phosphate
  modified_base 9: mod_base = OTHER; note = 2'-fluoroadenosine-3'-phosphate
  modified_base 10: mod_base = OTHER; note = 2'-O-methyluridine-3'-phosphate
  modified_base 11: mod_base = OTHER; note = 2'-O-methyladenosine-3'-phosphate
  modified_base 12: mod_base = OTHER; note = 2'-O-methyluridine-3'-phosphate
  modified_base 13: mod_base = OTHER; note = 2'-O-methyluridine-3'-phosphate
  modified_base 14: mod_base = OTHER; note = 2'-fluorouridine-3'-phosphate
  modified_base 15: mod_base = OTHER; note = 2'-O-methylcytidine-3'-phosphate
  modified_base 16: mod_base = OTHER; note = 2'-fluorocytidine-3'-phosphate
  modified_base 17: mod_base = OTHER; note = 2'-O-methyladenosine-3'-phosphate
  modified_base 18: mod_base = OTHER; note = 2'-O-methylguanosine-3'-phosphate
  modified_base 19: mod_base = OTHER; note = 2'-O-methylguanosine-3'-phosphate
  modified_base 20: mod_base = OTHER; note = 2'-O-methyladenosine-3'-phosphate
  modified_base 21: mod_base = OTHER; note = 2'-O-methyluridine-3'-phosphorothioate
  modified_base 22: mod_base = OTHER; note = 2'-O-methylguanosine-3'- phosphorothioate
  modified_base 23: mod_base = OTHER; note = 2'-O-methyladenosine-3'-phosphate
tagttaatatatttccaggatga

SEQ ID NO: 365 - RNA, 23 nt, synthetic construct
  misc_feature 1..23: note = Description of Artificial Sequence: Synthetic oligonucleotide
  source 1..23: mol_type = other RNA
  modified_base 1: mod_base = OTHER; note = 2'-O-methyluridine-3'-phosphorothioate
  modified_base 2: mod_base = OTHER; note = 2'-fluoroadenosine-3'-phosphorothioate
  modified_base 3: mod_base = OTHER; note = 2'-O-methyluridine-3'-phosphate
  modified_base 4: mod_base = OTHER; note = 2'-O-methylcytidine-3'-phosphate
  modified_base 5: mod_base = OTHER; note = 2'-O-methyladenosine-3'-phosphate
  modified_base 6: mod_base = OTHER; note = 2'-fluorouridine-3'-phosphate
  modified_base 7: mod_base = OTHER; note = 2'-O-methylcytidine-3'-phosphate
  modified_base 8: mod_base = OTHER; note = 2'-fluoroadenosine-3'-phosphate
  modified_base 9: mod_base = OTHER; note = 2'-fluorocytidine-3'-phosphate
  modified_base 10: mod_base = OTHER; note = 2'-O-methylcytidine-3'-phosphate
  modified_base 11: mod_base = OTHER; note = 2'-O-methyluridine-3'-phosphate
  modified_base 12: mod_base = OTHER; note = 2'-O-methylcytidine-3'-phosphate
  modified_base 13: mod_base = OTHER; note = 2'-O-methyluridine-3'-phosphate
  modified_base 14: mod_base = OTHER; note = 2'-fluorocytidine-3'-phosphate
  modified_base 15: mod_base = OTHER; note = 2'-O-methyladenosine-3'-phosphate
  modified_base 16: mod_base = OTHER; note = 2'-fluoroadenosine-3'-phosphate
  modified_base 17: mod_base = OTHER; note = 2'-O-methyladenosine-3'-phosphate
  modified_base 18: mod_base = OTHER; note = 2'-O-methyladenosine-3'-phosphate
  modified_base 19: mod_base = OTHER; note = 2'-O-methyluridine-3'-phosphate
  modified_base 20: mod_base = OTHER; note = 2'-O-methylguanosine-3'-phosphate
  modified_base 21: mod_base = OTHER; note = 2'-O-methylcytidine-3'- phosphorothioate
  modified_base 22: mod_base = OTHER; note = 2'-O-methylcytidine-3'- phosphorothioate
  modified_base 23: mod_base = OTHER; note = 2'-O-methylcytidine-3'-phosphate
tatcatcacctctcaaaatgccc

SEQ ID NO: 366 - RNA, 23 nt, synthetic construct
  misc_feature 1..23: note = Description of Artificial Sequence: Synthetic oligonucleotide
  source 1..23: mol_type = other RNA
  modified_base 1: mod_base = OTHER; note = 2'-O-methyluridine-3'-phosphorothioate
  modified_base 2: mod_base = OTHER; note = 2'-fluorouridine -3'-phosphorothioate
  modified_base 3: mod_base = OTHER; note = 2'-O-methylguanosine-3'-phosphate
  modified_base 4: mod_base = OTHER; note = 2'-O-methyladenosine-3'-phosphate
  modified_base 5: mod_base = OTHER; note = 2'-O-methyladenosine-3'-phosphate
  modified_base 6: mod_base = OTHER; note = 2'-fluorocytidine-3'-phosphate
  modified_base 7: mod_base = OTHER; note = 2'-O-methyladenosine-3'-phosphate
  modified_base 8: mod_base = OTHER; note = 2'-fluorocytidine-3'-phosphate
  modified_base 9: mod_base = OTHER; note = 2'-fluorocytidine-3'-phosphate
  modified_base 10: mod_base = OTHER; note = 2'-O-methyluridine-3'-phosphate
  modified_base 11: mod_base = OTHER; note = 2'-O-methyluridine-3'-phosphate
  modified_base 12: mod_base = OTHER; note = 2'-O-methyluridine-3'-phosphate
  modified_base 13: mod_base = OTHER; note = 2'-O-methylcytidine-3'-phosphate
  modified_base 14: mod_base = OTHER; note = 2'-fluorouridine-3'-phosphate
  modified_base 15: mod_base = OTHER; note = 2'-O-methylcytidine-3'-phosphate
  modified_base 16: mod_base = OTHER; note = 2'-fluorocytidine-3'-phosphate
  modified_base 17: mod_base = OTHER; note = 2'-O-methylcytidine-3'-phosphate
  modified_base 18: mod_base = OTHER; note = 2'-O-methylcytidine-3'-phosphate
  modified_base 19: mod_base = OTHER; note = 2'-O-methylcytidine-3'-phosphate
  modified_base 20: mod_base = OTHER; note = 2'-O-methyluridine-3'-phosphate
  modified_base 21: mod_base = OTHER; note = 2'-O-methylguanosine-3'- phosphorothioate
  modified_base 22: mod_base = OTHER; note = 2'-O-methylguanosine-3'- phosphorothioate
  modified_base 23: mod_base = OTHER; note = 2'-O-methyladenosine-3'-phosphate
ttgaacacctttctccccctgga

SEQ ID NO: 367 - RNA, 23 nt, synthetic construct
  misc_feature 1..23: note = Description of Artificial Sequence: Synthetic oligonucleotide
  source 1..23: mol_type = other RNA
  modified_base 1: mod_base = OTHER; note = 2'-O-methyluridine-3'-phosphorothioate
  modified_base 2: mod_base = OTHER; note = 2'-fluorouridine -3'-phosphorothioate
  modified_base 3: mod_base = OTHER; note = 2'-O-methyluridine-3'-phosphate
  modified_base 4: mod_base = OTHER; note = 2'-O-methyladenosine-3'-phosphate
  modified_base 5: mod_base = OTHER; note = 2'-O-methyladenosine-3'-phosphate
  modified_base 6: mod_base = OTHER; note = 2'-fluorocytidine-3'-phosphate
  modified_base 7: mod_base = OTHER; note = 2'-O-methyladenosine-3'-phosphate
  modified_base 8: mod_base = OTHER; note = 2'-fluoroguanosine-3'-phosphate
  modified_base 9: mod_base = OTHER; note = 2'-fluorouridine-3'-phosphate
  modified_base 10: mod_base = OTHER; note = 2'-O-methyluridine-3'-phosphate
  modified_base 11: mod_base = OTHER; note = 2'-O-methyladenosine-3'-phosphate
  modified_base 12: mod_base = OTHER; note = 2'-O-methyladenosine-3'-phosphate
  modified_base 13: mod_base = OTHER; note = 2'-O-methyluridine-3'-phosphate
  modified_base 14: mod_base = OTHER; note = 2'-fluoroadenosine-3'-phosphate
  modified_base 15: mod_base = OTHER; note = 2'-O-methyluridine-3'-phosphate
  modified_base 16: mod_base = OTHER; note = 2'-fluoroadenosine-3'-phosphate
  modified_base 17: mod_base = OTHER; note = 2'-O-methyluridine-3'-phosphate
  modified_base 18: mod_base = OTHER; note = 2'-O-methyluridine-3'-phosphate
  modified_base 19: mod_base = OTHER; note = 2'-O-methyluridine-3'-phosphate
  modified_base 20: mod_base = OTHER; note = 2'-O-methylcytidine-3'-phosphate
  modified_base 21: mod_base = OTHER; note = 2'-O-methylcytidine-3'- phosphorothioate
  modified_base 22: mod_base = OTHER; note = 2'-O-methyladenosine-3'- phosphorothioate
  modified_base 23: mod_base = OTHER; note = 2'-O-methylguanosine-3'-phosphate
tttaacagttaatatatttccag

SEQ ID NO: 368 - RNA, 23 nt, synthetic construct
  misc_feature 1..23: note = Description of Artificial Sequence: Synthetic oligonucleotide
  source 1..23: mol_type = other RNA
  modified_base 1: mod_base = OTHER; note = 2'-O-methyladenosine-3'- phosphorothioate
  modified_base 2: mod_base = OTHER; note = 2'-fluoroadenosine-3'-phosphorothioate
  modified_base 3: mod_base = OTHER; note = 2'-O-methylguanosine-3'-phosphate
  modified_base 4: mod_base = OTHER; note = 2'-O-methylguanosine-3'-phosphate
  modified_base 5: mod_base = OTHER; note = 2'-O-methyladenosine-3'-phosphate
  modified_base 6: mod_base = OTHER; note = 2'-fluorouridine-3'-phosphate
  modified_base 7: mod_base = OTHER; note = 2'-O-methyluridine-3'-phosphate
  modified_base 8: mod_base = OTHER; note = 2'-fluorouridine-3'-phosphate
  modified_base 9: mod_base = OTHER; note = 2'-fluorouridine-3'-phosphate
  modified_base 10: mod_base = OTHER; note = 2'-O-methyluridine-3'-phosphate
  modified_base 11: mod_base = OTHER; note = 2'-O-methylcytidine-3'-phosphate
  modified_base 12: mod_base = OTHER; note = 2'-O-methylcytidine-3'-phosphate
  modified_base 13: mod_base = OTHER; note = 2'-O-methyluridine-3'-phosphate
  modified_base 14: mod_base = OTHER; note = 2'-fluorocytidine-3'-phosphate
  modified_base 15: mod_base = OTHER; note = 2'-O-methyladenosine-3'-phosphate
  modified_base 16: mod_base = OTHER; note = 2'-fluorocytidine-3'-phosphate
  modified_base 17: mod_base = OTHER; note = 2'-O-methylcytidine-3'-phosphate
  modified_base 18: mod_base = OTHER; note = 2'-O-methyladenosine-3'-phosphate
  modified_base 19: mod_base = OTHER; note = 2'-O-methyladenosine-3'-phosphate
  modified_base 20: mod_base = OTHER; note = 2'-O-methyluridine-3'-phosphate
  modified_base 21: mod_base = OTHER; note = 2'-O-methylguanosine-3'- phosphorothioate
  modified_base 22: mod_base = OTHER; note = 2'-O-methyluridine-3'-phosphorothioate
  modified_base 23: mod_base = OTHER; note = 2'-O-methylcytidine-3'-phosphate
aaggatttttcctcaccaatgtc

SEQ ID NO: 369 - RNA, 23 nt, synthetic construct
  misc_feature 1..23: note = Description of Artificial Sequence: Synthetic oligonucleotide
  source 1..23: mol_type = other RNA
  modified_base 1: mod_base = OTHER; note = 2'-O-methyluridine-3'-phosphorothioate
  modified_base 2: mod_base = OTHER; note = 2'-fluoroadenosine-3'-phosphorothioate
  modified_base 3: mod_base = OTHER; note = 2'-O-methyluridine-3'-phosphate
  modified_base 4: mod_base = OTHER; note = 2'-O-methylcytidine-3'-phosphate
  modified_base 5: mod_base = OTHER; note = 2'-O-methyluridine-3'-phosphate
  modified_base 6: mod_base = OTHER; note = 2'-fluorouridine-3'-phosphate
  modified_base 7: mod_base = OTHER; note = 2'-O-methylguanosine-3'-phosphate
  modified_base 8: mod_base = OTHER; note = 2'-fluoroadenosine-3'-phosphate
  modified_base 9: mod_base = OTHER; note = 2'-fluoroadenosine-3'-phosphate
  modified_base 10: mod_base = OTHER; note = 2'-O-methylcytidine-3'-phosphate
  modified_base 11: mod_base = OTHER; note = 2'-O-methyladenosine-3'-phosphate
  modified_base 12: mod_base = OTHER; note = 2'-O-methylcytidine-3'-phosphate
  modified_base 13: mod_base = OTHER; note = 2'-O-methylcytidine-3'-phosphate
  modified_base 14: mod_base = OTHER; note = 2'-fluorouridine-3'-phosphate
  modified_base 15: mod_base = OTHER; note = 2'-O-methyluridine-3'-phosphate
  modified_base 16: mod_base = OTHER; note = 2'-fluorouridine-3'-phosphate
  modified_base 17: mod_base = OTHER; note = 2'-O-methylcytidine-3'-phosphate
  modified_base 18: mod_base = OTHER; note = 2'-O-methyluridine-3'-phosphate
  modified_base 19: mod_base = OTHER; note = 2'-O-methylcytidine-3'-phosphate
  modified_base 20: mod_base = OTHER; note = 2'-O-methylcytidine-3'-phosphate
  modified_base 21: mod_base = OTHER; note = 2'-O-methylcytidine-3'- phosphorothioate
  modified_base 22: mod_base = OTHER; note = 2'-O-methylcytidine-3'- phosphorothioate
  modified_base 23: mod_base = OTHER; note = 2'-O-methylcytidine-3'-phosphate
tatcttgaacacctttctccccc

SEQ ID NO: 370 - RNA, 23 nt, synthetic construct
  misc_feature 1..23: note = Description of Artificial Sequence: Synthetic oligonucleotide
  source 1..23: mol_type = other RNA
  modified_base 1: mod_base = OTHER; note = 2'-O-methyladenosine-3'- phosphorothioate
  modified_base 2: mod_base = OTHER; note = 2'-fluorouridine -3'-phosphorothioate
  modified_base 3: mod_base = OTHER; note = 2'-O-methylcytidine-3'-phosphate
  modified_base 4: mod_base = OTHER; note = 2'-O-methyladenosine-3'-phosphate
  modified_base 5: mod_base = OTHER; note = 2'-O-methyluridine-3'-phosphate
  modified_base 6: mod_base = OTHER; note = 2'-fluorocytidine-3'-phosphate
  modified_base 7: mod_base = OTHER; note = 2'-O-methyladenosine-3'-phosphate
  modified_base 8: mod_base = OTHER; note = 2'-fluorocytidine-3'-phosphate
  modified_base 9: mod_base = OTHER; note = 2'-fluorocytidine-3'-phosphate
  modified_base 10: mod_base = OTHER; note = 2'-O-methyluridine-3'-phosphate
  modified_base 11: mod_base = OTHER; note = 2'-O-methylcytidine-3'-phosphate
  modified_base 12: mod_base = OTHER; note = 2'-O-methyluridine-3'-phosphate
  modified_base 13: mod_base = OTHER; note = 2'-O-methylcytidine-3'-phosphate
  modified_base 14: mod_base = OTHER; note = 2'-fluoroadenosine-3'-phosphate
  modified_base 15: mod_base = OTHER; note = 2'-O-methyladenosine-3'-phosphate
  modified_base 16: mod_base = OTHER; note = 2'-fluoroadenosine-3'-phosphate
  modified_base 17: mod_base = OTHER; note = 2'-O-methyladenosine-3'-phosphate
  modified_base 18: mod_base = OTHER; note = 2'-O-methyluridine-3'-phosphate
  modified_base 19: mod_base = OTHER; note = 2'-O-methylguanosine-3'-phosphate
  modified_base 20: mod_base = OTHER; note = 2'-O-methylcytidine-3'-phosphate
  modified_base 21: mod_base = OTHER; note = 2'-O-methylcytidine-3'- phosphorothioate
  modified_base 22: mod_base = OTHER; note = 2'-O-methylcytidine-3'- phosphorothioate
  modified_base 23: mod_base = OTHER; note = 2'-O-methyluridine-3'-phosphate
atcatcacctctcaaaatgccct

SEQ ID NO: 371 - RNA, 23 nt, synthetic construct
  misc_feature 1..23: note = Description of Artificial Sequence: Synthetic oligonucleotide
  source 1..23: mol_type = other RNA
  modified_base 1: mod_base = OTHER; note = 2'-O-methyladenosine-3'- phosphorothioate
  modified_base 2: mod_base = OTHER; note = 2'-fluoroadenosine-3'-phosphorothioate
  modified_base 3: mod_base = OTHER; note = 2'-O-methyladenosine-3'-phosphate
  modified_base 4: mod_base = OTHER; note = 2'-O-methyladenosine-3'-phosphate
  modified_base 5: mod_base = OTHER; note = 2'-O-methylguanosine-3'-phosphate
  modified_base 6: mod_base = OTHER; note = 2'-fluoroadenosine-3'-phosphate
  modified_base 7: mod_base = OTHER; note = 2'-O-methyladenosine-3'-phosphate
  modified_base 8: mod_base = OTHER; note = 2'-fluorocytidine-3'-phosphate
  modified_base 9: mod_base = OTHER; note = 2'-fluoroguanosine-3'-phosphate
  modified_base 10: mod_base = OTHER; note = 2'-O-methyladenosine-3'-phosphate
  modified_base 11: mod_base = OTHER; note = 2'-O-methylcytidine-3'-phosphate
  modified_base 12: mod_base = OTHER; note = 2'-O-methyladenosine-3'-phosphate
  modified_base 13: mod_base = OTHER; note = 2'-O-methylcytidine-3'-phosphate
  modified_base 14: mod_base = OTHER; note = 2'-fluorocytidine-3'-phosphate
  modified_base 15: mod_base = OTHER; note = 2'-O-methylcytidine-3'-phosphate
  modified_base 16: mod_base = OTHER; note = 2'-fluorouridine-3'-phosphate
  modified_base 17: mod_base = OTHER; note = 2'-O-methyluridine-3'-phosphate
  modified_base 18: mod_base = OTHER; note = 2'-O-methyluridine-3'-phosphate
  modified_base 19: mod_base = OTHER; note = 2'-O-methylguanosine-3'-phosphate
  modified_base 20: mod_base = OTHER; note = 2'-O-methyluridine-3'-phosphate
  modified_base 21: mod_base = OTHER; note = 2'-O-methyladenosine-3'- phosphorothioate
  modified_base 22: mod_base = OTHER; note = 2'-O-methyluridine-3'-phosphorothioate
  modified_base 23: mod_base = OTHER; note = 2'-O-methyluridine-3'-phosphate
aaaagaacgacaccctttgtatt

SEQ ID NO: 372 - RNA, 23 nt, synthetic construct
  misc_feature 1..23: note = Description of Artificial Sequence: Synthetic oligonucleotide
  source 1..23: mol_type = other RNA
  modified_base 1: mod_base = OTHER; note = 2'-O-methyluridine-3'-phosphorothioate
  modified_base 2: mod_base = OTHER; note = 2'-fluoroguanosine-3'-phosphorothioate
  modified_base 3: mod_base = OTHER; note = 2'-O-methyladenosine-3'-phosphate
  modified_base 4: mod_base = OTHER; note = 2'-O-methyluridine-3'-phosphate
  modified_base 5: mod_base = OTHER; note = 2'-O-methyluridine-3'-phosphate
  modified_base 6: mod_base = OTHER; note = 2'-fluorocytidine-3'-phosphate
  modified_base 7: mod_base = OTHER; note = 2'-O-methylguanosine-3'-phosphate
  modified_base 8: mod_base = OTHER; note = 2'-fluoroadenosine-3'-phosphate
  modified_base 9: mod_base = OTHER; note = 2'-fluorocytidine-3'-phosphate
  modified_base 10: mod_base = OTHER; note = 2'-O-methyladenosine-3'-phosphate
  modified_base 11: mod_base = OTHER; note = 2'-O-methylcytidine-3'-phosphate
  modified_base 12: mod_base = OTHER; note = 2'-O-methylcytidine-3'-phosphate
  modified_base 13: mod_base = OTHER; note = 2'-O-methyladenosine-3'-phosphate
  modified_base 14: mod_base = OTHER; note = 2'-fluoroadenosine-3'-phosphate
  modified_base 15: mod_base = OTHER; note = 2'-O-methylguanosine-3'-phosphate
  modified_base 16: mod_base = OTHER; note = 2'-fluoroadenosine-3'-phosphate
  modified_base 17: mod_base = OTHER; note = 2'-O-methyluridine-3'-phosphate
  modified_base 18: mod_base = OTHER; note = 2'-O-methylcytidine-3'-phosphate
  modified_base 19: mod_base = OTHER; note = 2'-O-methylcytidine-3'-phosphate
  modified_base 20: mod_base = OTHER; note = 2'-O-methylcytidine-3'-phosphate
  modified_base 21: mod_base = OTHER; note = 2'-O-methyladenosine-3'- phosphorothioate
  modified_base 22: mod_base = OTHER; note = 2'-O-methyluridine-3'-phosphorothioate
  modified_base 23: mod_base = OTHER; note = 2'-O-methyluridine-3'-phosphate
tgattcgacaccaagatcccatt

SEQ ID NO: 373 - RNA, 23 nt, synthetic construct
  misc_feature 1..23: note = Description of Artificial Sequence: Synthetic oligonucleotide
  source 1..23: mol_type = other RNA
  modified_base 1: mod_base = OTHER; note = 2'-O-methyluridine-3'-phosphorothioate
  modified_base 2: mod_base = OTHER; note = 2'-fluoroadenosine-3'-phosphorothioate
  modified_base 3: mod_base = OTHER; note = 2'-O-methyladenosine-3'-phosphate
  modified_base 4: mod_base = OTHER; note = 2'-O-methyladenosine-3'-phosphate
  modified_base 5: mod_base = OTHER; note = 2'-O-methyladenosine-3'-phosphate
  modified_base 6: mod_base = OTHER; note = 2'-fluorouridine-3'-phosphate
  modified_base 7: mod_base = OTHER; note = 2'-O-methyladenosine-3'-phosphate
  modified_base 8: mod_base = OTHER; note = 2'-fluorouridine-3'-phosphate
  modified_base 9: mod_base = OTHER; note = 2'-fluorouridine-3'-phosphate
  modified_base 10: mod_base = OTHER; note = 2'-O-methylguanosine-3'-phosphate
  modified_base 11: mod_base = OTHER; note = 2'-O-methyluridine-3'-phosphate
  modified_base 12: mod_base = OTHER; note = 2'-O-methylguanosine-3'-phosphate
  modified_base 13: mod_base = OTHER; note = 2'-O-methylcytidine-3'-phosphate
  modified_base 14: mod_base = OTHER; note = 2'-fluoroadenosine-3'-phosphate
  modified_base 15: mod_base = OTHER; note = 2'-O-methylcytidine-3'-phosphate
  modified_base 16: mod_base = OTHER; note = 2'-fluorouridine-3'-phosphate
  modified_base 17: mod_base = OTHER; note = 2'-O-methylguanosine-3'-phosphate
  modified_base 18: mod_base = OTHER; note = 2'-O-methyluridine-3'-phosphate
  modified_base 19: mod_base = OTHER; note = 2'-O-methylcytidine-3'-phosphate
  modified_base 20: mod_base = OTHER; note = 2'-O-methyladenosine-3'-phosphate
  modified_base 21: mod_base = OTHER; note = 2'-O-methylguanosine-3'- phosphorothioate
  modified_base 22: mod_base = OTHER; note = 2'-O-methyladenosine-3'- phosphorothioate
  modified_base 23: mod_base = OTHER; note = 2'-O-methyluridine-3'-phosphate
taaaatattgtgcactgtcagat

SEQ ID NO: 374 - RNA, 23 nt, synthetic construct
  misc_feature 1..23: note = Description of Artificial Sequence: Synthetic oligonucleotide
  source 1..23: mol_type = other RNA
  modified_base 1: mod_base = OTHER; note = 2'-O-methyladenosine-3'- phosphorothioate
  modified_base 2: mod_base = OTHER; note = 2'-fluorouridine -3'-phosphorothioate
  modified_base 3: mod_base = OTHER; note = 2'-O-methylguanosine-3'-phosphate
  modified_base 4: mod_base = OTHER; note = 2'-O-methylguanosine-3'-phosphate
  modified_base 5: mod_base = OTHER; note = 2'-O-methylguanosine-3'-phosphate
  modified_base 6: mod_base = OTHER; note = 2'-fluoroadenosine-3'-phosphate
  modified_base 7: mod_base = OTHER; note = 2'-O-methyladenosine-3'-phosphate
  modified_base 8: mod_base = OTHER; note = 2'-fluoroadenosine-3'-phosphate
  modified_base 9: mod_base = OTHER; note = 2'-fluoroadenosine-3'-phosphate
  modified_base 10: mod_base = OTHER; note = 2'-O-methyluridine-3'-phosphate
  modified_base 11: mod_base = OTHER; note = 2'-O-methyladenosine-3'-phosphate
  modified_base 12: mod_base = OTHER; note = 2'-O-methyluridine-3'-phosphate
  modified_base 13: mod_base = OTHER; note = 2'-O-methyluridine-3'-phosphate
  modified_base 14: mod_base = OTHER; note = 2'-fluoroguanosine-3'-phosphate
  modified_base 15: mod_base = OTHER; note = 2'-O-methyluridine-3'-phosphate
  modified_base 16: mod_base = OTHER; note = 2'-fluoroguanosine-3'-phosphate
  modified_base 17: mod_base = OTHER; note = 2'-O-methylcytidine-3'-phosphate
  modified_base 18: mod_base = OTHER; note = 2'-O-methyladenosine-3'-phosphate
  modified_base 19: mod_base = OTHER; note = 2'-O-methylcytidine-3'-phosphate
  modified_base 20: mod_base = OTHER; note = 2'-O-methyluridine-3'-phosphate
  modified_base 21: mod_base = OTHER; note = 2'-O-methylguanosine-3'- phosphorothioate
  modified_base 22: mod_base = OTHER; note = 2'-O-methyluridine-3'-phosphorothioate
  modified_base 23: mod_base = OTHER; note = 2'-O-methylcytidine-3'-phosphate
atgggaaaatattgtgcactgtc

SEQ ID NO: 375 - RNA, 23 nt, synthetic construct
  misc_feature 1..23: note = Description of Artificial Sequence: Synthetic oligonucleotide
  source 1..23: mol_type = other RNA
  modified_base 1: mod_base = OTHER; note = 2'-O-methyluridine-3'-phosphorothioate
  modified_base 2: mod_base = OTHER; note = 2'-fluorouridine -3'-phosphorothioate
  modified_base 3: mod_base = OTHER; note = 2'-O-methyladenosine-3'-phosphate
  modified_base 4: mod_base = OTHER; note = 2'-O-methylguanosine-3'-phosphate
  modified_base 5: mod_base = OTHER; note = 2'-O-methylguanosine-3'-phosphate
  modified_base 6: mod_base = OTHER; note = 2'-fluoroadenosine-3'-phosphate
  modified_base 7: mod_base = OTHER; note = 2'-O-methylcytidine-3'-phosphate
  modified_base 8: mod_base = OTHER; note = 2'-fluoroadenosine-3'-phosphate
  modified_base 9: mod_base = OTHER; note = 2'-fluorocytidine-3'-phosphate
  modified_base 10: mod_base = OTHER; note = 2'-O-methylcytidine-3'-phosphate
  modified_base 11: mod_base = OTHER; note = 2'-O-methylcytidine-3'-phosphate
  modified_base 12: mod_base = OTHER; note = 2'-O-methyladenosine-3'-phosphate
  modified_base 13: mod_base = OTHER; note = 2'-O-methyluridine-3'-phosphate
  modified_base 14: mod_base = OTHER; note = 2'-fluorouridine-3'-phosphate
  modified_base 15: mod_base = OTHER; note = 2'-O-methylguanosine-3'-phosphate
  modified_base 16: mod_base = OTHER; note = 2'-fluoroadenosine-3'-phosphate
  modified_base 17: mod_base = OTHER; note = 2'-O-methyladenosine-3'-phosphate
  modified_base 18: mod_base = OTHER; note = 2'-O-methyladenosine-3'-phosphate
  modified_base 19: mod_base = OTHER; note = 2'-O-methyladenosine-3'-phosphate
  modified_base 20: mod_base = OTHER; note = 2'-O-methylguanosine-3'-phosphate
  modified_base 21: mod_base = OTHER; note = 2'-O-methyluridine-3'-phosphorothioate
  modified_base 22: mod_base = OTHER; note = 2'-O-methylcytidine-3'- phosphorothioate
  modified_base 23: mod_base = OTHER; note = 2'-O-methyladenosine-3'-phosphate
ttaggacacccattgaaaagtca

SEQ ID NO: 376 - RNA, 23 nt, synthetic construct
  misc_feature 1..23: note = Description of Artificial Sequence: Synthetic oligonucleotide
  source 1..23: mol_type = other RNA
  modified_base 1: mod_base = OTHER; note = 2'-O-methyladenosine-3'- phosphorothioate
  modified_base 2: mod_base = OTHER; note = 2'-fluoroguanosine-3'-phosphorothioate
  modified_base 3: mod_base = OTHER; note = 2'-O-methylguanosine-3'-phosphate
  modified_base 4: mod_base = OTHER; note = 2'-O-methyladenosine-3'-phosphate
  modified_base 5: mod_base = OTHER; note = 2'-O-methyluridine-3'-phosphate
  modified_base 6: mod_base = OTHER; note = 2'-fluorouridine-3'-phosphate
  modified_base 7: mod_base = OTHER; note = 2'-O-methyluridine-3'-phosphate
  modified_base 8: mod_base = OTHER; note = 2'-fluorouridine-3'-phosphate
  modified_base 9: mod_base = OTHER; note = 2'-fluorouridine-3'-phosphate
  modified_base 10: mod_base = OTHER; note = 2'-O-methylcytidine-3'-phosphate
  modified_base 11: mod_base = OTHER; note = 2'-O-methylcytidine-3'-phosphate
  modified_base 12: mod_base = OTHER; note = 2'-O-methyluridine-3'-phosphate
  modified_base 13: mod_base = OTHER; note = 2'-O-methylcytidine-3'-phosphate
  modified_base 14: mod_base = OTHER; note = 2'-fluoroadenosine-3'-phosphate
  modified_base 15: mod_base = OTHER; note = 2'-O-methylcytidine-3'-phosphate
  modified_base 16: mod_base = OTHER; note = 2'-fluorocytidine-3'-phosphate
  modified_base 17: mod_base = OTHER; note = 2'-O-methyladenosine-3'-phosphate
  modified_base 18: mod_base = OTHER; note = 2'-O-methyladenosine-3'-phosphate
  modified_base 19: mod_base = OTHER; note = 2'-O-methyluridine-3'-phosphate
  modified_base 20: mod_base = OTHER; note = 2'-O-methylguanosine-3'-phosphate
  modified_base 21: mod_base = OTHER; note = 2'-O-methyluridine-3'-phosphorothioate
  modified_base 22: mod_base = OTHER; note = 2'-O-methylcytidine-3'- phosphorothioate
  modified_base 23: mod_base = OTHER; note = 2'-O-methyluridine-3'-phosphate
aggatttttcctcaccaatgtct

SEQ ID NO: 377 - RNA, 23 nt, synthetic construct
  misc_feature 1..23: note = Description of Artificial Sequence: Synthetic oligonucleotide
  source 1..23: mol_type = other RNA
  modified_base 1: mod_base = OTHER; note = 2'-O-methyluridine-3'-phosphorothioate
  modified_base 2: mod_base = OTHER; note = 2'-fluorocytidine-3'-phosphorothioate
  modified_base 3: mod_base = OTHER; note = 2'-O-methyladenosine-3'-phosphate
  modified_base 4: mod_base = OTHER; note = 2'-O-methyluridine-3'-phosphate
  modified_base 5: mod_base = OTHER; note = 2'-O-methyluridine-3'-phosphate
  modified_base 6: mod_base = OTHER; note = 2'-fluoroguanosine-3'-phosphate
  modified_base 7: mod_base = OTHER; note = 2'-O-methyladenosine-3'-phosphate
  modified_base 8: mod_base = OTHER; note = 2'-fluoroadenosine-3'-phosphate
  modified_base 9: mod_base = OTHER; note = 2'-fluoroadenosine-3'-phosphate
  modified_base 10: mod_base = OTHER; note = 2'-O-methyladenosine-3'-phosphate
  modified_base 11: mod_base = OTHER; note = 2'-O-methylguanosine-3'-phosphate
  modified_base 12: mod_base = OTHER; note = 2'-O-methyluridine-3'-phosphate
  modified_base 13: mod_base = OTHER; note = 2'-O-methylcytidine-3'-phosphate
  modified_base 14: mod_base = OTHER; note = 2'-fluoroadenosine-3'-phosphate
  modified_base 15: mod_base = OTHER; note = 2'-O-methyladenosine-3'-phosphate
  modified_base 16: mod_base = OTHER; note = 2'-fluoroadenosine-3'-phosphate
  modified_base 17: mod_base = OTHER; note = 2'-O-methyladenosine-3'-phosphate
  modified_base 18: mod_base = OTHER; note = 2'-O-methylguanosine-3'-phosphate
  modified_base 19: mod_base = OTHER; note = 2'-O-methylcytidine-3'-phosphate
  modified_base 20: mod_base = OTHER; note = 2'-O-methyladenosine-3'-phosphate
  modified_base 21: mod_base = OTHER; note = 2'-O-methyladenosine-3'- phosphorothioate
  modified_base 22: mod_base = OTHER; note = 2'-O-methyluridine-3'-phosphorothioate
  modified_base 23: mod_base = OTHER; note = 2'-O-methylguanosine-3'-phosphate
tcattgaaaagtcaaaagcaatg

SEQ ID NO: 378 - RNA, 23 nt, synthetic construct
  misc_feature 1..23: note = Description of Artificial Sequence: Synthetic oligonucleotide
  source 1..23: mol_type = other RNA
  modified_base 1: mod_base = OTHER; note = 2'-O-methyluridine-3'-phosphorothioate
  modified_base 2: mod_base = OTHER; note = 2'-fluorocytidine-3'-phosphorothioate
  modified_base 3: mod_base = OTHER; note = 2'-O-methyladenosine-3'-phosphate
  modified_base 4: mod_base = OTHER; note = 2'-O-methyluridine-3'-phosphate
  modified_base 5: mod_base = OTHER; note = 2'-O-methylcytidine-3'-phosphate
  modified_base 6: mod_base = OTHER; note = 2'-fluoroadenosine-3'-phosphate
  modified_base 7: mod_base = OTHER; note = 2'-O-methyluridine-3'-phosphate
  modified_base 8: mod_base = OTHER; note = 2'-fluorocytidine-3'-phosphate
  modified_base 9: mod_base = OTHER; note = 2'-fluoroadenosine-3'-phosphate
  modified_base 10: mod_base = OTHER; note = 2'-O-methylcytidine-3'-phosphate
  modified_base 11: mod_base = OTHER; note = 2'-O-methylcytidine-3'-phosphate
  modified_base 12: mod_base = OTHER; note = 2'-O-methyluridine-3'-phosphate
  modified_base 13: mod_base = OTHER; note = 2'-O-methylcytidine-3'-phosphate
  modified_base 14: mod_base = OTHER; note = 2'-fluorouridine-3'-phosphate
  modified_base 15: mod_base = OTHER; note = 2'-O-methylcytidine-3'-phosphate
  modified_base 16: mod_base = OTHER; note = 2'-fluoroadenosine-3'-phosphate
  modified_base 17: mod_base = OTHER; note = 2'-O-methyladenosine-3'-phosphate
  modified_base 18: mod_base = OTHER; note = 2'-O-methyladenosine-3'-phosphate
  modified_base 19: mod_base = OTHER; note = 2'-O-methyladenosine-3'-phosphate
  modified_base 20: mod_base = OTHER; note = 2'-O-methyluridine-3'-phosphate
  modified_base 21: mod_base = OTHER; note = 2'-O-methylguanosine-3'- phosphorothioate
  modified_base 22: mod_base = OTHER; note = 2'-O-methylcytidine-3'- phosphorothioate
  modified_base 23: mod_base = OTHER; note = 2'-O-methylcytidine-3'-phosphate
tcatcatcacctctcaaaatgcc

SEQ ID NO: 379 - RNA, 23 nt, synthetic construct
  misc_feature 1..23: note = Description of Artificial Sequence: Synthetic oligonucleotide
  source 1..23: mol_type = other RNA
  modified_base 1: mod_base = OTHER; note = 2'-O-methyluridine-3'-phosphorothioate
  modified_base 2: mod_base = OTHER; note = 2'-fluoroguanosine-3'-phosphorothioate
  modified_base 3: mod_base = OTHER; note = 2'-O-methyladenosine-3'-phosphate
  modified_base 4: mod_base = OTHER; note = 2'-O-methylcytidine-3'-phosphate
  modified_base 5: mod_base = OTHER; note = 2'-O-methyladenosine-3'-phosphate
  modified_base 6: mod_base = OTHER; note = 2'-fluorocytidine-3'-phosphate
  modified_base 7: mod_base = OTHER; note = 2'-O-methylcytidine-3'-phosphate
  modified_base 8: mod_base = OTHER; note = 2'-fluorocytidine-3'-phosphate
  modified_base 9: mod_base = OTHER; note = 2'-fluoroadenosine-3'-phosphate
  modified_base 10: mod_base = OTHER; note = 2'-O-methyluridine-3'-phosphate
  modified_base 11: mod_base = OTHER; note = 2'-O-methyluridine-3'-phosphate
  modified_base 12: mod_base = OTHER; note = 2'-O-methylguanosine-3'-phosphate
  modified_base 13: mod_base = OTHER; note = 2'-O-methyladenosine-3'-phosphate
  modified_base 14: mod_base = OTHER; note = 2'-fluoroadenosine-3'-phosphate
  modified_base 15: mod_base = OTHER; note = 2'-O-methyladenosine-3'-phosphate
  modified_base 16: mod_base = OTHER; note = 2'-fluoroadenosine-3'-phosphate
  modified_base 17: mod_base = OTHER; note = 2'-O-methylguanosine-3'-phosphate
  modified_base 18: mod_base = OTHER; note = 2'-O-methyluridine-3'-phosphate
  modified_base 19: mod_base = OTHER; note = 2'-O-methylcytidine-3'-phosphate
  modified_base 20: mod_base = OTHER; note = 2'-O-methyladenosine-3'-phosphate
  modified_base 21: mod_base = OTHER; note = 2'-O-methyladenosine-3'- phosphorothioate
  modified_base 22: mod_base = OTHER; note = 2'-O-methyladenosine-3'- phosphorothioate
  modified_base 23: mod_base = OTHER; note = 2'-O-methyladenosine-3'-phosphate
tgacacccattgaaaagtcaaaa

SEQ ID NO: 380 - RNA, 23 nt, synthetic construct
  misc_feature 1..23: note = Description of Artificial Sequence: Synthetic oligonucleotide
  source 1..23: mol_type = other RNA
  modified_base 1: mod_base = OTHER; note = 2'-O-methyluridine-3'-phosphorothioate
  modified_base 2: mod_base = OTHER; note = 2'-fluorocytidine-3'-phosphorothioate
  modified_base 3: mod_base = OTHER; note = 2'-O-methyluridine-3'-phosphate
  modified_base 4: mod_base = OTHER; note = 2'-O-methylguanosine-3'-phosphate
  modified_base 5: mod_base = OTHER; note = 2'-O-methyluridine-3'-phosphate
  modified_base 6: mod_base = OTHER; note = 2'-fluorocytidine-3'-phosphate
  modified_base 7: mod_base = OTHER; note = 2'-O-methylcytidine-3'-phosphate
  modified_base 8: mod_base = OTHER; note = 2'-fluorouridine-3'-phosphate
  modified_base 9: mod_base = OTHER; note = 2'-fluoroadenosine-3'-phosphate
  modified_base 10: mod_base = OTHER; note = 2'-O-methyladenosine-3'-phosphate
  modified_base 11: mod_base = OTHER; note = 2'-O-methyladenosine-3'-phosphate
  modified_base 12: mod_base = OTHER; note = 2'-O-methyladenosine-3'-phosphate
  modified_base 13: mod_base = OTHER; note = 2'-O-methylcytidine-3'-phosphate
  modified_base 14: mod_base = OTHER; note = 2'-fluoroadenosine-3'-phosphate
  modified_base 15: mod_base = OTHER; note = 2'-O-methylguanosine-3'-phosphate
  modified_base 16: mod_base = OTHER; note = 2'-fluoroadenosine-3'-phosphate
  modified_base 17: mod_base = OTHER; note = 2'-O-methyladenosine-3'-phosphate
  modified_base 18: mod_base = OTHER; note = 2'-O-methylguanosine-3'-phosphate
  modified_base 19: mod_base = OTHER; note = 2'-O-methyluridine-3'-phosphate
  modified_base 20: mod_base = OTHER; note = 2'-O-methylcytidine-3'-phosphate
  modified_base 21: mod_base = OTHER; note = 2'-O-methylguanosine-3'- phosphorothioate
  modified_base 22: mod_base = OTHER; note = 2'-O-methyladenosine-3'- phosphorothioate
  modified_base 23: mod_base = OTHER; note = 2'-O-methylcytidine-3'-phosphate
tctgtcctaaaacagaagtcgac

SEQ ID NO: 381 - RNA, 23 nt, synthetic construct
  misc_feature 1..23: note = Description of Artificial Sequence: Synthetic oligonucleotide
  source 1..23: mol_type = other RNA
  modified_base 1: mod_base = OTHER; note = 2'-O-methyluridine-3'-phosphorothioate
  modified_base 2: mod_base = OTHER; note = 2'-fluoroadenosine-3'-phosphorothioate
  modified_base 3: mod_base = OTHER; note = 2'-O-methyluridine-3'-phosphate
  modified_base 4: mod_base = OTHER; note = 2'-O-methyluridine-3'-phosphate
  modified_base 5: mod_base = OTHER; note = 2'-O-methylcytidine-3'-phosphate
  modified_base 6: mod_base = OTHER; note = 2'-fluorouridine-3'-phosphate
  modified_base 7: mod_base = OTHER; note = 2'-O-methylguanosine-3'-phosphate
  modified_base 8: mod_base = OTHER; note = 2'-fluoroguanosine-3'-phosphate
  modified_base 9: mod_base = OTHER; note = 2'-fluorocytidine-3'-phosphate
  modified_base 10: mod_base = OTHER; note = 2'-O-methyladenosine-3'-phosphate
  modified_base 11: mod_base = OTHER; note = 2'-O-methylcytidine-3'-phosphate
  modified_base 12: mod_base = OTHER; note = 2'-O-methylcytidine-3'-phosphate
  modified_base 13: mod_base = OTHER; note = 2'-O-methylcytidine-3'-phosphate
  modified_base 14: mod_base = OTHER; note = 2'-fluoroadenosine-3'-phosphate
  modified_base 15: mod_base = OTHER; note = 2'-O-methylcytidine-3'-phosphate
  modified_base 16: mod_base = OTHER; note = 2'-fluorouridine-3'-phosphate
  modified_base 17: mod_base = OTHER; note = 2'-O-methylcytidine-3'-phosphate
  modified_base 18: mod_base = OTHER; note = 2'-O-methyladenosine-3'-phosphate
  modified_base 19: mod_base = OTHER; note = 2'-O-methylguanosine-3'-phosphate
  modified_base 20: mod_base = OTHER; note = 2'-O-methyladenosine-3'-phosphate
  modified_base 21: mod_base = OTHER; note = 2'-O-methylguanosine-3'- phosphorothioate
  modified_base 22: mod_base = OTHER; note = 2'-O-methylcytidine-3'- phosphorothioate
  modified_base 23: mod_base = OTHER; note = 2'-O-methylcytidine-3'-phosphate
tattctggcacccactcagagcc

SEQ ID NO: 382 - RNA, 23 nt, synthetic construct
  misc_feature 1..23: note = Description of Artificial Sequence: Synthetic oligonucleotide
  source 1..23: mol_type = other RNA
  modified_base 1: mod_base = OTHER; note = 2'-O-methyluridine-3'-phosphorothioate
  modified_base 2: mod_base = OTHER; note = 2'-fluoroadenosine-3'-phosphorothioate
  modified_base 3: mod_base = OTHER; note = 2'-O-methylcytidine-3'-phosphate
  modified_base 4: mod_base = OTHER; note = 2'-O-methyluridine-3'-phosphate
  modified_base 5: mod_base = OTHER; note = 2'-O-methyluridine-3'-phosphate
  modified_base 6: mod_base = OTHER; note = 2'-fluorouridine-3'-phosphate
  modified_base 7: mod_base = OTHER; note = 2'-O-methylcytidine-3'-phosphate
  modified_base 8: mod_base = OTHER; note = 2'-fluoroadenosine-3'-phosphate
  modified_base 9: mod_base = OTHER; note = 2'-fluorocytidine-3'-phosphate
  modified_base 10: mod_base = OTHER; note = 2'-O-methyladenosine-3'-phosphate
  modified_base 11: mod_base = OTHER; note = 2'-O-methyluridine-3'-phosphate
  modified_base 12: mod_base = OTHER; note = 2'-O-methyluridine-3'-phosphate
  modified_base 13: mod_base = OTHER; note = 2'-O-methylcytidine-3'-phosphate
  modified_base 14: mod_base = OTHER; note = 2'-fluorouridine-3'-phosphate
  modified_base 15: mod_base = OTHER; note = 2'-O-methylguanosine-3'-phosphate
  modified_base 16: mod_base = OTHER; note = 2'-fluoroguanosine-3'-phosphate
  modified_base 17: mod_base = OTHER; note = 2'-O-methylcytidine-3'-phosphate
  modified_base 18: mod_base = OTHER; note = 2'-O-methyladenosine-3'-phosphate
  modified_base 19: mod_base = OTHER; note = 2'-O-methylcytidine-3'-phosphate
  modified_base 20: mod_base = OTHER; note = 2'-O-methylcytidine-3'-phosphate
  modified_base 21: mod_base = OTHER; note = 2'-O-methylcytidine-3'- phosphorothioate
  modified_base 22: mod_base = OTHER; note = 2'-O-methyladenosine-3'- phosphorothioate
  modified_base 23: mod_base = OTHER; note = 2'-O-methylcytidine-3'-phosphate
tactttcacattctggcacccac

SEQ ID NO: 383 - RNA, 23 nt, synthetic construct
  misc_feature 1..23: note = Description of Artificial Sequence: Synthetic oligonucleotide
  source 1..23: mol_type = other RNA
  modified_base 1: mod_base = OTHER; note = 2'-O-methyluridine-3'-phosphorothioate
  modified_base 2: mod_base = OTHER; note = 2'-fluoroguanosine-3'-phosphorothioate
  modified_base 3: mod_base = OTHER; note = 2'-O-methyluridine-3'-phosphate
  modified_base 4: mod_base = OTHER; note = 2'-O-methyluridine-3'-phosphate
  modified_base 5: mod_base = OTHER; note = 2'-O-methylcytidine-3'-phosphate
  modified_base 6: mod_base = OTHER; note = 2'-fluorocytidine-3'-phosphate
  modified_base 7: mod_base = OTHER; note = 2'-O-methyluridine-3'-phosphate
  modified_base 8: mod_base = OTHER; note = 2'-fluoroadenosine-3'-phosphate
  modified_base 9: mod_base = OTHER; note = 2'-fluoroguanosine-3'-phosphate
  modified_base 10: mod_base = OTHER; note = 2'-O-methylguanosine-3'-phosphate
  modified_base 11: mod_base = OTHER; note = 2'-O-methyladenosine-3'-phosphate
  modified_base 12: mod_base = OTHER; note = 2'-O-methylcytidine-3'-phosphate
  modified_base 13: mod_base = OTHER; note = 2'-O-methyladenosine-3'-phosphate
  modified_base 14: mod_base = OTHER; note = 2'-fluorocytidine-3'-phosphate
  modified_base 15: mod_base = OTHER; note = 2'-O-methylcytidine-3'-phosphate
  modified_base 16: mod_base = OTHER; note = 2'-fluorocytidine-3'-phosphate
  modified_base 17: mod_base = OTHER; note = 2'-O-methyladenosine-3'-phosphate
  modified_base 18: mod_base = OTHER; note = 2'-O-methyluridine-3'-phosphate
  modified_base 19: mod_base = OTHER; note = 2'-O-methyluridine-3'-phosphate
  modified_base 20: mod_base = OTHER; note = 2'-O-methylguanosine-3'-phosphate
  modified_base 21: mod_base = OTHER; note = 2'-O-methyladenosine-3'- phosphorothioate
  modified_base 22: mod_base = OTHER; note = 2'-O-methyladenosine-3'- phosphorothioate
  modified_base 23: mod_base = OTHER; note = 2'-O-methyladenosine-3'-phosphate
tgttcctaggacacccattgaaa

SEQ ID NO: 384 - RNA, 23 nt, synthetic construct
  misc_feature 1..23: note = Description of Artificial Sequence: Synthetic oligonucleotide
  source 1..23: mol_type = other RNA
  modified_base 1: mod_base = OTHER; note = 2'-O-methyluridine-3'-phosphorothioate
  modified_base 2: mod_base = OTHER; note = 2'-fluoroadenosine-3'-phosphorothioate
  modified_base 3: mod_base = OTHER; note = 2'-O-methyladenosine-3'-phosphate
  modified_base 4: mod_base = OTHER; note = 2'-O-methyluridine-3'-phosphate
  modified_base 5: mod_base = OTHER; note = 2'-O-methylguanosine-3'-phosphate
  modified_base 6: mod_base = OTHER; note = 2'-fluorouridine-3'-phosphate
  modified_base 7: mod_base = OTHER; note = 2'-O-methylcytidine-3'-phosphate
  modified_base 8: mod_base = OTHER; note = 2'-fluorouridine-3'-phosphate
  modified_base 9: mod_base = OTHER; note = 2'-fluorouridine-3'-phosphate
  modified_base 10: mod_base = OTHER; note = 2'-O-methylguanosine-3'-phosphate
  modified_base 11: mod_base = OTHER; note = 2'-O-methyluridine-3'-phosphate
  modified_base 12: mod_base = OTHER; note = 2'-O-methylcytidine-3'-phosphate
  modified_base 13: mod_base = OTHER; note = 2'-O-methylguanosine-3'-phosphate
  modified_base 14: mod_base = OTHER; note = 2'-fluoroadenosine-3'-phosphate
  modified_base 15: mod_base = OTHER; note = 2'-O-methyluridine-3'-phosphate
  modified_base 16: mod_base = OTHER; note = 2'-fluoroguanosine-3'-phosphate
  modified_base 17: mod_base = OTHER; note = 2'-O-methyladenosine-3'-phosphate
  modified_base 18: mod_base = OTHER; note = 2'-O-methylcytidine-3'-phosphate
  modified_base 19: mod_base = OTHER; note = 2'-O-methyluridine-3'-phosphate
  modified_base 20: mod_base = OTHER; note = 2'-O-methyluridine-3'-phosphate
  modified_base 21: mod_base = OTHER; note = 2'-O-methyluridine-3'-phosphorothioate
  modified_base 22: mod_base = OTHER; note = 2'-O-methylcytidine-3'- phosphorothioate
  modified_base 23: mod_base = OTHER; note = 2'-O-methyladenosine-3'-phosphate
taatgtcttgtcgatgactttca

SEQ ID NO: 385 - RNA, 23 nt, synthetic construct
  misc_feature 1..23: note = Description of Artificial Sequence: Synthetic oligonucleotide
  source 1..23: mol_type = other RNA
  modified_base 1: mod_base = OTHER; note = 2'-O-methyluridine-3'-phosphorothioate
  modified_base 2: mod_base = OTHER; note = 2'-fluoroguanosine-3'-phosphorothioate
  modified_base 3: mod_base = OTHER; note = 2'-O-methylcytidine-3'-phosphate
  modified_base 4: mod_base = OTHER; note = 2'-O-methyladenosine-3'-phosphate
  modified_base 5: mod_base = OTHER; note = 2'-O-methyluridine-3'-phosphate
  modified_base 6: mod_base = OTHER; note = 2'-fluorocytidine-3'-phosphate
  modified_base 7: mod_base = OTHER; note = 2'-O-methyladenosine-3'-phosphate
  modified_base 8: mod_base = OTHER; note = 2'-fluorouridine-3'-phosphate
  modified_base 9: mod_base = OTHER; note = 2'-fluorocytidine-3'-phosphate
  modified_base 10: mod_base = OTHER; note = 2'-O-methyladenosine-3'-phosphate
  modified_base 11: mod_base = OTHER; note = 2'-O-methylcytidine-3'-phosphate
  modified_base 12: mod_base = OTHER; note = 2'-O-methylcytidine-3'-phosphate
  modified_base 13: mod_base = OTHER; note = 2'-O-methyluridine-3'-phosphate
  modified_base 14: mod_base = OTHER; note = 2'-fluorocytidine-3'-phosphate
  modified_base 15: mod_base = OTHER; note = 2'-O-methyluridine-3'-phosphate
  modified_base 16: mod_base = OTHER; note = 2'-fluorocytidine-3'-phosphate
  modified_base 17: mod_base = OTHER; note = 2'-O-methyladenosine-3'-phosphate
  modified_base 18: mod_base = OTHER; note = 2'-O-methyladenosine-3'-phosphate
  modified_base 19: mod_base = OTHER; note = 2'-O-methyladenosine-3'-phosphate
  modified_base 20: mod_base = OTHER; note = 2'-O-methyladenosine-3'-phosphate
  modified_base 21: mod_base = OTHER; note = 2'-O-methyluridine-3'-phosphorothioate
  modified_base 22: mod_base = OTHER; note = 2'-O-methylguanosine-3'- phosphorothioate
  modified_base 23: mod_base = OTHER; note = 2'-O-methylcytidine-3'-phosphate
tgcatcatcacctctcaaaatgc

SEQ ID NO: 386 - RNA, 23 nt, synthetic construct
  misc_feature 1..23: note = Description of Artificial Sequence: Synthetic oligonucleotide
  source 1..23: mol_type = other RNA
  modified_base 1: mod_base = OTHER; note = 2'-O-methyluridine-3'-phosphorothioate
  modified_base 2: mod_base = OTHER; note = 2'-fluorocytidine-3'-phosphorothioate
  modified_base 3: mod_base = OTHER; note = 2'-O-methyluridine-3'-phosphate
  modified_base 4: mod_base = OTHER; note = 2'-O-methylcytidine-3'-phosphate
  modified_base 5: mod_base = OTHER; note = 2'-O-methyladenosine-3'-phosphate
  modified_base 6: mod_base = OTHER; note = 2'-fluorocytidine-3'-phosphate
  modified_base 7: mod_base = OTHER; note = 2'-O-methylcytidine-3'-phosphate
  modified_base 8: mod_base = OTHER; note = 2'-fluoroadenosine-3'-phosphate
  modified_base 9: mod_base = OTHER; note = 2'-fluoroadenosine-3'-phosphate
  modified_base 10: mod_base = OTHER; note = 2'-O-methyluridine-3'-phosphate
  modified_base 11: mod_base = OTHER; note = 2'-O-methylguanosine-3'-phosphate
  modified_base 12: mod_base = OTHER; note = 2'-O-methyluridine-3'-phosphate
  modified_base 13: mod_base = OTHER; note = 2'-O-methylcytidine-3'-phosphate
  modified_base 14: mod_base = OTHER; note = 2'-fluorouridine-3'-phosphate
  modified_base 15: mod_base = OTHER; note = 2'-O-methyluridine-3'-phosphate
  modified_base 16: mod_base = OTHER; note = 2'-fluoroguanosine-3'-phosphate
  modified_base 17: mod_base = OTHER; note = 2'-O-methyluridine-3'-phosphate
  modified_base 18: mod_base = OTHER; note = 2'-O-methylcytidine-3'-phosphate
  modified_base 19: mod_base = OTHER; note = 2'-O-methylguanosine-3'-phosphate
  modified_base 20: mod_base = OTHER; note = 2'-O-methyladenosine-3'-phosphate
  modified_base 21: mod_base = OTHER; note = 2'-O-methyluridine-3'-phosphorothioate
  modified_base 22: mod_base = OTHER; note = 2'-O-methylguanosine-3'- phosphorothioate
  modified_base 23: mod_base = OTHER; note = 2'-O-methyladenosine-3'-phosphate
tctcaccaatgtcttgtcgatga

SEQ ID NO: 387 - RNA, 23 nt, synthetic construct
  misc_feature 1..23: note = Description of Artificial Sequence: Synthetic oligonucleotide
  source 1..23: mol_type = other RNA
  modified_base 1: mod_base = OTHER; note = 2'-O-methyluridine-3'-phosphorothioate
  modified_base 2: mod_base = OTHER; note = 2'-fluoroguanosine-3'-phosphorothioate
  modified_base 3: mod_base = OTHER; note = 2'-O-methyladenosine-3'-phosphate
  modified_base 4: mod_base = OTHER; note = 2'-O-methylcytidine-3'-phosphate
  modified_base 5: mod_base = OTHER; note = 2'-O-methyluridine-3'-phosphate
  modified_base 6: mod_base = OTHER; note = 2'-fluorouridine-3'-phosphate
  modified_base 7: mod_base = OTHER; note = 2'-O-methyluridine-3'-phosphate
  modified_base 8: mod_base = OTHER; note = 2'-fluorocytidine-3'-phosphate
  modified_base 9: mod_base = OTHER; note = 2'-fluoroadenosine-3'-phosphate
  modified_base 10: mod_base = OTHER; note = 2'-O-methylcytidine-3'-phosphate
  modified_base 11: mod_base = OTHER; note = 2'-O-methyladenosine-3'-phosphate
  modified_base 12: mod_base = OTHER; note = 2'-O-methyluridine-3'-phosphate
  modified_base 13: mod_base = OTHER; note = 2'-O-methyluridine-3'-phosphate
  modified_base 14: mod_base = OTHER; note = 2'-fluorocytidine-3'-phosphate
  modified_base 15: mod_base = OTHER; note = 2'-O-methyluridine-3'-phosphate
  modified_base 16: mod_base = OTHER; note = 2'-fluoroguanosine-3'-phosphate
  modified_base 17: mod_base = OTHER; note = 2'-O-methylguanosine-3'-phosphate
  modified_base 18: mod_base = OTHER; note = 2'-O-methylcytidine-3'-phosphate
  modified_base 19: mod_base = OTHER; note = 2'-O-methyladenosine-3'-phosphate
  modified_base 20: mod_base = OTHER; note = 2'-O-methylcytidine-3'-phosphate
  modified_base 21: mod_base = OTHER; note = 2'-O-methylcytidine-3'- phosphorothioate
  modified_base 22: mod_base = OTHER; note = 2'-O-methylcytidine-3'- phosphorothioate
  modified_base 23: mod_base = OTHER; note = 2'-O-methyladenosine-3'-phosphate
tgactttcacattctggcaccca

SEQ ID NO: 388 - RNA, 23 nt, synthetic construct
  misc_feature 1..23: note = Description of Artificial Sequence: Synthetic oligonucleotide
  source 1..23: mol_type = other RNA
  modified_base 1: mod_base = OTHER; note = 2'-O-methyluridine-3'-phosphorothioate
  modified_base 2: mod_base = OTHER; note = 2'-fluoroguanosine-3'-phosphorothioate
  modified_base 3: mod_base = OTHER; note = 2'-O-methylguanosine-3'-phosphate
  modified_base 4: mod_base = OTHER; note = 2'-O-methyladenosine-3'-phosphate
  modified_base 5: mod_base = OTHER; note = 2'-O-methyladenosine-3'-phosphate
  modified_base 6: mod_base = OTHER; note = 2'-fluoroadenosine-3'-phosphate
  modified_base 7: mod_base = OTHER; note = 2'-O-methyladenosine-3'-phosphate
  modified_base 8: mod_base = OTHER; note = 2'-fluorouridine-3'-phosphate
  modified_base 9: mod_base = OTHER; note = 2'-fluoroadenosine-3'-phosphate
  modified_base 10: mod_base = OTHER; note = 2'-O-methyluridine-3'-phosphate
  modified_base 11: mod_base = OTHER; note = 2'-O-methyluridine-3'-phosphate
  modified_base 12: mod_base = OTHER; note = 2'-O-methylguanosine-3'-phosphate
  modified_base 13: mod_base = OTHER; note = 2'-O-methyluridine-3'-phosphate
  modified_base 14: mod_base = OTHER; note = 2'-fluoroguanosine-3'-phosphate
  modified_base 15: mod_base = OTHER; note = 2'-O-methylcytidine-3'-phosphate
  modified_base 16: mod_base = OTHER; note = 2'-fluoroadenosine-3'-phosphate
  modified_base 17: mod_base = OTHER; note = 2'-O-methylcytidine-3'-phosphate
  modified_base 18: mod_base = OTHER; note = 2'-O-methyluridine-3'-phosphate
  modified_base 19: mod_base = OTHER; note = 2'-O-methylguanosine-3'-phosphate
  modified_base 20: mod_base = OTHER; note = 2'-O-methyluridine-3'-phosphate
  modified_base 21: mod_base = OTHER; note = 2'-O-methylcytidine-3'- phosphorothioate
  modified_base 22: mod_base = OTHER; note = 2'-O-methyladenosine-3'- phosphorothioate
  modified_base 23: mod_base = OTHER; note = 2'-O-methylguanosine-3'-phosphate
tggaaaatattgtgcactgtcag

SEQ ID NO: 389 - RNA, 23 nt, synthetic construct
  misc_feature 1..23: note = Description of Artificial Sequence: Synthetic oligonucleotide
  source 1..23: mol_type = other RNA
  modified_base 1: mod_base = OTHER; note = 2'-O-methyluridine-3'-phosphorothioate
  modified_base 2: mod_base = OTHER; note = 2'-fluorouridine -3'-phosphorothioate
  modified_base 3: mod_base = OTHER; note = 2'-O-methylcytidine-3'-phosphate
  modified_base 4: mod_base = OTHER; note = 2'-O-methyluridine-3'-phosphate
  modified_base 5: mod_base = OTHER; note = 2'-O-methylguanosine-3'-phosphate
  modified_base 6: mod_base = OTHER; note = 2'-fluorocytidine-3'-phosphate
  modified_base 7: mod_base = OTHER; note = 2'-O-methyladenosine-3'-phosphate
  modified_base 8: mod_base = OTHER; note = 2'-fluorocytidine-3'-phosphate
  modified_base 9: mod_base = OTHER; note = 2'-fluoroadenosine-3'-phosphate
  modified_base 10: mod_base = OTHER; note = 2'-O-methylguanosine-3'-phosphate
  modified_base 11: mod_base = OTHER; note = 2'-O-methyluridine-3'-phosphate
  modified_base 12: mod_base = OTHER; note = 2'-O-methylguanosine-3'-phosphate
  modified_base 13: mod_base = OTHER; note = 2'-O-methyluridine-3'-phosphate
  modified_base 14: mod_base = OTHER; note = 2'-fluorocytidine-3'-phosphate
  modified_base 15: mod_base = OTHER; note = 2'-O-methyluridine-3'-phosphate
  modified_base 16: mod_base = OTHER; note = 2'-fluorocytidine-3'-phosphate
  modified_base 17: mod_base = OTHER; note = 2'-O-methyluridine-3'-phosphate
  modified_base 18: mod_base = OTHER; note = 2'-O-methyluridine-3'-phosphate
  modified_base 19: mod_base = OTHER; note = 2'-O-methyluridine-3'-phosphate
  modified_base 20: mod_base = OTHER; note = 2'-O-methylguanosine-3'-phosphate
  modified_base 21: mod_base = OTHER; note = 2'-O-methyluridine-3'-phosphorothioate
  modified_base 22: mod_base = OTHER; note = 2'-O-methylcytidine-3'- phosphorothioate
  modified_base 23: mod_base = OTHER; note = 2'-O-methyladenosine-3'-phosphate
ttctgcacagtgtctctttgtca

SEQ ID NO: 390 - RNA, 23 nt, synthetic construct
  misc_feature 1..23: note = Description of Artificial Sequence: Synthetic oligonucleotide
  source 1..23: mol_type = other RNA
  modified_base 1: mod_base = OTHER; note = 2'-O-methyluridine-3'-phosphorothioate
  modified_base 2: mod_base = OTHER; note = 2'-fluorocytidine-3'-phosphorothioate
  modified_base 3: mod_base = OTHER; note = 2'-O-methylcytidine-3'-phosphate
  modified_base 4: mod_base = OTHER; note = 2'-O-methyluridine-3'-phosphate
  modified_base 5: mod_base = OTHER; note = 2'-O-methyladenosine-3'-phosphate
  modified_base 6: mod_base = OTHER; note = 2'-fluoroguanosine-3'-phosphate
  modified_base 7: mod_base = OTHER; note = 2'-O-methylguanosine-3'-phosphate
  modified_base 8: mod_base = OTHER; note = 2'-fluoroadenosine-3'-phosphate
  modified_base 9: mod_base = OTHER; note = 2'-fluorocytidine-3'-phosphate
  modified_base 10: mod_base = OTHER; note = 2'-O-methyladenosine-3'-phosphate
  modified_base 11: mod_base = OTHER; note = 2'-O-methylcytidine-3'-phosphate
  modified_base 12: mod_base = OTHER; note = 2'-O-methylcytidine-3'-phosphate
  modified_base 13: mod_base = OTHER; note = 2'-O-methylcytidine-3'-phosphate
  modified_base 14: mod_base = OTHER; note = 2'-fluoroadenosine-3'-phosphate
  modified_base 15: mod_base = OTHER; note = 2'-O-methyluridine-3'-phosphate
  modified_base 16: mod_base = OTHER; note = 2'-fluorouridine-3'-phosphate
  modified_base 17: mod_base = OTHER; note = 2'-O-methylguanosine-3'-phosphate
  modified_base 18: mod_base = OTHER; note = 2'-O-methyladenosine-3'-phosphate
  modified_base 19: mod_base = OTHER; note = 2'-O-methyladenosine-3'-phosphate
  modified_base 20: mod_base = OTHER; note = 2'-O-methyladenosine-3'-phosphate
  modified_base 21: mod_base = OTHER; note = 2'-O-methyladenosine-3'- phosphorothioate
  modified_base 22: mod_base = OTHER; note = 2'-O-methylguanosine-3'- phosphorothioate
  modified_base 23: mod_base = OTHER; note = 2'-O-methyluridine-3'-phosphate
tcctaggacacccattgaaaagt

SEQ ID NO: 391 - RNA, 23 nt, synthetic construct
  misc_feature 1..23: note = Description of Artificial Sequence: Synthetic oligonucleotide
  source 1..23: mol_type = other RNA
  modified_base 1: mod_base = OTHER; note = 2'-O-methyladenosine-3'- phosphorothioate
  modified_base 2: mod_base = OTHER; note = 2'-fluorocytidine-3'-phosphorothioate
  modified_base 3: mod_base = OTHER; note = 2'-O-methyluridine-3'-phosphate
  modified_base 4: mod_base = OTHER; note = 2'-O-methylguanosine-3'-phosphate
  modified_base 5: mod_base = OTHER; note = 2'-O-methyluridine-3'-phosphate
  modified_base 6: mod_base = OTHER; note = 2'-fluorocytidine-3'-phosphate
  modified_base 7: mod_base = OTHER; note = 2'-O-methyladenosine-3'-phosphate
  modified_base 8: mod_base = OTHER; note = 2'-fluoroguanosine-3'-phosphate
  modified_base 9: mod_base = OTHER; note = 2'-fluoroadenosine-3'-phosphate
  modified_base 10: mod_base = OTHER; note = 2'-O-methyluridine-3'-phosphate
  modified_base 11: mod_base = OTHER; note = 2'-O-methylcytidine-3'-phosphate
  modified_base 12: mod_base = OTHER; note = 2'-O-methyluridine-3'-phosphate
  modified_base 13: mod_base = OTHER; note = 2'-O-methyluridine-3'-phosphate
  modified_base 14: mod_base = OTHER; note = 2'-fluoroguanosine-3'-phosphate
  modified_base 15: mod_base = OTHER; note = 2'-O-methylguanosine-3'-phosphate
  modified_base 16: mod_base = OTHER; note = 2'-fluoroadenosine-3'-phosphate
  modified_base 17: mod_base = OTHER; note = 2'-O-methyladenosine-3'-phosphate
  modified_base 18: mod_base = OTHER; note = 2'-O-methyladenosine-3'-phosphate
  modified_base 19: mod_base = OTHER; note = 2'-O-methylcytidine-3'-phosphate
  modified_base 20: mod_base = OTHER; note = 2'-O-methylguanosine-3'-phosphate
  modified_base 21: mod_base = OTHER; note = 2'-O-methylguanosine-3'- phosphorothioate
  modified_base 22: mod_base = OTHER; note = 2'-O-methylcytidine-3'- phosphorothioate
  modified_base 23: mod_base = OTHER; note = 2'-O-methylcytidine-3'-phosphate
actgtcagatcttggaaacggcc

SEQ ID NO: 392 - RNA, 23 nt, synthetic construct
  misc_feature 1..23: note = Description of Artificial Sequence: Synthetic oligonucleotide
  source 1..23: mol_type = other RNA
  modified_base 1: mod_base = OTHER; note = 2'-O-methyluridine-3'-phosphorothioate
  modified_base 2: mod_base = OTHER; note = 2'-fluorouridine -3'-phosphorothioate
  modified_base 3: mod_base = OTHER; note = 2'-O-methyluridine-3'-phosphate
  modified_base 4: mod_base = OTHER; note = 2'-O-methylguanosine-3'-phosphate
  modified_base 5: mod_base = OTHER; note = 2'-O-methyladenosine-3'-phosphate
  modified_base 6: mod_base = OTHER; note = 2'-fluoroadenosine-3'-phosphate
  modified_base 7: mod_base = OTHER; note = 2'-O-methylcytidine-3'-phosphate
  modified_base 8: mod_base = OTHER; note = 2'-fluoroadenosine-3'-phosphate
  modified_base 9: mod_base = OTHER; note = 2'-fluorocytidine-3'-phosphate
  modified_base 10: mod_base = OTHER; note = 2'-O-methylcytidine-3'-phosphate
  modified_base 11: mod_base = OTHER; note = 2'-O-methyluridine-3'-phosphate
  modified_base 12: mod_base = OTHER; note = 2'-O-methyluridine-3'-phosphate
  modified_base 13: mod_base = OTHER; note = 2'-O-methyluridine-3'-phosphate
  modified_base 14: mod_base = OTHER; note = 2'-fluorocytidine-3'-phosphate
  modified_base 15: mod_base = OTHER; note = 2'-O-methyluridine-3'-phosphate
  modified_base 16: mod_base = OTHER; note = 2'-fluorocytidine-3'-phosphate
  modified_base 17: mod_base = OTHER; note = 2'-O-methylcytidine-3'-phosphate
  modified_base 18: mod_base = OTHER; note = 2'-O-methylcytidine-3'-phosphate
  modified_base 19: mod_base = OTHER; note = 2'-O-methylcytidine-3'-phosphate
  modified_base 20: mod_base = OTHER; note = 2'-O-methylcytidine-3'-phosphate
  modified_base 21: mod_base = OTHER; note = 2'-O-methyluridine-3'-phosphorothioate
  modified_base 22: mod_base = OTHER; note = 2'-O-methylguanosine-3'- phosphorothioate
  modified_base 23: mod_base = OTHER; note = 2'-O-methylguanosine-3'-phosphate
tttgaacacctttctccccctgg

SEQ ID NO: 393 - RNA, 23 nt, synthetic construct
  misc_feature 1..23: note = Description of Artificial Sequence: Synthetic oligonucleotide
  source 1..23: mol_type = other RNA
  modified_base 1: mod_base = OTHER; note = 2'-O-methyladenosine-3'- phosphorothioate
  modified_base 2: mod_base = OTHER; note = 2'-fluorocytidine-3'-phosphorothioate
  modified_base 3: mod_base = OTHER; note = 2'-O-methylcytidine-3'-phosphate
  modified_base 4: mod_base = OTHER; note = 2'-O-methyladenosine-3'-phosphate
  modified_base 5: mod_base = OTHER; note = 2'-O-methyladenosine-3'-phosphate
  modified_base 6: mod_base = OTHER; note = 2'-fluorouridine-3'-phosphate
  modified_base 7: mod_base = OTHER; note = 2'-O-methylguanosine-3'-phosphate
  modified_base 8: mod_base = OTHER; note = 2'-fluorouridine-3'-phosphate
  modified_base 9: mod_base = OTHER; note = 2'-fluorocytidine-3'-phosphate
  modified_base 10: mod_base = OTHER; note = 2'-O-methyluridine-3'-phosphate
  modified_base 11: mod_base = OTHER; note = 2'-O-methyluridine-3'-phosphate
  modified_base 12: mod_base = OTHER; note = 2'-O-methylguanosine-3'-phosphate
  modified_base 13: mod_base = OTHER; note = 2'-O-methyluridine-3'-phosphate
  modified_base 14: mod_base = OTHER; note = 2'-fluorocytidine-3'-phosphate
  modified_base 15: mod_base = OTHER; note = 2'-O-methylguanosine-3'-phosphate
  modified_base 16: mod_base = OTHER; note = 2'-fluoroadenosine-3'-phosphate
  modified_base 17: mod_base = OTHER; note = 2'-O-methyluridine-3'-phosphate
  modified_base 18: mod_base = OTHER; note = 2'-O-methylguanosine-3'-phosphate
  modified_base 19: mod_base = OTHER; note = 2'-O-methyladenosine-3'-phosphate
  modified_base 20: mod_base = OTHER; note = 2'-O-methylcytidine-3'-phosphate
  modified_base 21: mod_base = OTHER; note = 2'-O-methyluridine-3'-phosphorothioate
  modified_base 22: mod_base = OTHER; note = 2'-O-methyluridine-3'-phosphorothioate
  modified_base 23: mod_base = OTHER; note = 2'-O-methyluridine-3'-phosphate
accaatgtcttgtcgatgacttt

SEQ ID NO: 394 - RNA, 21 nt, synthetic construct
  misc_feature 1..21: note = Description of Artificial Sequence: Synthetic oligonucleotide
  source 1..21: mol_type = other RNA
gaatgtgaaagtcatcgacaa

SEQ ID NO: 395 - RNA, 21 nt, synthetic construct
  misc_feature 1..21: note = Description of Artificial Sequence: Synthetic oligonucleotide
  source 1..21: mol_type = other RNA
ttttcaatgggtgtcctagga

SEQ ID NO: 396 - RNA, 21 nt, synthetic construct
  misc_feature 1..21: note = Description of Artificial Sequence: Synthetic oligonucleotide
  source 1..21: mol_type = other RNA
gaaagtcatcgacaagacatt

SEQ ID NO: 397 - RNA, 21 nt, synthetic construct
  misc_feature 1..21: note = Description of Artificial Sequence: Synthetic oligonucleotide
  source 1..21: mol_type = other RNA
tcatcgacaagacattggtga

SEQ ID NO: 398 - RNA, 21 nt, synthetic construct
  misc_feature 1..21: note = Description of Artificial Sequence: Synthetic oligonucleotide
  source 1..21: mol_type = other RNA
tttcaatgggtgtcctaggaa

SEQ ID NO: 399 - RNA, 21 nt, synthetic construct
  misc_feature 1..21: note = Description of Artificial Sequence: Synthetic oligonucleotide
  source 1..21: mol_type = other RNA
aatgggtgtcctaggaacctt

SEQ ID NO: 400 - RNA, 21 nt, synthetic construct
  misc_feature 1..21: note = Description of Artificial Sequence: Synthetic oligonucleotide
  source 1..21: mol_type = other RNA
gacagtgcacaatattttcca

SEQ ID NO: 401 - RNA, 21 nt, synthetic construct
  misc_feature 1..21: note = Description of Artificial Sequence: Synthetic oligonucleotide
  source 1..21: mol_type = other RNA
acttttcaatgggtgtcctaa

SEQ ID NO: 402 - RNA, 21 nt, synthetic construct
  misc_feature 1..21: note = Description of Artificial Sequence: Synthetic oligonucleotide
  source 1..21: mol_type = other RNA
aagtcatcgacaagacattga

SEQ ID NO: 403 - RNA, 21 nt, synthetic construct
  misc_feature 1..21: note = Description of Artificial Sequence: Synthetic oligonucleotide
  source 1..21: mol_type = other RNA
atcgacaagacattggtgaga

SEQ ID NO: 404 - RNA, 21 nt, synthetic construct
  misc_feature 1..21: note = Description of Artificial Sequence: Synthetic oligonucleotide
  source 1..21: mol_type = other RNA
gggagaaaggtgttcaagata

SEQ ID NO: 405 - RNA, 21 nt, synthetic construct
  misc_feature 1..21: note = Description of Artificial Sequence: Synthetic oligonucleotide
  source 1..21: mol_type = other RNA
cttttcaatgggtgtcctaga

SEQ ID NO: 406 - RNA, 21 nt, synthetic construct
  misc_feature 1..21: note = Description of Artificial Sequence: Synthetic oligonucleotide
  source 1..21: mol_type = other RNA
tcaatgggtgtcctaggaaca

SEQ ID NO: 407 - RNA, 21 nt, synthetic construct
  misc_feature 1..21: note = Description of Artificial Sequence: Synthetic oligonucleotide
  source 1..21: mol_type = other RNA
ttgacttttcaatgggtgtca

SEQ ID NO: 408 - RNA, 21 nt, synthetic construct
  misc_feature 1..21: note = Description of Artificial Sequence: Synthetic oligonucleotide
  source 1..21: mol_type = other RNA
aaagtcatcgacaagacatta

SEQ ID NO: 409 - RNA, 21 nt, synthetic construct
  misc_feature 1..21: note = Description of Artificial Sequence: Synthetic oligonucleotide
  source 1..21: mol_type = other RNA
cagggggagaaaggtgttcaa

SEQ ID NO: 410 - RNA, 21 nt, synthetic construct
  misc_feature 1..21: note = Description of Artificial Sequence: Synthetic oligonucleotide
  source 1..21: mol_type = other RNA
cattggtgaggaaaaatcctt

SEQ ID NO: 411 - RNA, 21 nt, synthetic construct
  misc_feature 1..21: note = Description of Artificial Sequence: Synthetic oligonucleotide
  source 1..21: mol_type = other RNA
acattggtgaggaaaaatcct

SEQ ID NO: 412 - RNA, 21 nt, synthetic construct
  misc_feature 1..21: note = Description of Artificial Sequence: Synthetic oligonucleotide
  source 1..21: mol_type = other RNA
agggggagaaaggtgttcaaa

SEQ ID NO: 413 - RNA, 21 nt, synthetic construct
  misc_feature 1..21: note = Description of Artificial Sequence: Synthetic oligonucleotide
  source 1..21: mol_type = other RNA
ctcaggatgaaaaattttgaa

SEQ ID NO: 414 - RNA, 21 nt, synthetic construct
  misc_feature 1..21: note = Description of Artificial Sequence: Synthetic oligonucleotide
  source 1..21: mol_type = other RNA
cagcatgtattacttgacaaa

SEQ ID NO: 415 - RNA, 21 nt, synthetic construct
  misc_feature 1..21: note = Description of Artificial Sequence: Synthetic oligonucleotide
  source 1..21: mol_type = other RNA
tatgaacaacatgctaaatca

SEQ ID NO: 416 - RNA, 21 nt, synthetic construct
  misc_feature 1..21: note = Description of Artificial Sequence: Synthetic oligonucleotide
  source 1..21: mol_type = other RNA
atatatccaaatgttttagga

SEQ ID NO: 417 - RNA, 21 nt, synthetic construct
  misc_feature 1..21: note = Description of Artificial Sequence: Synthetic oligonucleotide
  source 1..21: mol_type = other RNA
ccagatggaagctgtatccaa

SEQ ID NO: 418 - RNA, 21 nt, synthetic construct
  misc_feature 1..21: note = Description of Artificial Sequence: Synthetic oligonucleotide
  source 1..21: mol_type = other RNA
gactttcatcctggaaatata

SEQ ID NO: 419 - RNA, 21 nt, synthetic construct
  misc_feature 1..21: note = Description of Artificial Sequence: Synthetic oligonucleotide
  source 1..21: mol_type = other RNA
ccccggctaatttgtatcaat

SEQ ID NO: 420 - RNA, 21 nt, synthetic construct
  misc_feature 1..21: note = Description of Artificial Sequence: Synthetic oligonucleotide
  source 1..21: mol_type = other RNA
ttaaacatggcttgaatggga

SEQ ID NO: 421 - RNA, 21 nt, synthetic construct
  misc_feature 1..21: note = Description of Artificial Sequence: Synthetic oligonucleotide
  source 1..21: mol_type = other RNA
aatgtgtttagacaacgtcat

SEQ ID NO: 422 - RNA, 21 nt, synthetic construct
  misc_feature 1..21: note = Description of Artificial Sequence: Synthetic oligonucleotide
  source 1..21: mol_type = other RNA
actaaaggaagaattccggtt

SEQ ID NO: 423 - RNA, 21 nt, synthetic construct
  misc_feature 1..21: note = Description of Artificial Sequence: Synthetic oligonucleotide
  source 1..21: mol_type = other RNA
tatatccaaatgttttaggat

SEQ ID NO: 424 - RNA, 21 nt, synthetic construct
  misc_feature 1..21: note = Description of Artificial Sequence: Synthetic oligonucleotide
  source 1..21: mol_type = other RNA
gtgcggaaaggcactgatgtt

SEQ ID NO: 425 - RNA, 21 nt, synthetic construct
  misc_feature 1..21: note = Description of Artificial Sequence: Synthetic oligonucleotide
  source 1..21: mol_type = other RNA
taaaacagtggttcttaaatt

SEQ ID NO: 426 - RNA, 21 nt, synthetic construct
  misc_feature 1..21: note = Description of Artificial Sequence: Synthetic oligonucleotide
  source 1..21: mol_type = other RNA
atgaaaaattttgaaaccagt

SEQ ID NO: 427 - RNA, 21 nt, synthetic construct
  misc_feature 1..21: note = Description of Artificial Sequence: Synthetic oligonucleotide
  source 1..21: mol_type = other RNA
aacaaaatagcaatccctttt

SEQ ID NO: 428 - RNA, 21 nt, synthetic construct
  misc_feature 1..21: note = Description of Artificial Sequence: Synthetic oligonucleotide
  source 1..21: mol_type = other RNA
ctgaaacagatctgtcgactt

SEQ ID NO: 429 - RNA, 21 nt, synthetic construct
  misc_feature 1..21: note = Description of Artificial Sequence: Synthetic oligonucleotide
  source 1..21: mol_type = other RNA
ttgttgcaaagggcattttga

SEQ ID NO: 430 - RNA, 21 nt, synthetic construct
  misc_feature 1..21: note = Description of Artificial Sequence: Synthetic oligonucleotide
  source 1..21: mol_type = other RNA
ctcattgtttattaacctgta

SEQ ID NO: 431 - RNA, 21 nt, synthetic construct
  misc_feature 1..21: note = Description of Artificial Sequence: Synthetic oligonucleotide
  source 1..21: mol_type = other RNA
caacaaaatagcaatcccttt

SEQ ID NO: 432 - RNA, 21 nt, synthetic construct
  misc_feature 1..21: note = Description of Artificial Sequence: Synthetic oligonucleotide
  source 1..21: mol_type = other RNA
cattgtttattaacctgtatt

SEQ ID NO: 433 - RNA, 21 nt, synthetic construct
  misc_feature 1..21: note = Description of Artificial Sequence: Synthetic oligonucleotide
  source 1..21: mol_type = other RNA
tatcagctgggaagatatcaa

SEQ ID NO: 434 - RNA, 21 nt, synthetic construct
  misc_feature 1..21: note = Description of Artificial Sequence: Synthetic oligonucleotide
  source 1..21: mol_type = other RNA
tgtcctaggaaccttttagaa

SEQ ID NO: 435 - RNA, 21 nt, synthetic construct
  misc_feature 1..21: note = Description of Artificial Sequence: Synthetic oligonucleotide
  source 1..21: mol_type = other RNA
tccaacaaaatagcaatccct

SEQ ID NO: 436 - RNA, 21 nt, synthetic construct
  misc_feature 1..21: note = Description of Artificial Sequence: Synthetic oligonucleotide
  source 1..21: mol_type = other RNA
ggtgtgcggaaaggcactgat

SEQ ID NO: 437 - RNA, 21 nt, synthetic construct
  misc_feature 1..21: note = Description of Artificial Sequence: Synthetic oligonucleotide
  source 1..21: mol_type = other RNA
ttgaaaccagtactttatcat

SEQ ID NO: 438 - RNA, 21 nt, synthetic construct
  misc_feature 1..21: note = Description of Artificial Sequence: Synthetic oligonucleotide
  source 1..21: mol_type = other RNA
tacttccaaagtctatatata

SEQ ID NO: 439 - RNA, 21 nt, synthetic construct
  misc_feature 1..21: note = Description of Artificial Sequence: Synthetic oligonucleotide
  source 1..21: mol_type = other RNA
tcctaggaaccttttagaaat

SEQ ID NO: 440 - RNA, 21 nt, synthetic construct
  misc_feature 1..21: note = Description of Artificial Sequence: Synthetic oligonucleotide
  source 1..21: mol_type = other RNA
ctcctgaggaaaattttggaa

SEQ ID NO: 441 - RNA, 21 nt, synthetic construct
  misc_feature 1..21: note = Description of Artificial Sequence: Synthetic oligonucleotide
  source 1..21: mol_type = other RNA
gctccggaatgttgctgaaat

SEQ ID NO: 442 - RNA, 21 nt, synthetic construct
  misc_feature 1..21: note = Description of Artificial Sequence: Synthetic oligonucleotide
  source 1..21: mol_type = other RNA
gtgtttgtggggagaccaata

SEQ ID NO: 443 - RNA, 23 nt, synthetic construct
  misc_feature 1..23: note = Description of Artificial Sequence: Synthetic oligonucleotide
  source 1..23: mol_type = other RNA
ttgtcgatgactttcacattctg

SEQ ID NO: 444 - RNA, 23 nt, synthetic construct
  misc_feature 1..23: note = Description of Artificial Sequence: Synthetic oligonucleotide
  source 1..23: mol_type = other RNA
tcctaggacacccattgaaaagt

SEQ ID NO: 445 - RNA, 23 nt, synthetic construct
  misc_feature 1..23: note = Description of Artificial Sequence: Synthetic oligonucleotide
  source 1..23: mol_type = other RNA
aatgtcttgtcgatgactttcac

SEQ ID NO: 446 - RNA, 23 nt, synthetic construct
  misc_feature 1..23: note = Description of Artificial Sequence: Synthetic oligonucleotide
  source 1..23: mol_type = other RNA
tcaccaatgtcttgtcgatgact

SEQ ID NO: 447 - RNA, 23 nt, synthetic construct
  misc_feature 1..23: note = Description of Artificial Sequence: Synthetic oligonucleotide
  source 1..23: mol_type = other RNA
ttcctaggacacccattgaaaag

SEQ ID NO: 448 - RNA, 23 nt, synthetic construct
  misc_feature 1..23: note = Description of Artificial Sequence: Synthetic oligonucleotide
  source 1..23: mol_type = other RNA
aaggttcctaggacacccattga

SEQ ID NO: 449 - RNA, 23 nt, synthetic construct
  misc_feature 1..23: note = Description of Artificial Sequence: Synthetic oligonucleotide
  source 1..23: mol_type = other RNA
tggaaaatattgtgcactgtcag

SEQ ID NO: 450 - RNA, 23 nt, synthetic construct
  misc_feature 1..23: note = Description of Artificial Sequence: Synthetic oligonucleotide
  source 1..23: mol_type = other RNA
ttaggacacccattgaaaagtca

SEQ ID NO: 451 - RNA, 23 nt, synthetic construct
  misc_feature 1..23: note = Description of Artificial Sequence: Synthetic oligonucleotide
  source 1..23: mol_type = other RNA
tcaatgtcttgtcgatgactttc

SEQ ID NO: 452 - RNA, 23 nt, synthetic construct
  misc_feature 1..23: note = Description of Artificial Sequence: Synthetic oligonucleotide
  source 1..23: mol_type = other RNA
tctcaccaatgtcttgtcgatga

SEQ ID NO: 453 - RNA, 23 nt, synthetic construct
  misc_feature 1..23: note = Description of Artificial Sequence: Synthetic oligonucleotide
  source 1..23: mol_type = other RNA
tatcttgaacacctttctccccc

SEQ ID NO: 454 - RNA, 23 nt, synthetic construct
  misc_feature 1..23: note = Description of Artificial Sequence: Synthetic oligonucleotide
  source 1..23: mol_type = other RNA
tctaggacacccattgaaaagtc

SEQ ID NO: 455 - RNA, 23 nt, synthetic construct
  misc_feature 1..23: note = Description of Artificial Sequence: Synthetic oligonucleotide
  source 1..23: mol_type = other RNA
tgttcctaggacacccattgaaa

SEQ ID NO: 456 - RNA, 23 nt, synthetic construct
  misc_feature 1..23: note = Description of Artificial Sequence: Synthetic oligonucleotide
  source 1..23: mol_type = other RNA
tgacacccattgaaaagtcaaaa

SEQ ID NO: 457 - RNA, 23 nt, synthetic construct
  misc_feature 1..23: note = Description of Artificial Sequence: Synthetic oligonucleotide
  source 1..23: mol_type = other RNA
taatgtcttgtcgatgactttca

SEQ ID NO: 458 - RNA, 23 nt, synthetic construct
  misc_feature 1..23: note = Description of Artificial Sequence: Synthetic oligonucleotide
  source 1..23: mol_type = other RNA
ttgaacacctttctccccctgga

SEQ ID NO: 459 - RNA, 23 nt, synthetic construct
  misc_feature 1..23: note = Description of Artificial Sequence: Synthetic oligonucleotide
  source 1..23: mol_type = other RNA
aaggatttttcctcaccaatgtc

SEQ ID NO: 460 - RNA, 23 nt, synthetic construct
  misc_feature 1..23: note = Description of Artificial Sequence: Synthetic oligonucleotide
  source 1..23: mol_type = other RNA
aggatttttcctcaccaatgtct

SEQ ID NO: 461 - RNA, 23 nt, synthetic construct
  misc_feature 1..23: note = Description of Artificial Sequence: Synthetic oligonucleotide
  source 1..23: mol_type = other RNA
tttgaacacctttctccccctgg

SEQ ID NO: 462 - RNA, 23 nt, synthetic construct
  misc_feature 1..23: note = Description of Artificial Sequence: Synthetic oligonucleotide
  source 1..23: mol_type = other RNA
ttcaaaatttttcatcctgagtt

SEQ ID NO: 463 - RNA, 23 nt, synthetic construct
  misc_feature 1..23: note = Description of Artificial Sequence: Synthetic oligonucleotide
  source 1..23: mol_type = other RNA
tttgtcaagtaatacatgctgaa

SEQ ID NO: 464 - RNA, 23 nt, synthetic construct
  misc_feature 1..23: note = Description of Artificial Sequence: Synthetic oligonucleotide
  source 1..23: mol_type = other RNA
tgatttagcatgttgttcataat

SEQ ID NO: 465 - RNA, 23 nt, synthetic construct
  misc_feature 1..23: note = Description of Artificial Sequence: Synthetic oligonucleotide
  source 1..23: mol_type = other RNA
tcctaaaacatttggatatattc

SEQ ID NO: 466 - RNA, 23 nt, synthetic construct
  misc_feature 1..23: note = Description of Artificial Sequence: Synthetic oligonucleotide
  source 1..23: mol_type = other RNA
ttggatacagcttccatctggaa

SEQ ID NO: 467 - RNA, 23 nt, synthetic construct
  misc_feature 1..23: note = Description of Artificial Sequence: Synthetic oligonucleotide
  source 1..23: mol_type = other RNA
tatatttccaggatgaaagtcca

SEQ ID NO: 468 - RNA, 23 nt, synthetic construct
  misc_feature 1..23: note = Description of Artificial Sequence: Synthetic oligonucleotide
  source 1..23: mol_type = other RNA
attgatacaaattagccggggga

SEQ ID NO: 469 - RNA, 23 nt, synthetic construct
  misc_feature 1..23: note = Description of Artificial Sequence: Synthetic oligonucleotide
  source 1..23: mol_type = other RNA
tcccattcaagccatgtttaaca

SEQ ID NO: 470 - RNA, 23 nt, synthetic construct
  misc_feature 1..23: note = Description of Artificial Sequence: Synthetic oligonucleotide
  source 1..23: mol_type = other RNA
atgacgttgtctaaacacatttt

SEQ ID NO: 471 - RNA, 23 nt, synthetic construct
  misc_feature 1..23: note = Description of Artificial Sequence: Synthetic oligonucleotide
  source 1..23: mol_type = other RNA
aaccggaattcttcctttagtat

SEQ ID NO: 472 - RNA, 23 nt, synthetic construct
  misc_feature 1..23: note = Description of Artificial Sequence: Synthetic oligonucleotide
  source 1..23: mol_type = other RNA
atcctaaaacatttggatatatt

SEQ ID NO: 473 - RNA, 23 nt, synthetic construct
  misc_feature 1..23: note = Description of Artificial Sequence: Synthetic oligonucleotide
  source 1..23: mol_type = other RNA
aacatcagtgcctttccgcacac

SEQ ID NO: 474 - RNA, 23 nt, synthetic construct
  misc_feature 1..23: note = Description of Artificial Sequence: Synthetic oligonucleotide
  source 1..23: mol_type = other RNA
aatttaagaaccactgttttaaa

SEQ ID NO: 475 - RNA, 23 nt, synthetic construct
  misc_feature 1..23: note = Description of Artificial Sequence: Synthetic oligonucleotide
  source 1..23: mol_type = other RNA
actggtttcaaaatttttcatcc

SEQ ID NO: 476 - RNA, 23 nt, synthetic construct
  misc_feature 1..23: note = Description of Artificial Sequence: Synthetic oligonucleotide
  source 1..23: mol_type = other RNA
aaaagggattgctattttgttgg

SEQ ID NO: 477 - RNA, 23 nt, synthetic construct
  misc_feature 1..23: note = Description of Artificial Sequence: Synthetic oligonucleotide
  source 1..23: mol_type = other RNA
aagtcgacagatctgtttcagca

SEQ ID NO: 478 - RNA, 23 nt, synthetic construct
  misc_feature 1..23: note = Description of Artificial Sequence: Synthetic oligonucleotide
  source 1..23: mol_type = other RNA
tcaaaatgccctttgcaacaatt

SEQ ID NO: 479 - RNA, 23 nt, synthetic construct
  misc_feature 1..23: note = Description of Artificial Sequence: Synthetic oligonucleotide
  source 1..23: mol_type = other RNA
tacaggttaataaacaatgagat

SEQ ID NO: 480 - RNA, 23 nt, synthetic construct
  misc_feature 1..23: note = Description of Artificial Sequence: Synthetic oligonucleotide
  source 1..23: mol_type = other RNA
aaagggattgctattttgttgga

SEQ ID NO: 481 - RNA, 23 nt, synthetic construct
  misc_feature 1..23: note = Description of Artificial Sequence: Synthetic oligonucleotide
  source 1..23: mol_type = other RNA
aatacaggttaataaacaatgag

SEQ ID NO: 482 - RNA, 23 nt, synthetic construct
  misc_feature 1..23: note = Description of Artificial Sequence: Synthetic oligonucleotide
  source 1..23: mol_type = other RNA
ttgatatcttcccagctgataga

SEQ ID NO: 483 - RNA, 23 nt, synthetic construct
  misc_feature 1..23: note = Description of Artificial Sequence: Synthetic oligonucleotide
  source 1..23: mol_type = other RNA
ttctaaaaggttcctaggacacc

SEQ ID NO: 484 - RNA, 23 nt, synthetic construct
  misc_feature 1..23: note = Description of Artificial Sequence: Synthetic oligonucleotide
  source 1..23: mol_type = other RNA
agggattgctattttgttggaaa

SEQ ID NO: 485 - RNA, 23 nt, synthetic construct
  misc_feature 1..23: note = Description of Artificial Sequence: Synthetic oligonucleotide
  source 1..23: mol_type = other RNA
atcagtgcctttccgcacacccc

SEQ ID NO: 486 - RNA, 23 nt, synthetic construct
  misc_feature 1..23: note = Description of Artificial Sequence: Synthetic oligonucleotide
  source 1..23: mol_type = other RNA
atgataaagtactggtttcaaaa

SEQ ID NO: 487 - RNA, 23 nt, synthetic construct
  misc_feature 1..23: note = Description of Artificial Sequence: Synthetic oligonucleotide
  source 1..23: mol_type = other RNA
tatatatagactttggaagtact

SEQ ID NO: 488 - RNA, 23 nt, synthetic construct
  misc_feature 1..23: note = Description of Artificial Sequence: Synthetic oligonucleotide
  source 1..23: mol_type = other RNA
atttctaaaaggttcctaggaca

SEQ ID NO: 489 - RNA, 23 nt, synthetic construct
  misc_feature 1..23: note = Description of Artificial Sequence: Synthetic oligonucleotide
  source 1..23: mol_type = other RNA
ttccaaaattttcctcaggagaa

SEQ ID NO: 490 - RNA, 23 nt, synthetic construct
  misc_feature 1..23: note = Description of Artificial Sequence: Synthetic oligonucleotide
  source 1..23: mol_type = other RNA
atttcagcaacattccggagcat

SEQ ID NO: 491 - RNA, 23 nt, synthetic construct
  misc_feature 1..23: note = Description of Artificial Sequence: Synthetic oligonucleotide
  source 1..23: mol_type = other RNA
tattggtctccccacaaacacag

SEQ ID NO: 492 - RNA, 21 nt, synthetic construct
  misc_feature 1..21: note = Description of Artificial Sequence: Synthetic oligonucleotide
  source 1..21: mol_type = other RNA
atggtggtaatttgtgatttt

SEQ ID NO: 493 - RNA, 21 nt, synthetic construct
  misc_feature 1..21: note = Description of Artificial Sequence: Synthetic oligonucleotide
  source 1..21: mol_type = other RNA
gacttgcatcctggaaatata

SEQ ID NO: 494 - RNA, 21 nt, synthetic construct
  misc_feature 1..21: note = Description of Artificial Sequence: Synthetic oligonucleotide
  source 1..21: mol_type = other RNA
ggaagggaaggtagaagtctt

SEQ ID NO: 495 - RNA, 21 nt, synthetic construct
  misc_feature 1..21: note = Description of Artificial Sequence: Synthetic oligonucleotide
  source 1..21: mol_type = other RNA
tgtcttctgtttagatttcct

SEQ ID NO: 496 - RNA, 21 nt, synthetic construct
  misc_feature 1..21: note = Description of Artificial Sequence: Synthetic oligonucleotide
  source 1..21: mol_type = other RNA
ctttggctgtttccaagatct

SEQ ID NO: 497 - RNA, 21 nt, synthetic construct
  misc_feature 1..21: note = Description of Artificial Sequence: Synthetic oligonucleotide
  source 1..21: mol_type = other RNA
aatgtgtttgggcaacgtcat

SEQ ID NO: 498 - RNA, 21 nt, synthetic construct
  misc_feature 1..21: note = Description of Artificial Sequence: Synthetic oligonucleotide
  source 1..21: mol_type = other RNA
tgtgactgtggacacccctta

SEQ ID NO: 499 - RNA, 21 nt, synthetic construct
  misc_feature 1..21: note = Description of Artificial Sequence: Synthetic oligonucleotide
  source 1..21: mol_type = other RNA
gatggggtgccagctactatt

SEQ ID NO: 500 - RNA, 21 nt, synthetic construct
  misc_feature 1..21: note = Description of Artificial Sequence: Synthetic oligonucleotide
  source 1..21: mol_type = other RNA
gaaaatgtgtttgggcaacgt

SEQ ID NO: 501 - RNA, 21 nt, synthetic construct
  misc_feature 1..21: note = Description of Artificial Sequence: Synthetic oligonucleotide
  source 1..21: mol_type = other RNA
ggctgtttccaagatctgaca

SEQ ID NO: 502 - RNA, 21 nt, synthetic construct
  misc_feature 1..21: note = Description of Artificial Sequence: Synthetic oligonucleotide
  source 1..21: mol_type = other RNA
tccaacaaaatagccacccct

SEQ ID NO: 503 - RNA, 21 nt, synthetic construct
  misc_feature 1..21: note = Description of Artificial Sequence: Synthetic oligonucleotide
  source 1..21: mol_type = other RNA
gtcttctgtttagatttcctt

SEQ ID NO: 504 - RNA, 21 nt, synthetic construct
  misc_feature 1..21: note = Description of Artificial Sequence: Synthetic oligonucleotide
  source 1..21: mol_type = other RNA
tggaagggaaggtagaagtct

SEQ ID NO: 505 - RNA, 21 nt, synthetic construct
  misc_feature 1..21: note = Description of Artificial Sequence: Synthetic oligonucleotide
  source 1..21: mol_type = other RNA
tcctttggctgtttccaagat

SEQ ID NO: 506 - RNA, 21 nt, synthetic construct
  misc_feature 1..21: note = Description of Artificial Sequence: Synthetic oligonucleotide
  source 1..21: mol_type = other RNA
catctctcagctgggatgata

SEQ ID NO: 507 - RNA, 21 nt, synthetic construct
  misc_feature 1..21: note = Description of Artificial Sequence: Synthetic oligonucleotide
  source 1..21: mol_type = other RNA
ggggtgccagctactattgat

SEQ ID NO: 508 - RNA, 21 nt, synthetic construct
  misc_feature 1..21: note = Description of Artificial Sequence: Synthetic oligonucleotide
  source 1..21: mol_type = other RNA
atgtgtttgggcaacgtcata

SEQ ID NO: 509 - RNA, 21 nt, synthetic construct
  misc_feature 1..21: note = Description of Artificial Sequence: Synthetic oligonucleotide
  source 1..21: mol_type = other RNA
ctgtttagatttccttaagaa

SEQ ID NO: 510 - RNA, 21 nt, synthetic construct
  misc_feature 1..21: note = Description of Artificial Sequence: Synthetic oligonucleotide
  source 1..21: mol_type = other RNA
agaaagaaatggacttgcata

SEQ ID NO: 511 - RNA, 21 nt, synthetic construct
  misc_feature 1..21: note = Description of Artificial Sequence: Synthetic oligonucleotide
  source 1..21: mol_type = other RNA
gcatcctggaaatatattaaa

SEQ ID NO: 512 - RNA, 21 nt, synthetic construct
  misc_feature 1..21: note = Description of Artificial Sequence: Synthetic oligonucleotide
  source 1..21: mol_type = other RNA
cctgtcagaccatgggaacta

SEQ ID NO: 513 - RNA, 21 nt, synthetic construct
  misc_feature 1..21: note = Description of Artificial Sequence: Synthetic oligonucleotide
  source 1..21: mol_type = other RNA
aaacatggtgtggatgggata

SEQ ID NO: 514 - RNA, 23 nt, synthetic construct
  misc_feature 1..23: note = Description of Artificial Sequence: Synthetic oligonucleotide
  source 1..23: mol_type = other RNA
aaaatcacaaattaccaccatcc

SEQ ID NO: 515 - RNA, 23 nt, synthetic construct
  misc_feature 1..23: note = Description of Artificial Sequence: Synthetic oligonucleotide
  source 1..23: mol_type = other RNA
tatatttccaggatgcaagtcca

SEQ ID NO: 516 - RNA, 23 nt, synthetic construct
  misc_feature 1..23: note = Description of Artificial Sequence: Synthetic oligonucleotide
  source 1..23: mol_type = other RNA
aagacttctaccttcccttccac

SEQ ID NO: 517 - RNA, 23 nt, synthetic construct
  misc_feature 1..23: note = Description of Artificial Sequence: Synthetic oligonucleotide
  source 1..23: mol_type = other RNA
aggaaatctaaacagaagacagg

SEQ ID NO: 518 - RNA, 23 nt, synthetic construct
  misc_feature 1..23: note = Description of Artificial Sequence: Synthetic oligonucleotide
  source 1..23: mol_type = other RNA
agatcttggaaacagccaaagga

SEQ ID NO: 519 - RNA, 23 nt, synthetic construct
  misc_feature 1..23: note = Description of Artificial Sequence: Synthetic oligonucleotide
  source 1..23: mol_type = other RNA
atgacgttgcccaaacacatttt

SEQ ID NO: 520 - RNA, 23 nt, synthetic construct
  misc_feature 1..23: note = Description of Artificial Sequence: Synthetic oligonucleotide
  source 1..23: mol_type = other RNA
taaggggtgtccacagtcacaaa

SEQ ID NO: 521 - RNA, 23 nt, synthetic construct
  misc_feature 1..23: note = Description of Artificial Sequence: Synthetic oligonucleotide
  source 1..23: mol_type = other RNA
aatagtagctggcaccccatcca

SEQ ID NO: 522 - RNA, 23 nt, synthetic construct
  misc_feature 1..23: note = Description of Artificial Sequence: Synthetic oligonucleotide
  source 1..23: mol_type = other RNA
acgttgcccaaacacattttcaa

SEQ ID NO: 523 - RNA, 23 nt, synthetic construct
  misc_feature 1..23: note = Description of Artificial Sequence: Synthetic oligonucleotide
  source 1..23: mol_type = other RNA
tgtcagatcttggaaacagccaa

SEQ ID NO: 524 - RNA, 23 nt, synthetic construct
  misc_feature 1..23: note = Description of Artificial Sequence: Synthetic oligonucleotide
  source 1..23: mol_type = other RNA
aggggtggctattttgttggaaa

SEQ ID NO: 525 - RNA, 23 nt, synthetic construct
  misc_feature 1..23: note = Description of Artificial Sequence: Synthetic oligonucleotide
  source 1..23: mol_type = other RNA
aaggaaatctaaacagaagacag

SEQ ID NO: 526 - RNA, 23 nt, synthetic construct
  misc_feature 1..23: note = Description of Artificial Sequence: Synthetic oligonucleotide
  source 1..23: mol_type = other RNA
agacttctaccttcccttccaca

SEQ ID NO: 527 - RNA, 23 nt, synthetic construct
  misc_feature 1..23: note = Description of Artificial Sequence: Synthetic oligonucleotide
  source 1..23: mol_type = other RNA
atcttggaaacagccaaaggatt

SEQ ID NO: 528 - RNA, 23 nt, synthetic construct
  misc_feature 1..23: note = Description of Artificial Sequence: Synthetic oligonucleotide
  source 1..23: mol_type = other RNA
tatcatcccagctgagagatggg

SEQ ID NO: 529 - RNA, 23 nt, synthetic construct
  misc_feature 1..23: note = Description of Artificial Sequence: Synthetic oligonucleotide
  source 1..23: mol_type = other RNA
atcaatagtagctggcaccccat

SEQ ID NO: 530 - RNA, 23 nt, synthetic construct
  misc_feature 1..23: note = Description of Artificial Sequence: Synthetic oligonucleotide
  source 1..23: mol_type = other RNA
tatgacgttgcccaaacacattt

SEQ ID NO: 531 - RNA, 23 nt, synthetic construct
  misc_feature 1..23: note = Description of Artificial Sequence: Synthetic oligonucleotide
  source 1..23: mol_type = other RNA
ttcttaaggaaatctaaacagaa

SEQ ID NO: 532 - RNA, 23 nt, synthetic construct
  misc_feature 1..23: note = Description of Artificial Sequence: Synthetic oligonucleotide
  source 1..23: mol_type = other RNA
tatgcaagtccatttctttctag

SEQ ID NO: 533 - RNA, 23 nt, synthetic construct
  misc_feature 1..23: note = Description of Artificial Sequence: Synthetic oligonucleotide
  source 1..23: mol_type = other RNA
tttaatatatttccaggatgcaa

SEQ ID NO: 534 - RNA, 23 nt, synthetic construct
  misc_feature 1..23: note = Description of Artificial Sequence: Synthetic oligonucleotide
  source 1..23: mol_type = other RNA
tagttcccatggtctgacaggct

SEQ ID NO: 535 - RNA, 23 nt, synthetic construct
  misc_feature 1..23: note = Description of Artificial Sequence: Synthetic oligonucleotide
  source 1..23: mol_type = other RNA
tatcccatccacaccatgtttaa

SEQ ID NO: 536 - RNA, 21 nt, synthetic construct
  misc_feature 1..21: note = Description of Artificial Sequence: Synthetic oligonucleotide
  source 1..21: mol_type = other RNA
gaatgtgaaagtcatcgacaa

SEQ ID NO: 537 - RNA, 21 nt, synthetic construct
  misc_feature 1..21: note = Description of Artificial Sequence: Synthetic oligonucleotide
  source 1..21: mol_type = other RNA
gaatgtgaaagtcatcgacaa

SEQ ID NO: 538 - RNA, 21 nt, synthetic construct
  misc_feature 1..21: note = Description of Artificial Sequence: Synthetic oligonucleotide
  source 1..21: mol_type = other RNA
gaatgtgaaagtcatcgacaa

SEQ ID NO: 539 - RNA, 21 nt, synthetic construct
  misc_feature 1..21: note = Description of Artificial Sequence: Synthetic oligonucleotide
  source 1..21: mol_type = other RNA
gaatgtgaaagtcatcgacaa

SEQ ID NO: 540 - RNA, 21 nt, synthetic construct
  misc_feature 1..21: note = Description of Artificial Sequence: Synthetic oligonucleotide
  source 1..21: mol_type = other RNA
gaatgtgaaagtcatcgacaa

SEQ ID NO: 541 - RNA, 21 nt, synthetic construct
  misc_feature 1..21: note = Description of Artificial Sequence: Synthetic oligonucleotide
  source 1..21: mol_type = other RNA
gaatgtgaaagtcatcgacaa

SEQ ID NO: 542 - RNA, 21 nt, synthetic construct
  misc_feature 1..21: note = Description of Artificial Sequence: Synthetic oligonucleotide
  source 1..21: mol_type = other RNA
gaatgtgaaagtcatcgacaa

SEQ ID NO: 543 - RNA, 21 nt, synthetic construct
  misc_feature 1..21: note = Description of Artificial Sequence: Synthetic oligonucleotide
  source 1..21: mol_type = other RNA
gaatgtgaaagtcatcgacaa

SEQ ID NO: 544 - RNA, 19 nt, synthetic construct
  misc_feature 1..19: note = Description of Artificial Sequence: Synthetic oligonucleotide
  source 1..19: mol_type = other RNA
atgtgaaagtcatcgacaa

SEQ ID NO: 545 - RNA, 19 nt, synthetic construct
  misc_feature 1..19: note = Description of Artificial Sequence: Synthetic oligonucleotide
  source 1..19: mol_type = other RNA
atgtgaaagtcatcgacaa

SEQ ID NO: 546 - RNA, 21 nt, synthetic construct
  misc_feature 1..21: note = Description of Artificial Sequence: Synthetic oligonucleotide
  source 1..21: mol_type = other RNA
gaatgtgaaagtcatcgacaa

SEQ ID NO: 547 - RNA, 21 nt, synthetic construct
  misc_feature 1..21: note = Description of Artificial Sequence: Synthetic oligonucleotide
  source 1..21: mol_type = other RNA
gaatgtgaaagtcatcgacaa

SEQ ID NO: 548 - RNA, 21 nt, synthetic construct
  misc_feature 1..21: note = Description of Artificial Sequence: Synthetic oligonucleotide
  source 1..21: mol_type = other RNA
gaatgtgaaagtcatcgacaa

SEQ ID NO: 549 - RNA, 21 nt, synthetic construct
  misc_feature 1..21: note = Description of Artificial Sequence: Synthetic oligonucleotide
  source 1..21: mol_type = other RNA
gaatgtgaaagtcatcgacaa

SEQ ID NO: 550 - RNA, 21 nt, synthetic construct
  misc_feature 1..21: note = Description of Artificial Sequence: Synthetic oligonucleotide
  source 1..21: mol_type = other RNA
gaatgtgaaagtcatcgacaa

SEQ ID NO: 551 - RNA, 21 nt, synthetic construct
  misc_feature 1..21: note = Description of Artificial Sequence: Synthetic oligonucleotide
  source 1..21: mol_type = other RNA
gaatgtgaaagtcatcgacaa

SEQ ID NO: 552 - RNA, 21 nt, synthetic construct
  misc_feature 1..21: note = Description of Artificial Sequence: Synthetic oligonucleotide
  source 1..21: mol_type = other RNA
gaatgtgaaagtcatcgacaa

SEQ ID NO: 553 - RNA, 21 nt, synthetic construct
  misc_feature 1..21: note = Description of Artificial Sequence: Synthetic oligonucleotide
  source 1..21: mol_type = other RNA
gaatgtgaaagtcatcgacaa

SEQ ID NO: 554 - RNA, 21 nt, synthetic construct
  misc_feature 1..21: note = Description of Artificial Sequence: Synthetic oligonucleotide
  source 1..21: mol_type = other RNA
gaatgtgaaagtcatcgacaa

SEQ ID NO: 555 - RNA, 21 nt, synthetic construct
  misc_feature 1..21: note = Description of Artificial Sequence: Synthetic oligonucleotide
  source 1..21: mol_type = other RNA
gaatgtgaaagtcatcgacaa

SEQ ID NO: 556 - RNA, 21 nt, synthetic construct
  misc_feature 1..21: note = Description of Artificial Sequence: Synthetic oligonucleotide
  source 1..21: mol_type = other RNA
gaatgtgaaagtcatcgacaa

SEQ ID NO: 557 - DNA, 21 bp, synthetic construct
  misc_feature 1..21: note = Description of Artificial Sequence: Synthetic oligonucleotide
  source 1..21: mol_type = other DNA
gaatgtgaaagtcatcgacaa

SEQ ID NO: 558 - RNA, 21 nt, synthetic construct
  misc_feature 1..21: note = Description of Artificial Sequence: Synthetic oligonucleotide
  source 1..21: mol_type = other RNA
gaatgtgaaagtcatcgacaa

SEQ ID NO: 559 - DNA, 21 bp, synthetic construct
  misc_feature 1..21: note = Description of Artificial Sequence: Synthetic oligonucleotide
  source 1..21: mol_type = other DNA
gaatgtgaaagtcatcgacaa

SEQ ID NO: 560 - RNA, 21 nt, synthetic construct
  misc_feature 1..21: note = Description of Artificial Sequence: Synthetic oligonucleotide
  source 1..21: mol_type = other RNA
gaatgtgaaagtcatcgacaa

SEQ ID NO: 561 - RNA, 21 nt, synthetic construct
  misc_feature 1..21: note = Description of Artificial Sequence: Synthetic oligonucleotide
  source 1..21: mol_type = other RNA
gaatgtgaaagtcatcgacaa

SEQ ID NO: 562 - DNA, 21 bp, synthetic construct
  misc_feature 1..21: note = Description of Artificial Sequence: Synthetic oligonucleotide
  source 1..21: mol_type = other DNA
gaatgtgaaagtcatctacaa

SEQ ID NO: 563 - RNA, 20 nt, synthetic construct
  misc_feature 1..20: note = Description of Artificial Sequence: Synthetic oligonucleotide
  source 1..20: mol_type = other RNA
gaatgtgaaagtcatcacaa

SEQ ID NO: 564 - DNA, 21 bp, synthetic construct
  misc_feature 1..21: note = Description of Artificial Sequence: Synthetic oligonucleotide
  source 1..21: mol_type = other DNA
gaatgtgaaagtcatctacaa

SEQ ID NO: 565 - RNA, 21 nt, synthetic construct
  misc_feature 1..21: note = Description of Artificial Sequence: Synthetic oligonucleotide
  source 1..21: mol_type = other RNA
gaatgtgaaagtcatcgacaa

SEQ ID NO: 566 - DNA, 21 bp, synthetic construct
  misc_feature 1..21: note = Description of Artificial Sequence: Synthetic oligonucleotide
  source 1..21: mol_type = other DNA
gaatgtgaaagtcatctacaa

SEQ ID NO: 567 - RNA, 20 nt, synthetic construct
  misc_feature 1..20: note = Description of Artificial Sequence: Synthetic oligonucleotide
  source 1..20: mol_type = other RNA
gaatgtgaaagtcatcacaa

SEQ ID NO: 568 - RNA, 21 nt, synthetic construct
  misc_feature 1..21: note = Description of Artificial Sequence: Synthetic oligonucleotide
  source 1..21: mol_type = other RNA
gaatgtgaaagtcatcgacaa

SEQ ID NO: 569 - RNA, 21 nt, synthetic construct
  misc_feature 1..21: note = Description of Artificial Sequence: Synthetic oligonucleotide
  source 1..21: mol_type = other RNA
gaatgtgaaagtcatcgacaa

SEQ ID NO: 570 - RNA, 21 nt, synthetic construct
  misc_feature 1..21: note = Description of Artificial Sequence: Synthetic oligonucleotide
  source 1..21: mol_type = other RNA
gaatgtgaaagtcatcgacaa

SEQ ID NO: 571 - RNA, 21 nt, synthetic construct
  misc_feature 1..21: note = Description of Artificial Sequence: Synthetic oligonucleotide
  source 1..21: mol_type = other RNA
gaatgtgaaagtcatcgacaa

SEQ ID NO: 572 - RNA, 21 nt, synthetic construct
  misc_feature 1..21: note = Description of Artificial Sequence: Synthetic oligonucleotide
  source 1..21: mol_type = other RNA
gaatgtgaaagtcatcgacaa

SEQ ID NO: 573 - RNA, 21 nt, synthetic construct
  misc_feature 1..21: note = Description of Artificial Sequence: Synthetic oligonucleotide
  source 1..21: mol_type = other RNA
gaatgtgaaagtcatcgacaa

SEQ ID NO: 574 - RNA, 21 nt, synthetic construct
  misc_feature 1..21: note = Description of Artificial Sequence: Synthetic oligonucleotide
  source 1..21: mol_type = other RNA
gaatgtgaaagtcatcgacaa

SEQ ID NO: 575 - RNA, 21 nt, synthetic construct
  misc_feature 1..21: note = Description of Artificial Sequence: Synthetic oligonucleotide
  source 1..21: mol_type = other RNA
gactttcatcctggaaatata

SEQ ID NO: 576 - RNA, 21 nt, synthetic construct
  misc_feature 1..21: note = Description of Artificial Sequence: Synthetic oligonucleotide
  source 1..21: mol_type = other RNA
gactttcatcctggaaatata

SEQ ID NO: 577 - RNA, 21 nt, synthetic construct
  misc_feature 1..21: note = Description of Artificial Sequence: Synthetic oligonucleotide
  source 1..21: mol_type = other RNA
gactttcatcctggaaatata

SEQ ID NO: 578 - RNA, 21 nt, synthetic construct
  misc_feature 1..21: note = Description of Artificial Sequence: Synthetic oligonucleotide
  source 1..21: mol_type = other RNA
gactttcatcctggaaatata

SEQ ID NO: 579 - RNA, 21 nt, synthetic construct
  misc_feature 1..21: note = Description of Artificial Sequence: Synthetic oligonucleotide
  source 1..21: mol_type = other RNA
gactttcatcctggaaatata

SEQ ID NO: 580 - RNA, 21 nt, synthetic construct
  misc_feature 1..21: note = Description of Artificial Sequence: Synthetic oligonucleotide
  source 1..21: mol_type = other RNA
gactttcatcctggaaatata

SEQ ID NO: 581 - RNA, 19 nt, synthetic construct
  misc_feature 1..19: note = Description of Artificial Sequence: Synthetic oligonucleotide
  source 1..19: mol_type = other RNA
ctttcatcctggaaatata

SEQ ID NO: 582 - RNA, 19 nt, synthetic construct
  misc_feature 1..19: note = Description of Artificial Sequence: Synthetic oligonucleotide
  source 1..19: mol_type = other RNA
ctttcatcctggaaatata

SEQ ID NO: 583 - RNA, 21 nt, synthetic construct
  misc_feature 1..21: note = Description of Artificial Sequence: Synthetic oligonucleotide
  source 1..21: mol_type = other RNA
gactttcatcctggaaatata

SEQ ID NO: 584 - RNA, 21 nt, synthetic construct
  misc_feature 1..21: note = Description of Artificial Sequence: Synthetic oligonucleotide
  source 1..21: mol_type = other RNA
gactttcatcctggaaatata

SEQ ID NO: 585 - RNA, 21 nt, synthetic construct
  misc_feature 1..21: note = Description of Artificial Sequence: Synthetic oligonucleotide
  source 1..21: mol_type = other RNA
gactttcatcctggaaatata

SEQ ID NO: 586 - RNA, 21 nt, synthetic construct
  misc_feature 1..21: note = Description of Artificial Sequence: Synthetic oligonucleotide
  source 1..21: mol_type = other RNA
gactttcatcctggaaatata

SEQ ID NO: 587 - RNA, 21 nt, synthetic construct
  misc_feature 1..21: note = Description of Artificial Sequence: Synthetic oligonucleotide
  source 1..21: mol_type = other RNA
gactttcatcctggaaatata

SEQ ID NO: 588 - RNA, 21 nt, synthetic construct
  misc_feature 1..21: note = Description of Artificial Sequence: Synthetic oligonucleotide
  source 1..21: mol_type = other RNA
gactttcatcctggaaatata

SEQ ID NO: 589 - RNA, 21 nt, synthetic construct
  misc_feature 1..21: note = Description of Artificial Sequence: Synthetic oligonucleotide
  source 1..21: mol_type = other RNA
gactttcatcctggaaatata

SEQ ID NO: 590 - RNA, 21 nt, synthetic construct
  misc_feature 1..21: note = Description of Artificial Sequence: Synthetic oligonucleotide
  source 1..21: mol_type = other RNA
gactttcatcctggaaatata

SEQ ID NO: 591 - RNA, 21 nt, synthetic construct
  misc_feature 1..21: note = Description of Artificial Sequence: Synthetic oligonucleotide
  source 1..21: mol_type = other RNA
gactttcatcctggaaatata

SEQ ID NO: 592 - RNA, 21 nt, synthetic construct
  misc_feature 1..21: note = Description of Artificial Sequence: Synthetic oligonucleotide
  source 1..21: mol_type = other RNA
gactttcatcctggaaatata

SEQ ID NO: 593 - RNA, 21 nt, synthetic construct
  misc_feature 1..21: note = Description of Artificial Sequence: Synthetic oligonucleotide
  source 1..21: mol_type = other RNA
gactttcatcctggaaatata

SEQ ID NO: 594 - RNA, 21 nt, synthetic construct
  misc_feature 1..21: note = Description of Artificial Sequence: Synthetic oligonucleotide
  source 1..21: mol_type = other RNA
gactttcatcctggaaatata

SEQ ID NO: 595 - RNA, 21 nt, synthetic construct
  misc_feature 1..21: note = Description of Artificial Sequence: Synthetic oligonucleotide
  source 1..21: mol_type = other RNA
gactttcatcctggaaatata

SEQ ID NO: 596 - DNA, 21 bp, synthetic construct
  misc_feature 1..21: note = Description of Artificial Sequence: Synthetic oligonucleotide
  source 1..21: mol_type = other DNA
gactttcatcctggaaatata

SEQ ID NO: 597 - DNA, 21 bp, synthetic construct
  misc_feature 1..21: note = Description of Artificial Sequence: Synthetic oligonucleotide
  source 1..21: mol_type = other DNA
gactttcatcctggaaatata

SEQ ID NO: 598 - RNA, 21 nt, synthetic construct
  misc_feature 1..21: note = Description of Artificial Sequence: Synthetic oligonucleotide
  source 1..21: mol_type = other RNA
gactttcatcctggaaatata

SEQ ID NO: 599 - RNA, 21 nt, synthetic construct
  misc_feature 1..21: note = Description of Artificial Sequence: Synthetic oligonucleotide
  source 1..21: mol_type = other RNA
gactttcatcctggaaatata

SEQ ID NO: 600 - DNA, 21 bp, synthetic construct
  misc_feature 1..21: note = Description of Artificial Sequence: Synthetic oligonucleotide
  source 1..21: mol_type = other DNA
gactttcatcctggaattata

SEQ ID NO: 601 - RNA, 20 nt, synthetic construct
  misc_feature 1..20: note = Description of Artificial Sequence: Synthetic oligonucleotide
  source 1..20: mol_type = other RNA
gactttcatcctggaatata

SEQ ID NO: 602 - DNA, 21 bp, synthetic construct
  misc_feature 1..21: note = Description of Artificial Sequence: Synthetic oligonucleotide
  source 1..21: mol_type = other DNA
gactttcatcctggaattata

SEQ ID NO: 603 - DNA, 21 bp, synthetic construct
  misc_feature 1..21: note = Description of Artificial Sequence: Synthetic oligonucleotide
  source 1..21: mol_type = other DNA
gactttcatcctggaattata

SEQ ID NO: 604 - RNA, 21 nt, synthetic construct
  misc_feature 1..21: note = Description of Artificial Sequence: Synthetic oligonucleotide
  source 1..21: mol_type = other RNA
gactttcatcctggaaatata

SEQ ID NO: 605 - DNA, 21 bp, synthetic construct
  misc_feature 1..21: note = Description of Artificial Sequence: Synthetic oligonucleotide
  source 1..21: mol_type = other DNA
gactttcatcctggaaatata

SEQ ID NO: 606 - RNA, 21 nt, synthetic construct
  misc_feature 1..21: note = Description of Artificial Sequence: Synthetic oligonucleotide
  source 1..21: mol_type = other RNA
gactttcatcctggaaatata

SEQ ID NO: 607 - RNA, 21 nt, synthetic construct
  misc_feature 1..21: note = Description of Artificial Sequence: Synthetic oligonucleotide
  source 1..21: mol_type = other RNA
gactttcatcctggaaatata

SEQ ID NO: 608 - RNA, 21 nt, synthetic construct
  misc_feature 1..21: note = Description of Artificial Sequence: Synthetic oligonucleotide
  source 1..21: mol_type = other RNA
gactttcatcctggaaatata

SEQ ID NO: 609 - RNA, 21 nt, synthetic construct
  misc_feature 1..21: note = Description of Artificial Sequence: Synthetic oligonucleotide
  source 1..21: mol_type = other RNA
gactttcatcctggaaatata

SEQ ID NO: 610 - RNA, 21 nt, synthetic construct
  misc_feature 1..21: note = Description of Artificial Sequence: Synthetic oligonucleotide
  source 1..21: mol_type = other RNA
gactttcatcctggaaatata

SEQ ID NO: 611 - RNA, 21 nt, synthetic construct
  misc_feature 1..21: note = Description of Artificial Sequence: Synthetic oligonucleotide
  source 1..21: mol_type = other RNA
gactttcatcctggaaatata

SEQ ID NO: 612 - RNA, 21 nt, synthetic construct
  misc_feature 1..21: note = Description of Artificial Sequence: Synthetic oligonucleotide
  source 1..21: mol_type = other RNA
gactttcatcctggaaatata

SEQ ID NO: 613 - RNA, 21 nt, synthetic construct
  misc_feature 1..21: note = Description of Artificial Sequence: Synthetic oligonucleotide
  source 1..21: mol_type = other RNA
gactttcatcctggaaatata

SEQ ID NO: 614 - RNA, 21 nt, synthetic construct
  misc_feature 1..21: note = Description of Artificial Sequence: Synthetic oligonucleotide
  source 1..21: mol_type = other RNA
agaaaggtgttcaagatgtca

SEQ ID NO: 615 - RNA, 21 nt, synthetic construct
  misc_feature 1..21: note = Description of Artificial Sequence: Synthetic oligonucleotide
  source 1..21: mol_type = other RNA
catcctggaaatatattaact

SEQ ID NO: 616 - RNA, 21 nt, synthetic construct
  misc_feature 1..21: note = Description of Artificial Sequence: Synthetic oligonucleotide
  source 1..21: mol_type = other RNA
gaatgtgaaagtcatcgacaa

SEQ ID NO: 617 - RNA, 21 nt, synthetic construct
  misc_feature 1..21: note = Description of Artificial Sequence: Synthetic oligonucleotide
  source 1..21: mol_type = other RNA
agtgcacaatattttcccata

SEQ ID NO: 618 - RNA, 21 nt, synthetic construct
  misc_feature 1..21: note = Description of Artificial Sequence: Synthetic oligonucleotide
  source 1..21: mol_type = other RNA
gaaagtcatcgacaagacatt

SEQ ID NO: 619 - RNA, 21 nt, synthetic construct
  misc_feature 1..21: note = Description of Artificial Sequence: Synthetic oligonucleotide
  source 1..21: mol_type = other RNA
aatgtgaaagtcatcgacaaa

SEQ ID NO: 620 - RNA, 21 nt, synthetic construct
  misc_feature 1..21: note = Description of Artificial Sequence: Synthetic oligonucleotide
  source 1..21: mol_type = other RNA
ctggaaatatattaactgtta

SEQ ID NO: 621 - RNA, 21 nt, synthetic construct
  misc_feature 1..21: note = Description of Artificial Sequence: Synthetic oligonucleotide
  source 1..21: mol_type = other RNA
attttcccatctgtattattt

SEQ ID NO: 622 - RNA, 21 nt, synthetic construct
  misc_feature 1..21: note = Description of Artificial Sequence: Synthetic oligonucleotide
  source 1..21: mol_type = other RNA
tgtcgttcttttccaacaaaa

SEQ ID NO: 623 - RNA, 21 nt, synthetic construct
  misc_feature 1..21: note = Description of Artificial Sequence: Synthetic oligonucleotide
  source 1..21: mol_type = other RNA
atcctggaaatatattaacta

SEQ ID NO: 624 - RNA, 21 nt, synthetic construct
  misc_feature 1..21: note = Description of Artificial Sequence: Synthetic oligonucleotide
  source 1..21: mol_type = other RNA
gcattttgagaggtgatgata

SEQ ID NO: 625 - RNA, 21 nt, synthetic construct
  misc_feature 1..21: note = Description of Artificial Sequence: Synthetic oligonucleotide
  source 1..21: mol_type = other RNA
cagggggagaaaggtgttcaa

SEQ ID NO: 626 - RNA, 21 nt, synthetic construct
  misc_feature 1..21: note = Description of Artificial Sequence: Synthetic oligonucleotide
  source 1..21: mol_type = other RNA
ggaaatatattaactgttaaa

SEQ ID NO: 627 - RNA, 21 nt, synthetic construct
  misc_feature 1..21: note = Description of Artificial Sequence: Synthetic oligonucleotide
  source 1..21: mol_type = other RNA
cattggtgaggaaaaatcctt

SEQ ID NO: 628 - RNA, 21 nt, synthetic construct
  misc_feature 1..21: note = Description of Artificial Sequence: Synthetic oligonucleotide
  source 1..21: mol_type = other RNA
gggagaaaggtgttcaagata

SEQ ID NO: 629 - RNA, 21 nt, synthetic construct
  misc_feature 1..21: note = Description of Artificial Sequence: Synthetic oligonucleotide
  source 1..21: mol_type = other RNA
ggcattttgagaggtgatgat

SEQ ID NO: 630 - RNA, 21 nt, synthetic construct
  misc_feature 1..21: note = Description of Artificial Sequence: Synthetic oligonucleotide
  source 1..21: mol_type = other RNA
tacaaagggtgtcgttctttt

SEQ ID NO: 631 - RNA, 21 nt, synthetic construct
  misc_feature 1..21: note = Description of Artificial Sequence: Synthetic oligonucleotide
  source 1..21: mol_type = other RNA
tgggatcttggtgtcgaatca

SEQ ID NO: 632 - RNA, 21 nt, synthetic construct
  misc_feature 1..21: note = Description of Artificial Sequence: Synthetic oligonucleotide
  source 1..21: mol_type = other RNA
ctgacagtgcacaatatttta

SEQ ID NO: 633 - RNA, 21 nt, synthetic construct
  misc_feature 1..21: note = Description of Artificial Sequence: Synthetic oligonucleotide
  source 1..21: mol_type = other RNA
cagtgcacaatattttcccat

SEQ ID NO: 634 - RNA, 21 nt, synthetic construct
  misc_feature 1..21: note = Description of Artificial Sequence: Synthetic oligonucleotide
  source 1..21: mol_type = other RNA
acttttcaatgggtgtcctaa

SEQ ID NO: 635 - RNA, 21 nt, synthetic construct
  misc_feature 1..21: note = Description of Artificial Sequence: Synthetic oligonucleotide
  source 1..21: mol_type = other RNA
acattggtgaggaaaaatcct

SEQ ID NO: 636 - RNA, 21 nt, synthetic construct
  misc_feature 1..21: note = Description of Artificial Sequence: Synthetic oligonucleotide
  source 1..21: mol_type = other RNA
ttgcttttgacttttcaatga

SEQ ID NO: 637 - RNA, 21 nt, synthetic construct
  misc_feature 1..21: note = Description of Artificial Sequence: Synthetic oligonucleotide
  source 1..21: mol_type = other RNA
cattttgagaggtgatgatga

SEQ ID NO: 638 - RNA, 21 nt, synthetic construct
  misc_feature 1..21: note = Description of Artificial Sequence: Synthetic oligonucleotide
  source 1..21: mol_type = other RNA
ttgacttttcaatgggtgtca

SEQ ID NO: 639 - RNA, 21 nt, synthetic construct
  misc_feature 1..21: note = Description of Artificial Sequence: Synthetic oligonucleotide
  source 1..21: mol_type = other RNA
cgacttctgttttaggacaga

SEQ ID NO: 640 - RNA, 21 nt, synthetic construct
  misc_feature 1..21: note = Description of Artificial Sequence: Synthetic oligonucleotide
  source 1..21: mol_type = other RNA
ctctgagtgggtgccagaata

SEQ ID NO: 641 - RNA, 21 nt, synthetic construct
  misc_feature 1..21: note = Description of Artificial Sequence: Synthetic oligonucleotide
  source 1..21: mol_type = other RNA
gggtgccagaatgtgaaagta

SEQ ID NO: 642 - RNA, 21 nt, synthetic construct
  misc_feature 1..21: note = Description of Artificial Sequence: Synthetic oligonucleotide
  source 1..21: mol_type = other RNA
tcaatgggtgtcctaggaaca

SEQ ID NO: 643 - RNA, 21 nt, synthetic construct
  misc_feature 1..21: note = Description of Artificial Sequence: Synthetic oligonucleotide
  source 1..21: mol_type = other RNA
aaagtcatcgacaagacatta

SEQ ID NO: 644 - RNA, 21 nt, synthetic construct
  misc_feature 1..21: note = Description of Artificial Sequence: Synthetic oligonucleotide
  source 1..21: mol_type = other RNA
attttgagaggtgatgatgca

SEQ ID NO: 645 - RNA, 21 nt, synthetic construct
  misc_feature 1..21: note = Description of Artificial Sequence: Synthetic oligonucleotide
  source 1..21: mol_type = other RNA
atcgacaagacattggtgaga

SEQ ID NO: 646 - RNA, 21 nt, synthetic construct
  misc_feature 1..21: note = Description of Artificial Sequence: Synthetic oligonucleotide
  source 1..21: mol_type = other RNA
ggtgccagaatgtgaaagtca

SEQ ID NO: 647 - RNA, 21 nt, synthetic construct
  misc_feature 1..21: note = Description of Artificial Sequence: Synthetic oligonucleotide
  source 1..21: mol_type = other RNA
gacagtgcacaatattttcca

SEQ ID NO: 648 - RNA, 21 nt, synthetic construct
  misc_feature 1..21: note = Description of Artificial Sequence: Synthetic oligonucleotide
  source 1..21: mol_type = other RNA
acaaagagacactgtgcagaa

SEQ ID NO: 649 - RNA, 21 nt, synthetic construct
  misc_feature 1..21: note = Description of Artificial Sequence: Synthetic oligonucleotide
  source 1..21: mol_type = other RNA
ttttcaatgggtgtcctagga

SEQ ID NO: 650 - RNA, 21 nt, synthetic construct
  misc_feature 1..21: note = Description of Artificial Sequence: Synthetic oligonucleotide
  source 1..21: mol_type = other RNA
ccgtttccaagatctgacagt

SEQ ID NO: 651 - RNA, 21 nt, synthetic construct
  misc_feature 1..21: note = Description of Artificial Sequence: Synthetic oligonucleotide
  source 1..21: mol_type = other RNA
agggggagaaaggtgttcaaa

SEQ ID NO: 652 - RNA, 21 nt, synthetic construct
  misc_feature 1..21: note = Description of Artificial Sequence: Synthetic oligonucleotide
  source 1..21: mol_type = other RNA
agtcatcgacaagacattggt

SEQ ID NO: 653 - RNA, 23 nt, synthetic construct
  misc_feature 1..23: note = Description of Artificial Sequence: Synthetic oligonucleotide
  source 1..23: mol_type = other RNA
ttgtcgatgactttcacattctg

SEQ ID NO: 654 - RNA, 23 nt, synthetic construct
  misc_feature 1..23: note = Description of Artificial Sequence: Synthetic oligonucleotide
  source 1..23: mol_type = other RNA
ttgtcgatgactttcacattctg

SEQ ID NO: 655 - RNA, 23 nt, synthetic construct
  misc_feature 1..23: note = Description of Artificial Sequence: Synthetic oligonucleotide
  source 1..23: mol_type = other RNA
ttgtcgatgactttcacattctg

SEQ ID NO: 656 - RNA, 23 nt, synthetic construct
  misc_feature 1..23: note = Description of Artificial Sequence: Synthetic oligonucleotide
  source 1..23: mol_type = other RNA
ttgtcgatgactttcacattctg

SEQ ID NO: 657 - RNA, 23 nt, synthetic construct
  misc_feature 1..23: note = Description of Artificial Sequence: Synthetic oligonucleotide
  source 1..23: mol_type = other RNA
ttgtcgatgactttcacattctg

SEQ ID NO: 658 - RNA, 23 nt, synthetic construct
  misc_feature 1..23: note = Description of Artificial Sequence: Synthetic oligonucleotide
  source 1..23: mol_type = other RNA
ttgtcgatgactttcacattctg

SEQ ID NO: 659 - RNA, 23 nt, synthetic construct
  misc_feature 1..23: note = Description of Artificial Sequence: Synthetic oligonucleotide
  source 1..23: mol_type = other RNA
ttgtcgatgactttcacattctg

SEQ ID NO: 660 - RNA, 23 nt, synthetic construct
  misc_feature 1..23: note = Description of Artificial Sequence: Synthetic oligonucleotide
  source 1..23: mol_type = other RNA
ttgtcgatgactttcacattctg

SEQ ID NO: 661 - RNA, 21 nt, synthetic construct
  misc_feature 1..21: note = Description of Artificial Sequence: Synthetic oligonucleotide
  source 1..21: mol_type = other RNA
ttgtcgatgactttcacattc

SEQ ID NO: 662 - RNA, 21 nt, synthetic construct
  misc_feature 1..21: note = Description of Artificial Sequence: Synthetic oligonucleotide
  source 1..21: mol_type = other RNA
ttgtcgatgactttcacattc

SEQ ID NO: 663 - RNA, 23 nt, synthetic construct
  misc_feature 1..23: note = Description of Artificial Sequence: Synthetic oligonucleotide
  source 1..23: mol_type = other RNA
ttgtcgatgactttcacattctg

SEQ ID NO: 664 - RNA, 23 nt, synthetic construct
  misc_feature 1..23: note = Description of Artificial Sequence: Synthetic oligonucleotide
  source 1..23: mol_type = other RNA
ttgtcgatgactttcacattctg

SEQ ID NO: 665 - RNA, 23 nt, synthetic construct
  misc_feature 1..23: note = Description of Artificial Sequence: Synthetic oligonucleotide
  source 1..23: mol_type = other RNA
ttgtcgatgactttcacattctg

SEQ ID NO: 666 - RNA, 23 nt, synthetic construct
  misc_feature 1..23: note = Description of Artificial Sequence: Synthetic oligonucleotide
  source 1..23: mol_type = other RNA
ttgtcgatgactttcacattctg

SEQ ID NO: 667 - RNA, 23 nt, synthetic construct
  misc_feature 1..23: note = Description of Artificial Sequence: Synthetic oligonucleotide
  source 1..23: mol_type = other RNA
ttgtcgatgactttcacattctg

SEQ ID NO: 668 - RNA, 23 nt, synthetic construct
  misc_feature 1..23: note = Description of Artificial Sequence: Synthetic oligonucleotide
  source 1..23: mol_type = other RNA
ttgtcgatgactttcacattctg

SEQ ID NO: 669 - RNA, 23 nt, synthetic construct
  misc_feature 1..23: note = Description of Artificial Sequence: Synthetic oligonucleotide
  source 1..23: mol_type = other RNA
ttgtcgatgactttcacattctg

SEQ ID NO: 670 - RNA, 23 nt, synthetic construct
  misc_feature 1..23: note = Description of Artificial Sequence: Synthetic oligonucleotide
  source 1..23: mol_type = other RNA
ttgtcgatgactttcacattctg

SEQ ID NO: 671 - RNA, 23 nt, synthetic construct
  misc_feature 1..23: note = Description of Artificial Sequence: Synthetic oligonucleotide
  source 1..23: mol_type = other RNA
ttgtcgatgactttcacattctg

SEQ ID NO: 672 - RNA, 23 nt, synthetic construct
  misc_feature 1..23: note = Description of Artificial Sequence: Synthetic oligonucleotide
  source 1..23: mol_type = other RNA
ttgtcgatgactttcacattctg

SEQ ID NO: 673 - RNA, 23 nt, synthetic construct
  misc_feature 1..23: note = Description of Artificial Sequence: Synthetic oligonucleotide
  source 1..23: mol_type = other RNA
ttgtcgatgactttcacattctg

SEQ ID NO: 674 - RNA, 23 nt, synthetic construct
  misc_feature 1..23: note = Description of Artificial Sequence: Synthetic oligonucleotide
  source 1..23: mol_type = other RNA
ttgtcgatgactttcacattctg

SEQ ID NO: 675 - RNA, 23 nt, synthetic construct
  misc_feature 1..23: note = Description of Artificial Sequence: Synthetic oligonucleotide
  source 1..23: mol_type = other RNA
ttgtcgatgactttcacattctg

SEQ ID NO: 676 - RNA, 23 nt, synthetic construct
  misc_feature 1..23: note = Description of Artificial Sequence: Synthetic oligonucleotide
  source 1..23: mol_type = other RNA
ttgtcgatgactttcacattctg

SEQ ID NO: 677 - RNA, 23 nt, synthetic construct
  misc_feature 1..23: note = Description of Artificial Sequence: Synthetic oligonucleotide
  source 1..23: mol_type = other RNA
ttgtcgatgactttcacattctg

SEQ ID NO: 678 - RNA, 23 nt, synthetic construct
  misc_feature 1..23: note = Description of Artificial Sequence: Synthetic oligonucleotide
  source 1..23: mol_type = other RNA
ttgtcgatgactttcacattctg

SEQ ID NO: 679 - RNA, 23 nt, synthetic construct
  misc_feature 1..23: note = Description of Artificial Sequence: Synthetic oligonucleotide
  source 1..23: mol_type = other RNA
ttgtcgatgactttcacattctg

SEQ ID NO: 680 - RNA, 23 nt, synthetic construct
  misc_feature 1..23: note = Description of Artificial Sequence: Synthetic oligonucleotide
  source 1..23: mol_type = other RNA
ttgtcgatgactttcacattctg

SEQ ID NO: 681 - RNA, 23 nt, synthetic construct
  misc_feature 1..23: note = Description of Artificial Sequence: Synthetic oligonucleotide
  source 1..23: mol_type = other RNA
ttgtcgatgactttcacattctg

SEQ ID NO: 682 - RNA, 23 nt, synthetic construct
  misc_feature 1..23: note = Description of Artificial Sequence: Synthetic oligonucleotide
  source 1..23: mol_type = other RNA
ttgtcgatgactttcacattctg

SEQ ID NO: 683 - RNA, 23 nt, synthetic construct
  misc_feature 1..23: note = Description of Artificial Sequence: Synthetic oligonucleotide
  source 1..23: mol_type = other RNA
ttgtcgatgactttcacattctg

SEQ ID NO: 684 - RNA, 23 nt, synthetic construct
  misc_feature 1..23: note = Description of Artificial Sequence: Synthetic oligonucleotide
  source 1..23: mol_type = other RNA
ttgtcgatgactttcacattctg

SEQ ID NO: 685 - DNA, 23 bp, synthetic construct
  misc_feature 1..23: note = Description of Artificial Sequence: Synthetic oligonucleotide
  source 1..23: mol_type = other DNA
ttgtcgatgactttcacattctg

SEQ ID NO: 686 - DNA, 23 bp, synthetic construct
  misc_feature 1..23: note = Description of Artificial Sequence: Synthetic oligonucleotide
  source 1..23: mol_type = other DNA
ttgtcgatgactttcacattctg

SEQ ID NO: 687 - DNA, 23 bp, synthetic construct
  misc_feature 1..23: note = Description of Artificial Sequence: Synthetic oligonucleotide
  source 1..23: mol_type = other DNA
ttgtcgatgactttcacattctg

SEQ ID NO: 688 - DNA, 23 bp, synthetic construct
  misc_feature 1..23: note = Description of Artificial Sequence: Synthetic oligonucleotide
  source 1..23: mol_type = other DNA
ttgtcgatgactttcacattctg

SEQ ID NO: 689 - DNA, 23 bp, synthetic construct
  misc_feature 1..23: note = Description of Artificial Sequence: Synthetic oligonucleotide
  source 1..23: mol_type = other DNA
ttgtcgatgactttcacattctg

SEQ ID NO: 690 - DNA, 23 bp, synthetic construct
  misc_feature 1..23: note = Description of Artificial Sequence: Synthetic oligonucleotide
  source 1..23: mol_type = other DNA
ttgtcgatgactttcacattctg

SEQ ID NO: 691 - DNA, 23 bp, synthetic construct
  misc_feature 1..23: note = Description of Artificial Sequence: Synthetic oligonucleotide
  source 1..23: mol_type = other DNA
ttgtcgatgactttcacattctg

SEQ ID NO: 692 - RNA, 23 nt, synthetic construct
  misc_feature 1..23: note = Description of Artificial Sequence: Synthetic oligonucleotide
  source 1..23: mol_type = other RNA
tatatttccaggatgaaagtcca

SEQ ID NO: 693 - RNA, 23 nt, synthetic construct
  misc_feature 1..23: note = Description of Artificial Sequence: Synthetic oligonucleotide
  source 1..23: mol_type = other RNA
tatatttccaggatgaaagtcca

SEQ ID NO: 694 - RNA, 23 nt, synthetic construct
  misc_feature 1..23: note = Description of Artificial Sequence: Synthetic oligonucleotide
  source 1..23: mol_type = other RNA
tatatttccaggatgaaagtcca

SEQ ID NO: 695 - RNA, 23 nt, synthetic construct
  misc_feature 1..23: note = Description of Artificial Sequence: Synthetic oligonucleotide
  source 1..23: mol_type = other RNA
tatatttccaggatgaaagtcca

SEQ ID NO: 696 - RNA, 23 nt, synthetic construct
  misc_feature 1..23: note = Description of Artificial Sequence: Synthetic oligonucleotide
  source 1..23: mol_type = other RNA
tatatttccaggatgaaagtcca

SEQ ID NO: 697 - RNA, 23 nt, synthetic construct
  misc_feature 1..23: note = Description of Artificial Sequence: Synthetic oligonucleotide
  source 1..23: mol_type = other RNA
tatatttccaggatgaaagtcca

SEQ ID NO: 698 - RNA, 21 nt, synthetic construct
  misc_feature 1..21: note = Description of Artificial Sequence: Synthetic oligonucleotide
  source 1..21: mol_type = other RNA
tatatttccaggatgaaagtc

SEQ ID NO: 699 - RNA, 21 nt, synthetic construct
  misc_feature 1..21: note = Description of Artificial Sequence: Synthetic oligonucleotide
  source 1..21: mol_type = other RNA
tatatttccaggatgaaagtc

SEQ ID NO: 700 - RNA, 23 nt, synthetic construct
  misc_feature 1..23: note = Description of Artificial Sequence: Synthetic oligonucleotide
  source 1..23: mol_type = other RNA
tatatttccaggatgaaagtcca

SEQ ID NO: 701 - RNA, 23 nt, synthetic construct
  misc_feature 1..23: note = Description of Artificial Sequence: Synthetic oligonucleotide
  source 1..23: mol_type = other RNA
tatatttccaggatgaaagtcca

SEQ ID NO: 702 - RNA, 23 nt, synthetic construct
  misc_feature 1..23: note = Description of Artificial Sequence: Synthetic oligonucleotide
  source 1..23: mol_type = other RNA
tatatttccaggatgaaagtcca

SEQ ID NO: 703 - RNA, 23 nt, synthetic construct
  misc_feature 1..23: note = Description of Artificial Sequence: Synthetic oligonucleotide
  source 1..23: mol_type = other RNA
tatatttccaggatgaaagtcca

SEQ ID NO: 704 - RNA, 23 nt, synthetic construct
  misc_feature 1..23: note = Description of Artificial Sequence: Synthetic oligonucleotide
  source 1..23: mol_type = other RNA
tatatttccaggatgaaagtcca

SEQ ID NO: 705 - RNA, 23 nt, synthetic construct
  misc_feature 1..23: note = Description of Artificial Sequence: Synthetic oligonucleotide
  source 1..23: mol_type = other RNA
tatatttccaggatgaaagtcca

SEQ ID NO: 706 - RNA, 23 nt, synthetic construct
  misc_feature 1..23: note = Description of Artificial Sequence: Synthetic oligonucleotide
  source 1..23: mol_type = other RNA
tatatttccaggatgaaagtcca

SEQ ID NO: 707 - RNA, 23 nt, synthetic construct
  misc_feature 1..23: note = Description of Artificial Sequence: Synthetic oligonucleotide
  source 1..23: mol_type = other RNA
tatatttccaggatgaaagtcca

SEQ ID NO: 708 - RNA, 23 nt, synthetic construct
  misc_feature 1..23: note = Description of Artificial Sequence: Synthetic oligonucleotide
  source 1..23: mol_type = other RNA
tatatttccaggatgaaagtcca

SEQ ID NO: 709 - RNA, 23 nt, synthetic construct
  misc_feature 1..23: note = Description of Artificial Sequence: Synthetic oligonucleotide
  source 1..23: mol_type = other RNA
tatatttccaggatgaaagtcca

SEQ ID NO: 710 - RNA, 23 nt, synthetic construct
  misc_feature 1..23: note = Description of Artificial Sequence: Synthetic oligonucleotide
  source 1..23: mol_type = other RNA
tatatttccaggatgaaagtcca

SEQ ID NO: 711 - RNA, 23 nt, synthetic construct
  misc_feature 1..23: note = Description of Artificial Sequence: Synthetic oligonucleotide
  source 1..23: mol_type = other RNA
tatatttccaggatgaaagtcca

SEQ ID NO: 712 - RNA, 23 nt, synthetic construct
  misc_feature 1..23: note = Description of Artificial Sequence: Synthetic oligonucleotide
  source 1..23: mol_type = other RNA
tatatttccaggatgaaagtcca

SEQ ID NO: 713 - RNA, 23 nt, synthetic construct
  misc_feature 1..23: note = Description of Artificial Sequence: Synthetic oligonucleotide
  source 1..23: mol_type = other RNA
tatatttccaggatgaaagtcca

SEQ ID NO: 714 - RNA, 23 nt, synthetic construct
  misc_feature 1..23: note = Description of Artificial Sequence: Synthetic oligonucleotide
  source 1..23: mol_type = other RNA
tatatttccaggatgaaagtcca

SEQ ID NO: 715 - RNA, 23 nt, synthetic construct
  misc_feature 1..23: note = Description of Artificial Sequence: Synthetic oligonucleotide
  source 1..23: mol_type = other RNA
tatatttccaggatgaaagtcca

SEQ ID NO: 716 - RNA, 23 nt, synthetic construct
  misc_feature 1..23: note = Description of Artificial Sequence: Synthetic oligonucleotide
  source 1..23: mol_type = other RNA
tatatttccaggatgaaagtcca

SEQ ID NO: 717 - RNA, 23 nt, synthetic construct
  misc_feature 1..23: note = Description of Artificial Sequence: Synthetic oligonucleotide
  source 1..23: mol_type = other RNA
tatatttccaggatgaaagtcca

SEQ ID NO: 718 - RNA, 23 nt, synthetic construct
  misc_feature 1..23: note = Description of Artificial Sequence: Synthetic oligonucleotide
  source 1..23: mol_type = other RNA
tatatttccaggatgaaagtcca

SEQ ID NO: 719 - RNA, 23 nt, synthetic construct
  misc_feature 1..23: note = Description of Artificial Sequence: Synthetic oligonucleotide
  source 1..23: mol_type = other RNA
tatatttccaggatgaaagtcca

SEQ ID NO: 720 - RNA, 23 nt, synthetic construct
  misc_feature 1..23: note = Description of Artificial Sequence: Synthetic oligonucleotide
  source 1..23: mol_type = other RNA
tatatttccaggatgaaagtcca

SEQ ID NO: 721 - RNA, 23 nt, synthetic construct
  misc_feature 1..23: note = Description of Artificial Sequence: Synthetic oligonucleotide
  source 1..23: mol_type = other RNA
tatatttccaggatgaaagtcca

SEQ ID NO: 722 - RNA, 23 nt, synthetic construct
  misc_feature 1..23: note = Description of Artificial Sequence: Synthetic oligonucleotide
  source 1..23: mol_type = other RNA
tatatttccaggatgaaagtcca

SEQ ID NO: 723 - DNA, 23 bp, synthetic construct
  misc_feature 1..23: note = Description of Artificial Sequence: Synthetic oligonucleotide
  source 1..23: mol_type = other DNA
tatatttccaggatgaaagtcca

SEQ ID NO: 724 - DNA, 23 bp, synthetic construct
  misc_feature 1..23: note = Description of Artificial Sequence: Synthetic oligonucleotide
  source 1..23: mol_type = other DNA
tatatttccaggatgaaagtcca

SEQ ID NO: 725 - DNA, 23 bp, synthetic construct
  misc_feature 1..23: note = Description of Artificial Sequence: Synthetic oligonucleotide
  source 1..23: mol_type = other DNA
tatatttccaggatgaaagtcca

SEQ ID NO: 726 - DNA, 23 bp, synthetic construct
  misc_feature 1..23: note = Description of Artificial Sequence: Synthetic oligonucleotide
  source 1..23: mol_type = other DNA
tatatttccaggatgaaagtcca

SEQ ID NO: 727 - DNA, 23 bp, synthetic construct
  misc_feature 1..23: note = Description of Artificial Sequence: Synthetic oligonucleotide
  source 1..23: mol_type = other DNA
tatatttccaggatgaaagtcca

SEQ ID NO: 728 - DNA, 23 bp, synthetic construct
  misc_feature 1..23: note = Description of Artificial Sequence: Synthetic oligonucleotide
  source 1..23: mol_type = other DNA
tatatttccaggatgaaagtcca

SEQ ID NO: 729 - DNA, 23 bp, synthetic construct
  misc_feature 1..23: note = Description of Artificial Sequence: Synthetic oligonucleotide
  source 1..23: mol_type = other DNA
tatatttccaggatgaaagtcca

SEQ ID NO: 730 - DNA, 23 bp, synthetic construct
  misc_feature 1..23: note = Description of Artificial Sequence: Synthetic oligonucleotide
  source 1..23: mol_type = other DNA
tatatttccaggatgaaagtcca

SEQ ID NO: 731 - RNA, 23 nt, synthetic construct
  misc_feature 1..23: note = Description of Artificial Sequence: Synthetic oligonucleotide
  source 1..23: mol_type = other RNA
tgacatcttgaacacctttctcc

SEQ ID NO: 732 - RNA, 23 nt, synthetic construct
  misc_feature 1..23: note = Description of Artificial Sequence: Synthetic oligonucleotide
  source 1..23: mol_type = other RNA
agttaatatatttccaggatgaa

SEQ ID NO: 733 - RNA, 23 nt, synthetic construct
  misc_feature 1..23: note = Description of Artificial Sequence: Synthetic oligonucleotide
  source 1..23: mol_type = other RNA
ttgtcgatgactttcacattctg

SEQ ID NO: 734 - RNA, 23 nt, synthetic construct
  misc_feature 1..23: note = Description of Artificial Sequence: Synthetic oligonucleotide
  source 1..23: mol_type = other RNA
tatgggaaaatattgtgcactgt

SEQ ID NO: 735 - RNA, 23 nt, synthetic construct
  misc_feature 1..23: note = Description of Artificial Sequence: Synthetic oligonucleotide
  source 1..23: mol_type = other RNA
aatgtcttgtcgatgactttcac

SEQ ID NO: 736 - RNA, 23 nt, synthetic construct
  misc_feature 1..23: note = Description of Artificial Sequence: Synthetic oligonucleotide
  source 1..23: mol_type = other RNA
tttgtcgatgactttcacattct

SEQ ID NO: 737 - RNA, 23 nt, synthetic construct
  misc_feature 1..23: note = Description of Artificial Sequence: Synthetic oligonucleotide
  source 1..23: mol_type = other RNA
taacagttaatatatttccagga

SEQ ID NO: 738 - RNA, 23 nt, synthetic construct
  misc_feature 1..23: note = Description of Artificial Sequence: Synthetic oligonucleotide
  source 1..23: mol_type = other RNA
aaataatacagatgggaaaatat

SEQ ID NO: 739 - RNA, 23 nt, synthetic construct
  misc_feature 1..23: note = Description of Artificial Sequence: Synthetic oligonucleotide
  source 1..23: mol_type = other RNA
ttttgttggaaaagaacgacacc

SEQ ID NO: 740 - RNA, 23 nt, synthetic construct
  misc_feature 1..23: note = Description of Artificial Sequence: Synthetic oligonucleotide
  source 1..23: mol_type = other RNA
tagttaatatatttccaggatga

SEQ ID NO: 741 - RNA, 23 nt, synthetic construct
  misc_feature 1..23: note = Description of Artificial Sequence: Synthetic oligonucleotide
  source 1..23: mol_type = other RNA
tatcatcacctctcaaaatgccc

SEQ ID NO: 742 - RNA, 23 nt, synthetic construct
  misc_feature 1..23: note = Description of Artificial Sequence: Synthetic oligonucleotide
  source 1..23: mol_type = other RNA
ttgaacacctttctccccctgga

SEQ ID NO: 743 - RNA, 23 nt, synthetic construct
  misc_feature 1..23: note = Description of Artificial Sequence: Synthetic oligonucleotide
  source 1..23: mol_type = other RNA
tttaacagttaatatatttccag

SEQ ID NO: 744 - RNA, 23 nt, synthetic construct
  misc_feature 1..23: note = Description of Artificial Sequence: Synthetic oligonucleotide
  source 1..23: mol_type = other RNA
aaggatttttcctcaccaatgtc

SEQ ID NO: 745 - RNA, 23 nt, synthetic construct
  misc_feature 1..23: note = Description of Artificial Sequence: Synthetic oligonucleotide
  source 1..23: mol_type = other RNA
tatcttgaacacctttctccccc

SEQ ID NO: 746 - RNA, 23 nt, synthetic construct
  misc_feature 1..23: note = Description of Artificial Sequence: Synthetic oligonucleotide
  source 1..23: mol_type = other RNA
atcatcacctctcaaaatgccct

SEQ ID NO: 747 - RNA, 23 nt, synthetic construct
  misc_feature 1..23: note = Description of Artificial Sequence: Synthetic oligonucleotide
  source 1..23: mol_type = other RNA
aaaagaacgacaccctttgtatt

SEQ ID NO: 748 - RNA, 23 nt, synthetic construct
  misc_feature 1..23: note = Description of Artificial Sequence: Synthetic oligonucleotide
  source 1..23: mol_type = other RNA
tgattcgacaccaagatcccatt

SEQ ID NO: 749 - RNA, 23 nt, synthetic construct
  misc_feature 1..23: note = Description of Artificial Sequence: Synthetic oligonucleotide
  source 1..23: mol_type = other RNA
taaaatattgtgcactgtcagat

SEQ ID NO: 750 - RNA, 23 nt, synthetic construct
  misc_feature 1..23: note = Description of Artificial Sequence: Synthetic oligonucleotide
  source 1..23: mol_type = other RNA
atgggaaaatattgtgcactgtc

SEQ ID NO: 751 - RNA, 23 nt, synthetic construct
  misc_feature 1..23: note = Description of Artificial Sequence: Synthetic oligonucleotide
  source 1..23: mol_type = other RNA
ttaggacacccattgaaaagtca

SEQ ID NO: 752 - RNA, 23 nt, synthetic construct
  misc_feature 1..23: note = Description of Artificial Sequence: Synthetic oligonucleotide
  source 1..23: mol_type = other RNA
aggatttttcctcaccaatgtct

SEQ ID NO: 753 - RNA, 23 nt, synthetic construct
  misc_feature 1..23: note = Description of Artificial Sequence: Synthetic oligonucleotide
  source 1..23: mol_type = other RNA
tcattgaaaagtcaaaagcaatg

SEQ ID NO: 754 - RNA, 23 nt, synthetic construct
  misc_feature 1..23: note = Description of Artificial Sequence: Synthetic oligonucleotide
  source 1..23: mol_type = other RNA
tcatcatcacctctcaaaatgcc

SEQ ID NO: 755 - RNA, 23 nt, synthetic construct
  misc_feature 1..23: note = Description of Artificial Sequence: Synthetic oligonucleotide
  source 1..23: mol_type = other RNA
tgacacccattgaaaagtcaaaa

SEQ ID NO: 756 - RNA, 23 nt, synthetic construct
  misc_feature 1..23: note = Description of Artificial Sequence: Synthetic oligonucleotide
  source 1..23: mol_type = other RNA
tctgtcctaaaacagaagtcgac

SEQ ID NO: 757 - RNA, 23 nt, synthetic construct
  misc_feature 1..23: note = Description of Artificial Sequence: Synthetic oligonucleotide
  source 1..23: mol_type = other RNA
tattctggcacccactcagagcc

SEQ ID NO: 758 - RNA, 23 nt, synthetic construct
  misc_feature 1..23: note = Description of Artificial Sequence: Synthetic oligonucleotide
  source 1..23: mol_type = other RNA
tactttcacattctggcacccac

SEQ ID NO: 759 - RNA, 23 nt, synthetic construct
  misc_feature 1..23: note = Description of Artificial Sequence: Synthetic oligonucleotide
  source 1..23: mol_type = other RNA
tgttcctaggacacccattgaaa

SEQ ID NO: 760 - RNA, 23 nt, synthetic construct
  misc_feature 1..23: note = Description of Artificial Sequence: Synthetic oligonucleotide
  source 1..23: mol_type = other RNA
taatgtcttgtcgatgactttca

SEQ ID NO: 761 - RNA, 23 nt, synthetic construct
  misc_feature 1..23: note = Description of Artificial Sequence: Synthetic oligonucleotide
  source 1..23: mol_type = other RNA
tgcatcatcacctctcaaaatgc

SEQ ID NO: 762 - RNA, 23 nt, synthetic construct
  misc_feature 1..23: note = Description of Artificial Sequence: Synthetic oligonucleotide
  source 1..23: mol_type = other RNA
tctcaccaatgtcttgtcgatga

SEQ ID NO: 763 - RNA, 23 nt, synthetic construct
  misc_feature 1..23: note = Description of Artificial Sequence: Synthetic oligonucleotide
  source 1..23: mol_type = other RNA
tgactttcacattctggcaccca

SEQ ID NO: 764 - RNA, 23 nt, synthetic construct
  misc_feature 1..23: note = Description of Artificial Sequence: Synthetic oligonucleotide
  source 1..23: mol_type = other RNA
tggaaaatattgtgcactgtcag

SEQ ID NO: 765 - RNA, 23 nt, synthetic construct
  misc_feature 1..23: note = Description of Artificial Sequence: Synthetic oligonucleotide
  source 1..23: mol_type = other RNA
ttctgcacagtgtctctttgtca

SEQ ID NO: 766 - RNA, 23 nt, synthetic construct
  misc_feature 1..23: note = Description of Artificial Sequence: Synthetic oligonucleotide
  source 1..23: mol_type = other RNA
tcctaggacacccattgaaaagt

SEQ ID NO: 767 - RNA, 23 nt, synthetic construct
  misc_feature 1..23: note = Description of Artificial Sequence: Synthetic oligonucleotide
  source 1..23: mol_type = other RNA
actgtcagatcttggaaacggcc

SEQ ID NO: 768 - RNA, 23 nt, synthetic construct
  misc_feature 1..23: note = Description of Artificial Sequence: Synthetic oligonucleotide
  source 1..23: mol_type = other RNA
tttgaacacctttctccccctgg

SEQ ID NO: 769 - RNA, 23 nt, synthetic construct
  misc_feature 1..23: note = Description of Artificial Sequence: Synthetic oligonucleotide
  source 1..23: mol_type = other RNA
accaatgtcttgtcgatgacttt

SEQ ID NO: 770 - DNA, 21 bp, synthetic construct
  misc_feature 1..21: note = Description of Artificial Sequence: Synthetic oligonucleotide
  source 1..21: mol_type = other DNA
  modified_base 1: mod_base = OTHER; note = 2'-O-methyluridine-3'-phosphate
  modified_base 2: mod_base = OTHER; note = 2'-O-methyluridine-3'-phosphate
  modified_base 3: mod_base = OTHER; note = 2'-O-methylcytidine-3'-phosphate
  modified_base 6: mod_base = OTHER; note = 2'-O-methyluridine-3'-phosphate
  modified_base 10: mod_base = OTHER; note = 2'-O-methyluridine-3'-phosphate
  modified_base 12: mod_base = OTHER; note = 2'-O-methyluridine-3'-phosphate
  modified_base 13: mod_base = OTHER; note = 2'-O-methylcytidine-3'-phosphate
  modified_base 14: mod_base = OTHER; note = 2'-O-methylcytidine-3'-phosphate
  modified_base 15: mod_base = OTHER; note = 2'-O-methyluridine-3'-phosphate
  modified_base 20: mod_base = OTHER; note = 2'-deoxythymidine-3'-phosphorothioate
  misc_feature 1..19: note = RNA
  misc_feature 20..21: note = DNA
ttcaatgggtgtcctaggatt

SEQ ID NO: 771 - RNA, 19 nt, synthetic construct
  misc_feature 1..19: note = Description of Artificial Sequence: Synthetic oligonucleotide
  source 1..19: mol_type = other RNA
ttcaatgggtgtcctagga

SEQ ID NO: 772 - DNA, 21 bp, synthetic construct
  misc_feature 1..21: note = Description of Artificial Sequence: Synthetic oligonucleotide
  source 1..21: mol_type = other DNA
  modified_base 2: mod_base = OTHER; note = 2'-O-methylcytidine-3'-phosphate
  modified_base 5: mod_base = OTHER; note = 2'-O-methylcytidine-3'-phosphate
  modified_base 6: mod_base = OTHER; note = 2'-O-methyluridine-3'-phosphate
  modified_base 14: mod_base = OTHER; note = 2'-O-methylcytidine-3'-phosphate
  modified_base 16: mod_base = OTHER; note = 2'-O-methyluridine-3'-phosphate
  modified_base 17: mod_base = OTHER; note = 2'-O-methylcytidine-3'-phosphate
  modified_base 19: mod_base = OTHER; note = 2'-O-methyluridine-3'-phosphate
  modified_base 20: mod_base = OTHER; note = 2'-deoxythymidine-3'-phosphorothioate
  misc_feature 1..19: note = RNA
  misc_feature 20..21: note = DNA
acaactggagggacatcgttt

SEQ ID NO: 773 - RNA, 19 nt, synthetic construct
  misc_feature 1..19: note = Description of Artificial Sequence: Synthetic oligonucleotide
  source 1..19: mol_type = other RNA
acaactggagggacatcgt

SEQ ID NO: 774 - DNA, 21 bp, synthetic construct
  misc_feature 1..21: note = Description of Artificial Sequence: Synthetic oligonucleotide
  source 1..21: mol_type = other DNA
  modified_base 4: mod_base = OTHER; note = 2'-O-methyluridine-3'-phosphate
  modified_base 9: mod_base = OTHER; note = 2'-O-methylcytidine-3'-phosphate
  modified_base 13: mod_base = OTHER; note = 2'-O-methylcytidine-3'-phosphate
  modified_base 20: mod_base = OTHER; note = 2'-deoxythymidine-3'-phosphorothioate
  misc_feature 1..19: note = RNA
  misc_feature 20..21: note = DNA
tcctaggacacccattgaatt

SEQ ID NO: 775 - RNA, 19 nt, synthetic construct
  misc_feature 1..19: note = Description of Artificial Sequence: Synthetic oligonucleotide
  source 1..19: mol_type = other RNA
tcctaggacacccattgaa

SEQ ID NO: 776 - DNA, 21 bp, synthetic construct
  misc_feature 1..21: note = Description of Artificial Sequence: Synthetic oligonucleotide
  source 1..21: mol_type = other DNA
  modified_base 13: mod_base = OTHER; note = 2'-O-methylcytidine-3'-phosphate
  modified_base 20: mod_base = OTHER; note = 2'-deoxythymidine-3'-phosphorothioate
  misc_feature 1..19: note = RNA
  misc_feature 20..21: note = DNA
acgatgtccctccagttgttt

SEQ ID NO: 777 - RNA, 19 nt, synthetic construct
  misc_feature 1..19: note = Description of Artificial Sequence: Synthetic oligonucleotide
  source 1..19: mol_type = other RNA
acgatgtccctccagttgt

SEQ ID NO: 778 - RNA, 21 nt, synthetic construct
  misc_feature 1..21: note = Description of Artificial Sequence: Synthetic oligonucleotide
  source 1..21: mol_type = other RNA
  modified_base 1: mod_base = OTHER; note = 2'-fluorouridine -3'-phosphorothioate
  modified_base 2: mod_base = OTHER; note = 2'-O-methylcytidine-3'- phosphorothioate
  modified_base 3: mod_base = OTHER; note = 2'-fluorocytidine-3'-phosphate
  modified_base 4: mod_base = OTHER; note = 2'-O-methyluridine-3'-phosphate
  modified_base 5: mod_base = OTHER; note = 2'-fluoroadenosine-3'-phosphate
  modified_base 6: mod_base = OTHER; note = 2'-O-methylguanosine-3'-phosphate
  modified_base 7: mod_base = OTHER; note = 2'-fluoroguanosine-3'-phosphate
  modified_base 8: mod_base = OTHER; note = 2'-O-methyladenosine-3'-phosphate
  modified_base 9: mod_base = OTHER; note = 2'-fluoroadenosine-3'-phosphate
  modified_base 10: mod_base = OTHER; note = 2'-fluorocytidine-3'-phosphate
  modified_base 11: mod_base = OTHER; note = 2'-fluorocytidine-3'-phosphate
  modified_base 12: mod_base = OTHER; note = 2'-O-methyluridine-3'-phosphate
  modified_base 13: mod_base = OTHER; note = 2'-fluorouridine-3'-phosphate
  modified_base 14: mod_base = OTHER; note = 2'-O-methyluridine-3'-phosphate
  modified_base 15: mod_base = OTHER; note = 2'-fluorouridine-3'-phosphate
  modified_base 16: mod_base = OTHER; note = 2'-O-methyladenosine-3'-phosphate
  modified_base 17: mod_base = OTHER; note = 2'-fluoroguanosine-3'-phosphate
  modified_base 18: mod_base = OTHER; note = 2'-O-methyladenosine-3'-phosphate
  modified_base 19: mod_base = OTHER; note = 2'-fluoroadenosine-3'-phosphate
  modified_base 20: mod_base = OTHER; note = 2'-O-methyladenosine-3'-phosphate
  modified_base 21: mod_base = OTHER; note = 2'-fluorouridine-3'-phosphate attached to N-[tris(N-acetylgalactosamine-alkyl)-amidodecanoyl)]-4-hydr oxyprolinol Hyp-(N-acetylgalactosamine-alkyl)3
tcctaggaaccttttagaaat

SEQ ID NO: 779 - RNA, 21 nt, synthetic construct
  misc_feature 1..21: note = Description of Artificial Sequence: Synthetic oligonucleotide
  source 1..21: mol_type = other RNA
  modified_base 1: mod_base = OTHER; note = 2'-fluoroguanosine-3'-phosphorothioate
  modified_base 2: mod_base = OTHER; note = 2'-O-methyladenosine-3'- phosphorothioate
  modified_base 3: mod_base = OTHER; note = 2'-fluorocytidine-3'-phosphate
  modified_base 4: mod_base = OTHER; note = 2'-O-methyluridine-3'-phosphate
  modified_base 5: mod_base = OTHER; note = 2'-fluorouridine-3'-phosphate
  modified_base 6: mod_base = OTHER; note = 2'-O-methyluridine-3'-phosphate
  modified_base 7: mod_base = OTHER; note = 2'-fluorocytidine-3'-phosphate
  modified_base 8: mod_base = OTHER; note = 2'-O-methyladenosine-3'-phosphate
  modified_base 9: mod_base = OTHER; note = 2'-fluorouridine-3'-phosphate
  modified_base 10: mod_base = OTHER; note = 2'-fluorocytidine-3'-phosphate
  modified_base 11: mod_base = OTHER; note = 2'-fluorocytidine-3'-phosphate
  modified_base 12: mod_base = OTHER; note = 2'-O-methyluridine-3'-phosphate
  modified_base 13: mod_base = OTHER; note = 2'-fluoroguanosine-3'-phosphate
  modified_base 14: mod_base = OTHER; note = 2'-O-methylguanosine-3'-phosphate
  modified_base 15: mod_base = OTHER; note = 2'-fluoroadenosine-3'-phosphate
  modified_base 16: mod_base = OTHER; note = 2'-O-methyladenosine-3'-phosphate
  modified_base 17: mod_base = OTHER; note = 2'-fluoroadenosine-3'-phosphate
  modified_base 18: mod_base = OTHER; note = 2'-O-methyluridine-3'-phosphate
  modified_base 19: mod_base = OTHER; note = 2'-fluoroadenosine-3'-phosphate
  modified_base 20: mod_base = OTHER; note = 2'-O-methyluridine-3'-phosphate
  modified_base 21: mod_base = OTHER; note = 2'-fluoroadenosine-3'-phosphate attached to N-[tris(N-acetylgalactosamine-alkyl)-amidodecanoyl)]-4-hydr oxyprolinol Hyp-(N-acetylgalactosamine-alkyl)3
gactttcatcctggaaatata

SEQ ID NO: 780 - RNA, 21 nt, synthetic construct
  misc_feature 1..21: note = Description of Artificial Sequence: Synthetic oligonucleotide
  source 1..21: mol_type = other RNA
  modified_base 1: mod_base = OTHER; note = 2'-fluoroguanosine-3'-phosphorothioate
  modified_base 2: mod_base = OTHER; note = 2'-O-methyladenosine-3'- phosphorothioate
  modified_base 3: mod_base = OTHER; note = 2'-fluoroadenosine-3'-phosphate
  modified_base 4: mod_base = OTHER; note = 2'-O-methyluridine-3'-phosphate
  modified_base 5: mod_base = OTHER; note = 2'-fluoroguanosine-3'-phosphate
  modified_base 6: mod_base = OTHER; note = 2'-O-methyluridine-3'-phosphate
  modified_base 7: mod_base = OTHER; note = 2'-fluoroguanosine-3'-phosphate
  modified_base 8: mod_base = OTHER; note = 2'-O-methyladenosine-3'-phosphate
  modified_base 9: mod_base = OTHER; note = 2'-fluoroadenosine-3'-phosphate
  modified_base 10: mod_base = OTHER; note = 2'-fluoroadenosine-3'-phosphate
  modified_base 11: mod_base = OTHER; note = 2'-fluoroguanosine-3'-phosphate
  modified_base 12: mod_base = OTHER; note = 2'-O-methyluridine-3'-phosphate
  modified_base 13: mod_base = OTHER; note = 2'-fluorocytidine-3'-phosphate
  modified_base 14: mod_base = OTHER; note = 2'-O-methyladenosine-3'-phosphate
  modified_base 15: mod_base = OTHER; note = 2'-fluorouridine-3'-phosphate
  modified_base 16: mod_base = OTHER; note = 2'-O-methylcytidine-3'-phosphate
  modified_base 17: mod_base = OTHER; note = 2'-fluoroguanosine-3'-phosphate
  modified_base 18: mod_base = OTHER; note = 2'-O-methyladenosine-3'-phosphate
  modified_base 19: mod_base = OTHER; note = 2'-fluorocytidine-3'-phosphate
  modified_base 20: mod_base = OTHER; note = 2'-O-methyladenosine-3'-phosphate
  modified_base 21: mod_base = OTHER; note = 2'-fluoroadenosine-3'-phosphate attached to N-[tris(N-acetylgalactosamine-alkyl)-amidodecanoyl)]-4-hydr oxyprolinol Hyp-(N-acetylgalactosamine-alkyl)3
gaatgtgaaagtcatcgacaa

SEQ ID NO: 781 - RNA, 21 nt, synthetic construct
  misc_feature 1..21: note = Description of Artificial Sequence: Synthetic oligonucleotide
  source 1..21: mol_type = other RNA
  modified_base 1: mod_base = OTHER; note = 2'-fluorocytidine-3'-phosphorothioate
  modified_base 2: mod_base = OTHER; note = 2'-O-methyladenosine-3'- phosphorothioate
  modified_base 3: mod_base = OTHER; note = 2'-fluorouridine-3'-phosphate
  modified_base 4: mod_base = OTHER; note = 2'-O-methyluridine-3'-phosphate
  modified_base 5: mod_base = OTHER; note = 2'-fluoroguanosine-3'-phosphate
  modified_base 6: mod_base = OTHER; note = 2'-O-methylguanosine-3'-phosphate
  modified_base 7: mod_base = OTHER; note = 2'-fluorouridine-3'-phosphate
  modified_base 8: mod_base = OTHER; note = 2'-O-methylguanosine-3'-phosphate
  modified_base 9: mod_base = OTHER; note = 2'-fluoroadenosine-3'-phosphate
  modified_base 10: mod_base = OTHER; note = 2'-fluoroguanosine-3'-phosphate
  modified_base 11: mod_base = OTHER; note = 2'-fluoroguanosine-3'-phosphate
  modified_base 12: mod_base = OTHER; note = 2'-O-methyladenosine-3'-phosphate
  modified_base 13: mod_base = OTHER; note = 2'-fluoroadenosine-3'-phosphate
  modified_base 14: mod_base = OTHER; note = 2'-O-methyladenosine-3'-phosphate
  modified_base 15: mod_base = OTHER; note = 2'-fluoroadenosine-3'-phosphate
  modified_base 16: mod_base = OTHER; note = 2'-O-methyladenosine-3'-phosphate
  modified_base 17: mod_base = OTHER; note = 2'-fluorouridine-3'-phosphate
  modified_base 18: mod_base = OTHER; note = 2'-O-methylcytidine-3'-phosphate
  modified_base 19: mod_base = OTHER; note = 2'-fluorocytidine-3'-phosphate
  modified_base 20: mod_base = OTHER; note = 2'-O-methyluridine-3'-phosphate
  modified_base 21: mod_base = OTHER; note = 2'-fluorouridine-3'-phosphate attached to N-[tris(N-acetylgalactosamine-alkyl)-amidodecanoyl)]-4-hydr oxyprolinol Hyp-(N-acetylgalactosamine-alkyl)3
cattggtgaggaaaaatcctt

SEQ ID NO: 782 - RNA, 21 nt, synthetic construct
  misc_feature 1..21: note = Description of Artificial Sequence: Synthetic oligonucleotide
  source 1..21: mol_type = other RNA
  modified_base 1: mod_base = OTHER; note = 2'-fluoroadenosine-3'-phosphorothioate
  modified_base 2: mod_base = OTHER; note = 2'-O-methyluridine-3'-phosphorothioate
  modified_base 3: mod_base = OTHER; note = 2'-fluorocytidine-3'-phosphate
  modified_base 4: mod_base = OTHER; note = 2'-O-methylguanosine-3'-phosphate
  modified_base 5: mod_base = OTHER; note = 2'-fluoroadenosine-3'-phosphate
  modified_base 6: mod_base = OTHER; note = 2'-O-methylcytidine-3'-phosphate
  modified_base 7: mod_base = OTHER; note = 2'-fluoroadenosine-3'-phosphate
  modified_base 8: mod_base = OTHER; note = 2'-O-methyladenosine-3'-phosphate
  modified_base 9: mod_base = OTHER; note = 2'-fluoroguanosine-3'-phosphate
  modified_base 10: mod_base = OTHER; note = 2'-fluoroadenosine-3'-phosphate
  modified_base 11: mod_base = OTHER; note = 2'-fluorocytidine-3'-phosphate
  modified_base 12: mod_base = OTHER; note = 2'-O-methyladenosine-3'-phosphate
  modified_base 13: mod_base = OTHER; note = 2'-fluorouridine-3'-phosphate
  modified_base 14: mod_base = OTHER; note = 2'-O-methyluridine-3'-phosphate
  modified_base 15: mod_base = OTHER; note = 2'-fluoroguanosine-3'-phosphate
  modified_base 16: mod_base = OTHER; note = 2'-O-methylguanosine-3'-phosphate
  modified_base 17: mod_base = OTHER; note = 2'-fluorouridine-3'-phosphate
  modified_base 18: mod_base = OTHER; note = 2'-O-methylguanosine-3'-phosphate
  modified_base 19: mod_base = OTHER; note = 2'-fluoroadenosine-3'-phosphate
  modified_base 20: mod_base = OTHER; note = 2'-O-methylguanosine-3'-phosphate
  modified_base 21: mod_base = OTHER; note = 2'-fluoroadenosine-3'-phosphate attached to N-[tris(N-acetylgalactosamine-alkyl)-amidodecanoyl)]-4-hydr oxyprolinol Hyp-(N-acetylgalactosamine-alkyl)3
atcgacaagacattggtgaga

SEQ ID NO: 783 - RNA, 21 nt, synthetic construct
  misc_feature 1..21: note = Description of Artificial Sequence: Synthetic oligonucleotide
  source 1..21: mol_type = other RNA
  modified_base 1: mod_base = OTHER; note = 2'-fluoroadenosine-3'-phosphorothioate
  modified_base 2: mod_base = OTHER; note = 2'-O-methylcytidine-3'- phosphorothioate
  modified_base 3: mod_base = OTHER; note = 2'-fluoroadenosine-3'-phosphate
  modified_base 4: mod_base = OTHER; note = 2'-O-methyluridine-3'-phosphate
  modified_base 5: mod_base = OTHER; note = 2'-fluorouridine-3'-phosphate
  modified_base 6: mod_base = OTHER; note = 2'-O-methylguanosine-3'-phosphate
  modified_base 7: mod_base = OTHER; note = 2'-fluoroguanosine-3'-phosphate
  modified_base 8: mod_base = OTHER; note = 2'-O-methyluridine-3'-phosphate
  modified_base 9: mod_base = OTHER; note = 2'-fluoroguanosine-3'-phosphate
  modified_base 10: mod_base = OTHER; note = 2'-fluoroadenosine-3'-phosphate
  modified_base 11: mod_base = OTHER; note = 2'-fluoroguanosine-3'-phosphate
  modified_base 12: mod_base = OTHER; note = 2'-O-methylguanosine-3'-phosphate
  modified_base 13: mod_base = OTHER; note = 2'-fluoroadenosine-3'-phosphate
  modified_base 14: mod_base = OTHER; note = 2'-O-methyladenosine-3'-phosphate
  modified_base 15: mod_base = OTHER; note = 2'-fluoroadenosine-3'-phosphate
  modified_base 16: mod_base = OTHER; note = 2'-O-methyladenosine-3'-phosphate
  modified_base 17: mod_base = OTHER; note = 2'-fluoroadenosine-3'-phosphate
  modified_base 18: mod_base = OTHER; note = 2'-O-methyluridine-3'-phosphate
  modified_base 19: mod_base = OTHER; note = 2'-fluorocytidine-3'-phosphate
  modified_base 20: mod_base = OTHER; note = 2'-O-methylcytidine-3'-phosphate
  modified_base 21: mod_base = OTHER; note = 2'-fluorouridine-3'-phosphate attached to N-[tris(N-acetylgalactosamine-alkyl)-amidodecanoyl)]-4-hydr oxyprolinol Hyp-(N-acetylgalactosamine-alkyl)3
acattggtgaggaaaaatcct

SEQ ID NO: 784 - RNA, 21 nt, synthetic construct
  misc_feature 1..21: note = Description of Artificial Sequence: Synthetic oligonucleotide
  source 1..21: mol_type = other RNA
  modified_base 1: mod_base = OTHER; note = 2'-fluoroguanosine-3'-phosphorothioate
  modified_base 2: mod_base = OTHER; note = 2'-O-methyladenosine-3'- phosphorothioate
  modified_base 3: mod_base = OTHER; note = 2'-fluoroadenosine-3'-phosphate
  modified_base 4: mod_base = OTHER; note = 2'-O-methyladenosine-3'-phosphate
  modified_base 5: mod_base = OTHER; note = 2'-fluoroguanosine-3'-phosphate
  modified_base 6: mod_base = OTHER; note = 2'-O-methyluridine-3'-phosphate
  modified_base 7: mod_base = OTHER; note = 2'-fluorocytidine-3'-phosphate
  modified_base 8: mod_base = OTHER; note = 2'-O-methyladenosine-3'-phosphate
  modified_base 9: mod_base = OTHER; note = 2'-fluorouridine-3'-phosphate
  modified_base 10: mod_base = OTHER; note = 2'-fluorocytidine-3'-phosphate
  modified_base 11: mod_base = OTHER; note = 2'-fluoroguanosine-3'-phosphate
  modified_base 12: mod_base = OTHER; note = 2'-O-methyladenosine-3'-phosphate
  modified_base 13: mod_base = OTHER; note = 2'-fluorocytidine-3'-phosphate
  modified_base 14: mod_base = OTHER; note = 2'-O-methyladenosine-3'-phosphate
  modified_base 15: mod_base = OTHER; note = 2'-fluoroadenosine-3'-phosphate
  modified_base 16: mod_base = OTHER; note = 2'-O-methylguanosine-3'-phosphate
  modified_base 17: mod_base = OTHER; note = 2'-fluoroadenosine-3'-phosphate
  modified_base 18: mod_base = OTHER; note = 2'-O-methylcytidine-3'-phosphate
  modified_base 19: mod_base = OTHER; note = 2'-fluoroadenosine-3'-phosphate
  modified_base 20: mod_base = OTHER; note = 2'-O-methyluridine-3'-phosphate
  modified_base 21: mod_base = OTHER; note = 2'-fluorouridine-3'-phosphate attached to N-[tris(N-acetylgalactosamine-alkyl)-amidodecanoyl)]-4-hydr oxyprolinol Hyp-(N-acetylgalactosamine-alkyl)3
gaaagtcatcgacaagacatt

SEQ ID NO: 785 - RNA, 21 nt, synthetic construct
  misc_feature 1..21: note = Description of Artificial Sequence: Synthetic oligonucleotide
  source 1..21: mol_type = other RNA
  modified_base 1: mod_base = OTHER; note = 2'-fluoroadenosine-3'-phosphorothioate
  modified_base 2: mod_base = OTHER; note = 2'-O-methyladenosine-3'- phosphorothioate
  modified_base 3: mod_base = OTHER; note = 2'-fluoroadenosine-3'-phosphate
  modified_base 4: mod_base = OTHER; note = 2'-O-methylguanosine-3'-phosphate
  modified_base 5: mod_base = OTHER; note = 2'-fluorouridine-3'-phosphate
  modified_base 6: mod_base = OTHER; note = 2'-O-methylcytidine-3'-phosphate
  modified_base 7: mod_base = OTHER; note = 2'-fluoroadenosine-3'-phosphate
  modified_base 8: mod_base = OTHER; note = 2'-O-methyluridine-3'-phosphate
  modified_base 9: mod_base = OTHER; note = 2'-fluorocytidine-3'-phosphate
  modified_base 10: mod_base = OTHER; note = 2'-fluoroguanosine-3'-phosphate
  modified_base 11: mod_base = OTHER; note = 2'-fluoroadenosine-3'-phosphate
  modified_base 12: mod_base = OTHER; note = 2'-O-methylcytidine-3'-phosphate
  modified_base 13: mod_base = OTHER; note = 2'-fluoroadenosine-3'-phosphate
  modified_base 14: mod_base = OTHER; note = 2'-O-methyladenosine-3'-phosphate
  modified_base 15: mod_base = OTHER; note = 2'-fluoroguanosine-3'-phosphate
  modified_base 16: mod_base = OTHER; note = 2'-O-methyladenosine-3'-phosphate
  modified_base 17: mod_base = OTHER; note = 2'-fluorocytidine-3'-phosphate
  modified_base 18: mod_base = OTHER; note = 2'-O-methyladenosine-3'-phosphate
  modified_base 19: mod_base = OTHER; note = 2'-fluorouridine-3'-phosphate
  modified_base 20: mod_base = OTHER; note = 2'-O-methyluridine-3'-phosphate
  modified_base 21: mod_base = OTHER; note = 2'-fluoroadenosine-3'-phosphate attached to N-[tris(N-acetylgalactosamine-alkyl)-amidodecanoyl)]-4-hydr oxyprolinol Hyp-(N-acetylgalactosamine-alkyl)3
aaagtcatcgacaagacatta

SEQ ID NO: 786 - RNA, 23 nt, synthetic construct
  misc_feature 1..23: note = Description of Artificial Sequence: Synthetic oligonucleotide
  source 1..23: mol_type = other RNA
  modified_base 1: mod_base = OTHER; note = 2'-O-methyladenosine-3'- phosphorothioate
  modified_base 2: mod_base = OTHER; note = 2'-fluorouridine -3'-phosphorothioate
  modified_base 3: mod_base = OTHER; note = 2'-O-methyluridine-3'-phosphate
  modified_base 4: mod_base = OTHER; note = 2'-fluorouridine-3'-phosphate
  modified_base 5: mod_base = OTHER; note = 2'-O-methylcytidine-3'-phosphate
  modified_base 6: mod_base = OTHER; note = 2'-fluorouridine-3'-phosphate
  modified_base 7: mod_base = OTHER; note = 2'-O-methyladenosine-3'-phosphate
  modified_base 8: mod_base = OTHER; note = 2'-fluoroadenosine-3'-phosphate
  modified_base 9: mod_base = OTHER; note = 2'-O-methyladenosine-3'-phosphate
  modified_base 10: mod_base = OTHER; note = 2'-fluoroadenosine-3'-phosphate
  modified_base 11: mod_base = OTHER; note = 2'-O-methylguanosine-3'-phosphate
  modified_base 12: mod_base = OTHER; note = 2'-O-methylguanosine-3'-phosphate
  modified_base 13: mod_base = OTHER; note = 2'-O-methyluridine-3'-phosphate
  modified_base 14: mod_base = OTHER; note = 2'-fluorouridine-3'-phosphate
  modified_base 15: mod_base = OTHER; note = 2'-O-methylcytidine-3'-phosphate
  modified_base 16: mod_base = OTHER; note = 2'-fluorocytidine-3'-phosphate
  modified_base 17: mod_base = OTHER; note = 2'-O-methyluridine-3'-phosphate
  modified_base 18: mod_base = OTHER; note = 2'-fluoroadenosine-3'-phosphate
  modified_base 19: mod_base = OTHER; note = 2'-O-methylguanosine-3'-phosphate
  modified_base 20: mod_base = OTHER; note = 2'-fluoroguanosine-3'-phosphate
  modified_base 21: mod_base = OTHER; note = 2'-O-methyladenosine-3'- phosphorothioate
  modified_base 22: mod_base = OTHER; note = 2'-O-methylcytidine-3'- phosphorothioate
  modified_base 23: mod_base = OTHER; note = 2'-O-methyladenosine-3'-phosphate
atttctaaaaggttcctaggaca

SEQ ID NO: 787 - RNA, 23 nt, synthetic construct
  misc_feature 1..23: note = Description of Artificial Sequence: Synthetic oligonucleotide
  source 1..23: mol_type = other RNA
  modified_base 1: mod_base = OTHER; note = 2'-O-methyluridine-3'-phosphorothioate
  modified_base 2: mod_base = OTHER; note = 2'-fluoroadenosine-3'-phosphorothioate
  modified_base 3: mod_base = OTHER; note = 2'-O-methyluridine-3'-phosphate
  modified_base 4: mod_base = OTHER; note = 2'-fluoroadenosine-3'-phosphate
  modified_base 5: mod_base = OTHER; note = 2'-O-methyluridine-3'-phosphate
  modified_base 6: mod_base = OTHER; note = 2'-fluorouridine-3'-phosphate
  modified_base 7: mod_base = OTHER; note = 2'-O-methyluridine-3'-phosphate
  modified_base 8: mod_base = OTHER; note = 2'-fluorocytidine-3'-phosphate
  modified_base 9: mod_base = OTHER; note = 2'-O-methylcytidine-3'-phosphate
  modified_base 10: mod_base = OTHER; note = 2'-fluoroadenosine-3'-phosphate
  modified_base 11: mod_base = OTHER; note = 2'-O-methylguanosine-3'-phosphate
  modified_base 12: mod_base = OTHER; note = 2'-O-methylguanosine-3'-phosphate
  modified_base 13: mod_base = OTHER; note = 2'-O-methyladenosine-3'-phosphate
  modified_base 14: mod_base = OTHER; note = 2'-fluorouridine-3'-phosphate
  modified_base 15: mod_base = OTHER; note = 2'-O-methylguanosine-3'-phosphate
  modified_base 16: mod_base = OTHER; note = 2'-fluoroadenosine-3'-phosphate
  modified_base 17: mod_base = OTHER; note = 2'-O-methyladenosine-3'-phosphate
  modified_base 18: mod_base = OTHER; note = 2'-fluoroadenosine-3'-phosphate
  modified_base 19: mod_base = OTHER; note = 2'-O-methylguanosine-3'-phosphate
  modified_base 20: mod_base = OTHER; note = 2'-fluorouridine-3'-phosphate
  modified_base 21: mod_base = OTHER; note = 2'-O-methylcytidine-3'- phosphorothioate
  modified_base 22: mod_base = OTHER; note = 2'-O-methylcytidine-3'- phosphorothioate
  modified_base 23: mod_base = OTHER; note = 2'-O-methyladenosine-3'-phosphate
tatatttccaggatgaaagtcca

SEQ ID NO: 788 - RNA, 23 nt, synthetic construct
  misc_feature 1..23: note = Description of Artificial Sequence: Synthetic oligonucleotide
  source 1..23: mol_type = other RNA
  modified_base 1: mod_base = OTHER; note = 2'-O-methyluridine-3'-phosphorothioate
  modified_base 2: mod_base = OTHER; note = 2'-fluorouridine -3'-phosphorothioate
  modified_base 3: mod_base = OTHER; note = 2'-O-methylguanosine-3'-phosphate
  modified_base 4: mod_base = OTHER; note = 2'-fluorouridine-3'-phosphate
  modified_base 5: mod_base = OTHER; note = 2'-O-methylcytidine-3'-phosphate
  modified_base 6: mod_base = OTHER; note = 2'-fluoroguanosine-3'-phosphate
  modified_base 7: mod_base = OTHER; note = 2'-O-methyladenosine-3'-phosphate
  modified_base 8: mod_base = OTHER; note = 2'-fluorouridine-3'-phosphate
  modified_base 9: mod_base = OTHER; note = 2'-O-methylguanosine-3'-phosphate
  modified_base 10: mod_base = OTHER; note = 2'-fluoroadenosine-3'-phosphate
  modified_base 11: mod_base = OTHER; note = 2'-O-methylcytidine-3'-phosphate
  modified_base 12: mod_base = OTHER; note = 2'-O-methyluridine-3'-phosphate
  modified_base 13: mod_base = OTHER; note = 2'-O-methyluridine-3'-phosphate
  modified_base 14: mod_base = OTHER; note = 2'-fluorouridine-3'-phosphate
  modified_base 15: mod_base = OTHER; note = 2'-O-methylcytidine-3'-phosphate
  modified_base 16: mod_base = OTHER; note = 2'-fluoroadenosine-3'-phosphate
  modified_base 17: mod_base = OTHER; note = 2'-O-methylcytidine-3'-phosphate
  modified_base 18: mod_base = OTHER; note = 2'-fluoroadenosine-3'-phosphate
  modified_base 19: mod_base = OTHER; note = 2'-O-methyluridine-3'-phosphate
  modified_base 20: mod_base = OTHER; note = 2'-fluorouridine-3'-phosphate
  modified_base 21: mod_base = OTHER; note = 2'-O-methylcytidine-3'- phosphorothioate
  modified_base 22: mod_base = OTHER; note = 2'-O-methyluridine-3'-phosphorothioate
  modified_base 23: mod_base = OTHER; note = 2'-O-methylguanosine-3'-phosphate
ttgtcgatgactttcacattctg

SEQ ID NO: 789 - RNA, 23 nt, synthetic construct
  misc_feature 1..23: note = Description of Artificial Sequence: Synthetic oligonucleotide
  source 1..23: mol_type = other RNA
  modified_base 1: mod_base = OTHER; note = 2'-O-methyladenosine-3'- phosphorothioate
  modified_base 2: mod_base = OTHER; note = 2'-fluoroadenosine-3'-phosphorothioate
  modified_base 3: mod_base = OTHER; note = 2'-O-methylguanosine-3'-phosphate
  modified_base 4: mod_base = OTHER; note = 2'-fluoroguanosine-3'-phosphate
  modified_base 5: mod_base = OTHER; note = 2'-O-methyladenosine-3'-phosphate
  modified_base 6: mod_base = OTHER; note = 2'-fluorouridine-3'-phosphate
  modified_base 7: mod_base = OTHER; note = 2'-O-methyluridine-3'-phosphate
  modified_base 8: mod_base = OTHER; note = 2'-fluorouridine-3'-phosphate
  modified_base 9: mod_base = OTHER; note = 2'-O-methyluridine-3'-phosphate
  modified_base 10: mod_base = OTHER; note = 2'-fluorouridine-3'-phosphate
  modified_base 11: mod_base = OTHER; note = 2'-O-methylcytidine-3'-phosphate
  modified_base 12: mod_base = OTHER; note = 2'-O-methylcytidine-3'-phosphate
  modified_base 13: mod_base = OTHER; note = 2'-O-methyluridine-3'-phosphate
  modified_base 14: mod_base = OTHER; note = 2'-fluorocytidine-3'-phosphate
  modified_base 15: mod_base = OTHER; note = 2'-O-methyladenosine-3'-phosphate
  modified_base 16: mod_base = OTHER; note = 2'-fluorocytidine-3'-phosphate
  modified_base 17: mod_base = OTHER; note = 2'-O-methylcytidine-3'-phosphate
  modified_base 18: mod_base = OTHER; note = 2'-fluoroadenosine-3'-phosphate
  modified_base 19: mod_base = OTHER; note = 2'-O-methyladenosine-3'-phosphate
  modified_base 20: mod_base = OTHER; note = 2'-fluorouridine-3'-phosphate
  modified_base 21: mod_base = OTHER; note = 2'-O-methylguanosine-3'- phosphorothioate
  modified_base 22: mod_base = OTHER; note = 2'-O-methyluridine-3'-phosphorothioate
  modified_base 23: mod_base = OTHER; note = 2'-O-methylcytidine-3'-phosphate
aaggatttttcctcaccaatgtc

SEQ ID NO: 790 - RNA, 23 nt, synthetic construct
  misc_feature 1..23: note = Description of Artificial Sequence: Synthetic oligonucleotide
  source 1..23: mol_type = other RNA
  modified_base 1: mod_base = OTHER; note = 2'-O-methyluridine-3'-phosphorothioate
  modified_base 2: mod_base = OTHER; note = 2'-fluorocytidine-3'-phosphorothioate
  modified_base 3: mod_base = OTHER; note = 2'-O-methyluridine-3'-phosphate
  modified_base 4: mod_base = OTHER; note = 2'-fluorocytidine-3'-phosphate
  modified_base 5: mod_base = OTHER; note = 2'-O-methyladenosine-3'-phosphate
  modified_base 6: mod_base = OTHER; note = 2'-fluorocytidine-3'-phosphate
  modified_base 7: mod_base = OTHER; note = 2'-O-methylcytidine-3'-phosphate
  modified_base 8: mod_base = OTHER; note = 2'-fluoroadenosine-3'-phosphate
  modified_base 9: mod_base = OTHER; note = 2'-O-methyladenosine-3'-phosphate
  modified_base 10: mod_base = OTHER; note = 2'-fluorouridine-3'-phosphate
  modified_base 11: mod_base = OTHER; note = 2'-O-methylguanosine-3'-phosphate
  modified_base 12: mod_base = OTHER; note = 2'-O-methyluridine-3'-phosphate
  modified_base 13: mod_base = OTHER; note = 2'-O-methylcytidine-3'-phosphate
  modified_base 14: mod_base = OTHER; note = 2'-fluorouridine-3'-phosphate
  modified_base 15: mod_base = OTHER; note = 2'-O-methyluridine-3'-phosphate
  modified_base 16: mod_base = OTHER; note = 2'-fluoroguanosine-3'-phosphate
  modified_base 17: mod_base = OTHER; note = 2'-O-methyluridine-3'-phosphate
  modified_base 18: mod_base = OTHER; note = 2'-fluorocytidine-3'-phosphate
  modified_base 19: mod_base = OTHER; note = 2'-O-methylguanosine-3'-phosphate
  modified_base 20: mod_base = OTHER; note = 2'-fluoroadenosine-3'-phosphate
  modified_base 21: mod_base = OTHER; note = 2'-O-methyluridine-3'-phosphorothioate
  modified_base 22: mod_base = OTHER; note = 2'-O-methylguanosine-3'- phosphorothioate
  modified_base 23: mod_base = OTHER; note = 2'-O-methyladenosine-3'-phosphate
tctcaccaatgtcttgtcgatga

SEQ ID NO: 791 - RNA, 23 nt, synthetic construct
  misc_feature 1..23: note = Description of Artificial Sequence: Synthetic oligonucleotide
  source 1..23: mol_type = other RNA
  modified_base 1: mod_base = OTHER; note = 2'-O-methyladenosine-3'- phosphorothioate
  modified_base 2: mod_base = OTHER; note = 2'-fluoroguanosine-3'-phosphorothioate
  modified_base 3: mod_base = OTHER; note = 2'-O-methylguanosine-3'-phosphate
  modified_base 4: mod_base = OTHER; note = 2'-fluoroadenosine-3'-phosphate
  modified_base 5: mod_base = OTHER; note = 2'-O-methyluridine-3'-phosphate
  modified_base 6: mod_base = OTHER; note = 2'-fluorouridine-3'-phosphate
  modified_base 7: mod_base = OTHER; note = 2'-O-methyluridine-3'-phosphate
  modified_base 8: mod_base = OTHER; note = 2'-fluorouridine-3'-phosphate
  modified_base 9: mod_base = OTHER; note = 2'-O-methyluridine-3'-phosphate
  modified_base 10: mod_base = OTHER; note = 2'-fluorocytidine-3'-phosphate
  modified_base 11: mod_base = OTHER; note = 2'-O-methylcytidine-3'-phosphate
  modified_base 12: mod_base = OTHER; note = 2'-O-methyluridine-3'-phosphate
  modified_base 13: mod_base = OTHER; note = 2'-O-methylcytidine-3'-phosphate
  modified_base 14: mod_base = OTHER; note = 2'-fluoroadenosine-3'-phosphate
  modified_base 15: mod_base = OTHER; note = 2'-O-methylcytidine-3'-phosphate
  modified_base 16: mod_base = OTHER; note = 2'-fluorocytidine-3'-phosphate
  modified_base 17: mod_base = OTHER; note = 2'-O-methyladenosine-3'-phosphate
  modified_base 18: mod_base = OTHER; note = 2'-fluoroadenosine-3'-phosphate
  modified_base 19: mod_base = OTHER; note = 2'-O-methyluridine-3'-phosphate
  modified_base 20: mod_base = OTHER; note = 2'-fluoroguanosine-3'-phosphate
  modified_base 21: mod_base = OTHER; note = 2'-O-methyluridine-3'-phosphorothioate
  modified_base 22: mod_base = OTHER; note = 2'-O-methylcytidine-3'- phosphorothioate
  modified_base 23: mod_base = OTHER; note = 2'-O-methyluridine-3'-phosphate
aggatttttcctcaccaatgtct

SEQ ID NO: 792 - RNA, 23 nt, synthetic construct
  misc_feature 1..23: note = Description of Artificial Sequence: Synthetic oligonucleotide
  source 1..23: mol_type = other RNA
  modified_base 1: mod_base = OTHER; note = 2'-O-methyladenosine-3'- phosphorothioate
  modified_base 2: mod_base = OTHER; note = 2'-fluoroadenosine-3'-phosphorothioate
  modified_base 3: mod_base = OTHER; note = 2'-O-methyluridine-3'-phosphate
  modified_base 4: mod_base = OTHER; note = 2'-fluoroguanosine-3'-phosphate
  modified_base 5: mod_base = OTHER; note = 2'-O-methyluridine-3'-phosphate
  modified_base 6: mod_base = OTHER; note = 2'-fluorocytidine-3'-phosphate
  modified_base 7: mod_base = OTHER; note = 2'-O-methyluridine-3'-phosphate
  modified_base 8: mod_base = OTHER; note = 2'-fluorouridine-3'-phosphate
  modified_base 9: mod_base = OTHER; note = 2'-O-methylguanosine-3'-phosphate
  modified_base 10: mod_base = OTHER; note = 2'-fluorouridine-3'-phosphate
  modified_base 11: mod_base = OTHER; note = 2'-O-methylcytidine-3'-phosphate
  modified_base 12: mod_base = OTHER; note = 2'-O-methylguanosine-3'-phosphate
  modified_base 13: mod_base = OTHER; note = 2'-O-methyladenosine-3'-phosphate
  modified_base 14: mod_base = OTHER; note = 2'-fluorouridine-3'-phosphate
  modified_base 15: mod_base = OTHER; note = 2'-O-methylguanosine-3'-phosphate
  modified_base 16: mod_base = OTHER; note = 2'-fluoroadenosine-3'-phosphate
  modified_base 17: mod_base = OTHER; note = 2'-O-methylcytidine-3'-phosphate
  modified_base 18: mod_base = OTHER; note = 2'-fluorouridine-3'-phosphate
  modified_base 19: mod_base = OTHER; note = 2'-O-methyluridine-3'-phosphate
  modified_base 20: mod_base = OTHER; note = 2'-fluorouridine-3'-phosphate
  modified_base 21: mod_base = OTHER; note = 2'-O-methylcytidine-3'- phosphorothioate
  modified_base 22: mod_base = OTHER; note = 2'-O-methyladenosine-3'- phosphorothioate
  modified_base 23: mod_base = OTHER; note = 2'-O-methylcytidine-3'-phosphate
aatgtcttgtcgatgactttcac

SEQ ID NO: 793 - RNA, 23 nt, synthetic construct
  misc_feature 1..23: note = Description of Artificial Sequence: Synthetic oligonucleotide
  source 1..23: mol_type = other RNA
  modified_base 1: mod_base = OTHER; note = 2'-O-methyluridine-3'-phosphorothioate
  modified_base 2: mod_base = OTHER; note = 2'-fluoroadenosine-3'-phosphorothioate
  modified_base 3: mod_base = OTHER; note = 2'-O-methyladenosine-3'-phosphate
  modified_base 4: mod_base = OTHER; note = 2'-fluorouridine-3'-phosphate
  modified_base 5: mod_base = OTHER; note = 2'-O-methylguanosine-3'-phosphate
  modified_base 6: mod_base = OTHER; note = 2'-fluorouridine-3'-phosphate
  modified_base 7: mod_base = OTHER; note = 2'-O-methylcytidine-3'-phosphate
  modified_base 8: mod_base = OTHER; note = 2'-fluorouridine-3'-phosphate
  modified_base 9: mod_base = OTHER; note = 2'-O-methyluridine-3'-phosphate
  modified_base 10: mod_base = OTHER; note = 2'-fluoroguanosine-3'-phosphate
  modified_base 11: mod_base = OTHER; note = 2'-O-methyluridine-3'-phosphate
  modified_base 12: mod_base = OTHER; note = 2'-O-methylcytidine-3'-phosphate
  modified_base 13: mod_base = OTHER; note = 2'-O-methylguanosine-3'-phosphate
  modified_base 14: mod_base = OTHER; note = 2'-fluoroadenosine-3'-phosphate
  modified_base 15: mod_base = OTHER; note = 2'-O-methyluridine-3'-phosphate
  modified_base 16: mod_base = OTHER; note = 2'-fluoroguanosine-3'-phosphate
  modified_base 17: mod_base = OTHER; note = 2'-O-methyladenosine-3'-phosphate
  modified_base 18: mod_base = OTHER; note = 2'-fluorocytidine-3'-phosphate
  modified_base 19: mod_base = OTHER; note = 2'-O-methyluridine-3'-phosphate
  modified_base 20: mod_base = OTHER; note = 2'-fluorouridine-3'-phosphate
  modified_base 21: mod_base = OTHER; note = 2'-O-methyluridine-3'-phosphorothioate
  modified_base 22: mod_base = OTHER; note = 2'-O-methylcytidine-3'- phosphorothioate
  modified_base 23: mod_base = OTHER; note = 2'-O-methyladenosine-3'-phosphate
taatgtcttgtcgatgactttca

SEQ ID NO: 794 - RNA, 21 nt, synthetic construct
  misc_feature 1..21: note = Description of Artificial Sequence: Synthetic oligonucleotide
  source 1..21: mol_type = other RNA
atgtatgttacttcttagaga

SEQ ID NO: 795 - RNA, 23 nt, synthetic construct
  misc_feature 1..23: note = Description of Artificial Sequence: Synthetic oligonucleotide
  source 1..23: mol_type = other RNA
tctctaagaagtaacatacatcc

SEQ ID NO: 796 - RNA, 21 nt, synthetic construct
  misc_feature 1..21: note = Description of Artificial Sequence: Synthetic oligonucleotide
  source 1..21: mol_type = other RNA
tgtatgttacttcttagagag

SEQ ID NO: 797 - RNA, 23 nt, synthetic construct
  misc_feature 1..23: note = Description of Artificial Sequence: Synthetic oligonucleotide
  source 1..23: mol_type = other RNA
ctctctaagaagtaacatacatc

SEQ ID NO: 798 - RNA, 21 nt, synthetic construct
  misc_feature 1..21: note = Description of Artificial Sequence: Synthetic oligonucleotide
  source 1..21: mol_type = other RNA
taggatgtatgttacttctta

SEQ ID NO: 799 - RNA, 23 nt, synthetic construct
  misc_feature 1..23: note = Description of Artificial Sequence: Synthetic oligonucleotide
  source 1..23: mol_type = other RNA
taagaagtaacatacatcctaaa

SEQ ID NO: 800 - RNA, 21 nt, synthetic construct
  misc_feature 1..21: note = Description of Artificial Sequence: Synthetic oligonucleotide
  source 1..21: mol_type = other RNA
ttaggatgtatgttacttctt

SEQ ID NO: 801 - RNA, 23 nt, synthetic construct
  misc_feature 1..23: note = Description of Artificial Sequence: Synthetic oligonucleotide
  source 1..23: mol_type = other RNA
aagaagtaacatacatcctaaaa

SEQ ID NO: 802 - RNA, 21 nt, synthetic construct
  misc_feature 1..21: note = Description of Artificial Sequence: Synthetic oligonucleotide
  source 1..21: mol_type = other RNA
agaaaggtgttcaagatgtcc

SEQ ID NO: 803 - RNA, 23 nt, synthetic construct
  misc_feature 1..23: note = Description of Artificial Sequence: Synthetic oligonucleotide
  source 1..23: mol_type = other RNA
ggacatcttgaacacctttctcc

SEQ ID NO: 804 - RNA, 21 nt, synthetic construct
  misc_feature 1..21: note = Description of Artificial Sequence: Synthetic oligonucleotide
  source 1..21: mol_type = other RNA
gaaaggtgttcaagatgtcct

SEQ ID NO: 805 - RNA, 23 nt, synthetic construct
  misc_feature 1..23: note = Description of Artificial Sequence: Synthetic oligonucleotide
  source 1..23: mol_type = other RNA
aggacatcttgaacacctttctc

SEQ ID NO: 806 - RNA, 21 nt, synthetic construct
  misc_feature 1..21: note = Description of Artificial Sequence: Synthetic oligonucleotide
  source 1..21: mol_type = other RNA
ggggagaaaggtgttcaagat

SEQ ID NO: 807 - RNA, 23 nt, synthetic construct
  misc_feature 1..23: note = Description of Artificial Sequence: Synthetic oligonucleotide
  source 1..23: mol_type = other RNA
atcttgaacacctttctccccct

SEQ ID NO: 808 - RNA, 21 nt, synthetic construct
  misc_feature 1..21: note = Description of Artificial Sequence: Synthetic oligonucleotide
  source 1..21: mol_type = other RNA
gggggagaaaggtgttcaaga

SEQ ID NO: 809 - RNA, 23 nt, synthetic construct
  misc_feature 1..23: note = Description of Artificial Sequence: Synthetic oligonucleotide
  source 1..23: mol_type = other RNA
tcttgaacacctttctccccctg

SEQ ID NO: 810 - RNA, 21 nt, synthetic construct
  misc_feature 1..21: note = Description of Artificial Sequence: Synthetic oligonucleotide
  source 1..21: mol_type = other RNA
agaaactttggctgataatat

SEQ ID NO: 811 - RNA, 23 nt, synthetic construct
  misc_feature 1..23: note = Description of Artificial Sequence: Synthetic oligonucleotide
  source 1..23: mol_type = other RNA
atattatcagccaaagtttcttc

SEQ ID NO: 812 - RNA, 21 nt, synthetic construct
  misc_feature 1..21: note = Description of Artificial Sequence: Synthetic oligonucleotide
  source 1..21: mol_type = other RNA
gaaactttggctgataatatt

SEQ ID NO: 813 - RNA, 23 nt, synthetic construct
  misc_feature 1..23: note = Description of Artificial Sequence: Synthetic oligonucleotide
  source 1..23: mol_type = other RNA
aatattatcagccaaagtttctt

SEQ ID NO: 814 - RNA, 21 nt, synthetic construct
  misc_feature 1..21: note = Description of Artificial Sequence: Synthetic oligonucleotide
  source 1..21: mol_type = other RNA
atgaagaaactttggctgata

SEQ ID NO: 815 - RNA, 23 nt, synthetic construct
  misc_feature 1..23: note = Description of Artificial Sequence: Synthetic oligonucleotide
  source 1..23: mol_type = other RNA
tatcagccaaagtttcttcatca

SEQ ID NO: 816 - RNA, 21 nt, synthetic construct
  misc_feature 1..21: note = Description of Artificial Sequence: Synthetic oligonucleotide
  source 1..21: mol_type = other RNA
gatgaagaaactttggctgat

SEQ ID NO: 817 - RNA, 23 nt, synthetic construct
  misc_feature 1..23: note = Description of Artificial Sequence: Synthetic oligonucleotide
  source 1..23: mol_type = other RNA
atcagccaaagtttcttcatcat

SEQ ID NO: 818 - RNA, 21 nt, synthetic construct
  misc_feature 1..21: note = Description of Artificial Sequence: Synthetic oligonucleotide
  source 1..21: mol_type = other RNA
aaggcactgatgttctgaaag

SEQ ID NO: 819 - RNA, 23 nt, synthetic construct
  misc_feature 1..23: note = Description of Artificial Sequence: Synthetic oligonucleotide
  source 1..23: mol_type = other RNA
ctttcagaacatcagtgcctttc

SEQ ID NO: 820 - RNA, 21 nt, synthetic construct
  misc_feature 1..21: note = Description of Artificial Sequence: Synthetic oligonucleotide
  source 1..21: mol_type = other RNA
aggcactgatgttctgaaagc

SEQ ID NO: 821 - RNA, 23 nt, synthetic construct
  misc_feature 1..23: note = Description of Artificial Sequence: Synthetic oligonucleotide
  source 1..23: mol_type = other RNA
gctttcagaacatcagtgccttt

SEQ ID NO: 822 - RNA, 21 nt, synthetic construct
  misc_feature 1..21: note = Description of Artificial Sequence: Synthetic oligonucleotide
  source 1..21: mol_type = other RNA
cggaaaggcactgatgttctg

SEQ ID NO: 823 - RNA, 23 nt, synthetic construct
  misc_feature 1..23: note = Description of Artificial Sequence: Synthetic oligonucleotide
  source 1..23: mol_type = other RNA
cagaacatcagtgcctttccgca

SEQ ID NO: 824 - RNA, 21 nt, synthetic construct
  misc_feature 1..21: note = Description of Artificial Sequence: Synthetic oligonucleotide
  source 1..21: mol_type = other RNA
gcggaaaggcactgatgttct

SEQ ID NO: 825 - RNA, 23 nt, synthetic construct
  misc_feature 1..23: note = Description of Artificial Sequence: Synthetic oligonucleotide
  source 1..23: mol_type = other RNA
agaacatcagtgcctttccgcac

SEQ ID NO: 826 - RNA, 21 nt, synthetic construct
  misc_feature 1..21: note = Description of Artificial Sequence: Synthetic oligonucleotide
  source 1..21: mol_type = other RNA
agaagactgacatcattgcca

SEQ ID NO: 827 - RNA, 23 nt, synthetic construct
  misc_feature 1..23: note = Description of Artificial Sequence: Synthetic oligonucleotide
  source 1..23: mol_type = other RNA
tggcaatgatgtcagtcttctca

SEQ ID NO: 828 - RNA, 21 nt, synthetic construct
  misc_feature 1..21: note = Description of Artificial Sequence: Synthetic oligonucleotide
  source 1..21: mol_type = other RNA
gaagactgacatcattgccaa

SEQ ID NO: 829 - RNA, 23 nt, synthetic construct
  misc_feature 1..23: note = Description of Artificial Sequence: Synthetic oligonucleotide
  source 1..23: mol_type = other RNA
ttggcaatgatgtcagtcttctc

SEQ ID NO: 830 - RNA, 21 nt, synthetic construct
  misc_feature 1..21: note = Description of Artificial Sequence: Synthetic oligonucleotide
  source 1..21: mol_type = other RNA
gctgagaagactgacatcatt

SEQ ID NO: 831 - RNA, 23 nt, synthetic construct
  misc_feature 1..23: note = Description of Artificial Sequence: Synthetic oligonucleotide
  source 1..23: mol_type = other RNA
aatgatgtcagtcttctcagcca

SEQ ID NO: 832 - RNA, 21 nt, synthetic construct
  misc_feature 1..21: note = Description of Artificial Sequence: Synthetic oligonucleotide
  source 1..21: mol_type = other RNA
ggctgagaagactgacatcat

SEQ ID NO: 833 - RNA, 23 nt, synthetic construct
  misc_feature 1..23: note = Description of Artificial Sequence: Synthetic oligonucleotide
  source 1..23: mol_type = other RNA
atgatgtcagtcttctcagccat

SEQ ID NO: 834 - RNA, 21 nt, synthetic construct
  misc_feature 1..21: note = Description of Artificial Sequence: Synthetic oligonucleotide
  source 1..21: mol_type = other RNA
taatgcctgattcacaacttt

SEQ ID NO: 835 - RNA, 23 nt, synthetic construct
  misc_feature 1..23: note = Description of Artificial Sequence: Synthetic oligonucleotide
  source 1..23: mol_type = other RNA
aaagttgtgaatcaggcattacc

SEQ ID NO: 836 - RNA, 21 nt, synthetic construct
  misc_feature 1..21: note = Description of Artificial Sequence: Synthetic oligonucleotide
  source 1..21: mol_type = other RNA
aatgcctgattcacaactttg

SEQ ID NO: 837 - RNA, 23 nt, synthetic construct
  misc_feature 1..23: note = Description of Artificial Sequence: Synthetic oligonucleotide
  source 1..23: mol_type = other RNA
caaagttgtgaatcaggcattac

SEQ ID NO: 838 - RNA, 21 nt, synthetic construct
  misc_feature 1..21: note = Description of Artificial Sequence: Synthetic oligonucleotide
  source 1..21: mol_type = other RNA
ttggtaatgcctgattcacaa

SEQ ID NO: 839 - RNA, 23 nt, synthetic construct
  misc_feature 1..23: note = Description of Artificial Sequence: Synthetic oligonucleotide
  source 1..23: mol_type = other RNA
ttgtgaatcaggcattaccaaca

SEQ ID NO: 840 - RNA, 21 nt, synthetic construct
  misc_feature 1..21: note = Description of Artificial Sequence: Synthetic oligonucleotide
  source 1..21: mol_type = other RNA
gttggtaatgcctgattcaca

SEQ ID NO: 841 - RNA, 23 nt, synthetic construct
  misc_feature 1..23: note = Description of Artificial Sequence: Synthetic oligonucleotide
  source 1..23: mol_type = other RNA
tgtgaatcaggcattaccaacac

SEQ ID NO: 842 - RNA, 21 nt, synthetic construct
  misc_feature 1..21: note = Description of Artificial Sequence: Synthetic oligonucleotide
  source 1..21: mol_type = other RNA
tatcaaatggctgagaagact

SEQ ID NO: 843 - RNA, 23 nt, synthetic construct
  misc_feature 1..23: note = Description of Artificial Sequence: Synthetic oligonucleotide
  source 1..23: mol_type = other RNA
agtcttctcagccatttgatatc

SEQ ID NO: 844 - RNA, 21 nt, synthetic construct
  misc_feature 1..21: note = Description of Artificial Sequence: Synthetic oligonucleotide
  source 1..21: mol_type = other RNA
atcaaatggctgagaagactg

SEQ ID NO: 845 - RNA, 23 nt, synthetic construct
  misc_feature 1..23: note = Description of Artificial Sequence: Synthetic oligonucleotide
  source 1..23: mol_type = other RNA
cagtcttctcagccatttgatat

SEQ ID NO: 846 - RNA, 21 nt, synthetic construct
  misc_feature 1..21: note = Description of Artificial Sequence: Synthetic oligonucleotide
  source 1..21: mol_type = other RNA
aagatatcaaatggctgagaa

SEQ ID NO: 847 - RNA, 23 nt, synthetic construct
  misc_feature 1..23: note = Description of Artificial Sequence: Synthetic oligonucleotide
  source 1..23: mol_type = other RNA
ttctcagccatttgatatcttcc

SEQ ID NO: 848 - RNA, 21 nt, synthetic construct
  misc_feature 1..21: note = Description of Artificial Sequence: Synthetic oligonucleotide
  source 1..21: mol_type = other RNA
gaagatatcaaatggctgaga

SEQ ID NO: 849 - RNA, 23 nt, synthetic construct
  misc_feature 1..23: note = Description of Artificial Sequence: Synthetic oligonucleotide
  source 1..23: mol_type = other RNA
tctcagccatttgatatcttccc

SEQ ID NO: 850 - RNA, 21 nt, synthetic construct
  misc_feature 1..21: note = Description of Artificial Sequence: Synthetic oligonucleotide
  source 1..21: mol_type = other RNA
tctgacagtgcacaatatttt

SEQ ID NO: 851 - RNA, 23 nt, synthetic construct
  misc_feature 1..23: note = Description of Artificial Sequence: Synthetic oligonucleotide
  source 1..23: mol_type = other RNA
aaaatattgtgcactgtcagatc

SEQ ID NO: 852 - RNA, 21 nt, synthetic construct
  misc_feature 1..21: note = Description of Artificial Sequence: Synthetic oligonucleotide
  source 1..21: mol_type = other RNA
ctgacagtgcacaatattttc

SEQ ID NO: 853 - RNA, 23 nt, synthetic construct
  misc_feature 1..23: note = Description of Artificial Sequence: Synthetic oligonucleotide
  source 1..23: mol_type = other RNA
gaaaatattgtgcactgtcagat

SEQ ID NO: 854 - RNA, 21 nt, synthetic construct
  misc_feature 1..21: note = Description of Artificial Sequence: Synthetic oligonucleotide
  source 1..21: mol_type = other RNA
aagatctgacagtgcacaata

SEQ ID NO: 855 - RNA, 23 nt, synthetic construct
  misc_feature 1..23: note = Description of Artificial Sequence: Synthetic oligonucleotide
  source 1..23: mol_type = other RNA
tattgtgcactgtcagatcttgg

SEQ ID NO: 856 - RNA, 21 nt, synthetic construct
  misc_feature 1..21: note = Description of Artificial Sequence: Synthetic oligonucleotide
  source 1..21: mol_type = other RNA
caagatctgacagtgcacaat

SEQ ID NO: 857 - RNA, 23 nt, synthetic construct
  misc_feature 1..23: note = Description of Artificial Sequence: Synthetic oligonucleotide
  source 1..23: mol_type = other RNA
attgtgcactgtcagatcttgga

SEQ ID NO: 858 - RNA, 21 nt, synthetic construct
  misc_feature 1..21: note = Description of Artificial Sequence: Synthetic oligonucleotide
  source 1..21: mol_type = other RNA
actgatgttctgaaagctctg

SEQ ID NO: 859 - RNA, 23 nt, synthetic construct
  misc_feature 1..23: note = Description of Artificial Sequence: Synthetic oligonucleotide
  source 1..23: mol_type = other RNA
cagagctttcagaacatcagtgc

SEQ ID NO: 860 - RNA, 21 nt, synthetic construct
  misc_feature 1..21: note = Description of Artificial Sequence: Synthetic oligonucleotide
  source 1..21: mol_type = other RNA
ctgatgttctgaaagctctgg

SEQ ID NO: 861 - RNA, 23 nt, synthetic construct
  misc_feature 1..23: note = Description of Artificial Sequence: Synthetic oligonucleotide
  source 1..23: mol_type = other RNA
ccagagctttcagaacatcagtg

SEQ ID NO: 862 - RNA, 21 nt, synthetic construct
  misc_feature 1..21: note = Description of Artificial Sequence: Synthetic oligonucleotide
  source 1..21: mol_type = other RNA
aggcactgatgttctgaaagc

SEQ ID NO: 863 - RNA, 23 nt, synthetic construct
  misc_feature 1..23: note = Description of Artificial Sequence: Synthetic oligonucleotide
  source 1..23: mol_type = other RNA
gctttcagaacatcagtgccttt

SEQ ID NO: 864 - RNA, 21 nt, synthetic construct
  misc_feature 1..21: note = Description of Artificial Sequence: Synthetic oligonucleotide
  source 1..21: mol_type = other RNA
aaggcactgatgttctgaaag

SEQ ID NO: 865 - RNA, 23 nt, synthetic construct
  misc_feature 1..23: note = Description of Artificial Sequence: Synthetic oligonucleotide
  source 1..23: mol_type = other RNA
ctttcagaacatcagtgcctttc

SEQ ID NO: 866 - RNA, 21 nt, synthetic construct
  misc_feature 1..21: note = Description of Artificial Sequence: Synthetic oligonucleotide
  source 1..21: mol_type = other RNA
aacaacatgctaaatcagtac

SEQ ID NO: 867 - RNA, 23 nt, synthetic construct
  misc_feature 1..23: note = Description of Artificial Sequence: Synthetic oligonucleotide
  source 1..23: mol_type = other RNA
gtactgatttagcatgttgttca

SEQ ID NO: 868 - RNA, 21 nt, synthetic construct
  misc_feature 1..21: note = Description of Artificial Sequence: Synthetic oligonucleotide
  source 1..21: mol_type = other RNA
acaacatgctaaatcagtact

SEQ ID NO: 869 - RNA, 23 nt, synthetic construct
  misc_feature 1..23: note = Description of Artificial Sequence: Synthetic oligonucleotide
  source 1..23: mol_type = other RNA
agtactgatttagcatgttgttc

SEQ ID NO: 870 - RNA, 21 nt, synthetic construct
  misc_feature 1..21: note = Description of Artificial Sequence: Synthetic oligonucleotide
  source 1..21: mol_type = other RNA
tatgaacaacatgctaaatca

SEQ ID NO: 871 - RNA, 23 nt, synthetic construct
  misc_feature 1..23: note = Description of Artificial Sequence: Synthetic oligonucleotide
  source 1..23: mol_type = other RNA
tgatttagcatgttgttcataat

SEQ ID NO: 872 - RNA, 21 nt, synthetic construct
  misc_feature 1..21: note = Description of Artificial Sequence: Synthetic oligonucleotide
  source 1..21: mol_type = other RNA
ttatgaacaacatgctaaatc

SEQ ID NO: 873 - RNA, 23 nt, synthetic construct
  misc_feature 1..23: note = Description of Artificial Sequence: Synthetic oligonucleotide
  source 1..23: mol_type = other RNA
gatttagcatgttgttcataatc

SEQ ID NO: 874 - RNA, 21 nt, synthetic construct
  misc_feature 1..21: note = Description of Artificial Sequence: Synthetic oligonucleotide
  source 1..21: mol_type = other RNA
tctttagtgtctgaatatatc

SEQ ID NO: 875 - RNA, 23 nt, synthetic construct
  misc_feature 1..23: note = Description of Artificial Sequence: Synthetic oligonucleotide
  source 1..23: mol_type = other RNA
gatatattcagacactaaagatg

SEQ ID NO: 876 - RNA, 21 nt, synthetic construct
  misc_feature 1..21: note = Description of Artificial Sequence: Synthetic oligonucleotide
  source 1..21: mol_type = other RNA
ctttagtgtctgaatatatcc

SEQ ID NO: 877 - RNA, 23 nt, synthetic construct
  misc_feature 1..23: note = Description of Artificial Sequence: Synthetic oligonucleotide
  source 1..23: mol_type = other RNA
ggatatattcagacactaaagat

SEQ ID NO: 878 - RNA, 21 nt, synthetic construct
  misc_feature 1..21: note = Description of Artificial Sequence: Synthetic oligonucleotide
  source 1..21: mol_type = other RNA
cacatctttagtgtctgaata

SEQ ID NO: 879 - RNA, 23 nt, synthetic construct
  misc_feature 1..23: note = Description of Artificial Sequence: Synthetic oligonucleotide
  source 1..23: mol_type = other RNA
tattcagacactaaagatgtgat

SEQ ID NO: 880 - RNA, 21 nt, synthetic construct
  misc_feature 1..21: note = Description of Artificial Sequence: Synthetic oligonucleotide
  source 1..21: mol_type = other RNA
tcacatctttagtgtctgaat

SEQ ID NO: 881 - RNA, 23 nt, synthetic construct
  misc_feature 1..23: note = Description of Artificial Sequence: Synthetic oligonucleotide
  source 1..23: mol_type = other RNA
attcagacactaaagatgtgatt

SEQ ID NO: 882 - RNA, 21 nt, synthetic construct
  misc_feature 1..21: note = Description of Artificial Sequence: Synthetic oligonucleotide
  source 1..21: mol_type = other RNA
tgatacttctttgaatgtaga

SEQ ID NO: 883 - RNA, 23 nt, synthetic construct
  misc_feature 1..23: note = Description of Artificial Sequence: Synthetic oligonucleotide
  source 1..23: mol_type = other RNA
tctacattcaaagaagtatcacc

SEQ ID NO: 884 - RNA, 21 nt, synthetic construct
  misc_feature 1..21: note = Description of Artificial Sequence: Synthetic oligonucleotide
  source 1..21: mol_type = other RNA
gatacttctttgaatgtagat

SEQ ID NO: 885 - RNA, 23 nt, synthetic construct
  misc_feature 1..23: note = Description of Artificial Sequence: Synthetic oligonucleotide
  source 1..23: mol_type = other RNA
atctacattcaaagaagtatcac

SEQ ID NO: 886 - RNA, 21 nt, synthetic construct
  misc_feature 1..21: note = Description of Artificial Sequence: Synthetic oligonucleotide
  source 1..21: mol_type = other RNA
ttggtgatacttctttgaatg

SEQ ID NO: 887 - RNA, 23 nt, synthetic construct
  misc_feature 1..23: note = Description of Artificial Sequence: Synthetic oligonucleotide
  source 1..23: mol_type = other RNA
cattcaaagaagtatcaccaatt

SEQ ID NO: 888 - RNA, 21 nt, synthetic construct
  misc_feature 1..21: note = Description of Artificial Sequence: Synthetic oligonucleotide
  source 1..21: mol_type = other RNA
attggtgatacttctttgaat

SEQ ID NO: 889 - RNA, 23 nt, synthetic construct
  misc_feature 1..23: note = Description of Artificial Sequence: Synthetic oligonucleotide
  source 1..23: mol_type = other RNA
attcaaagaagtatcaccaatta

SEQ ID NO: 890 - RNA, 21 nt, synthetic construct
  misc_feature 1..21: note = Description of Artificial Sequence: Synthetic oligonucleotide
  source 1..21: mol_type = other RNA
aataacctgtgaaaatgctcc

SEQ ID NO: 891 - RNA, 23 nt, synthetic construct
  misc_feature 1..23: note = Description of Artificial Sequence: Synthetic oligonucleotide
  source 1..23: mol_type = other RNA
ggagcattttcacaggttattgc

SEQ ID NO: 892 - RNA, 21 nt, synthetic construct
  misc_feature 1..21: note = Description of Artificial Sequence: Synthetic oligonucleotide
  source 1..21: mol_type = other RNA
ataacctgtgaaaatgctccc

SEQ ID NO: 893 - RNA, 23 nt, synthetic construct
  misc_feature 1..23: note = Description of Artificial Sequence: Synthetic oligonucleotide
  source 1..23: mol_type = other RNA
gggagcattttcacaggttattg

SEQ ID NO: 894 - RNA, 21 nt, synthetic construct
  misc_feature 1..21: note = Description of Artificial Sequence: Synthetic oligonucleotide
  source 1..21: mol_type = other RNA
tagcaataacctgtgaaaatg

SEQ ID NO: 895 - RNA, 23 nt, synthetic construct
  misc_feature 1..23: note = Description of Artificial Sequence: Synthetic oligonucleotide
  source 1..23: mol_type = other RNA
cattttcacaggttattgctatc

SEQ ID NO: 896 - RNA, 21 nt, synthetic construct
  misc_feature 1..21: note = Description of Artificial Sequence: Synthetic oligonucleotide
  source 1..21: mol_type = other RNA
atagcaataacctgtgaaaat

SEQ ID NO: 897 - RNA, 23 nt, synthetic construct
  misc_feature 1..23: note = Description of Artificial Sequence: Synthetic oligonucleotide
  source 1..23: mol_type = other RNA
attttcacaggttattgctatcc

SEQ ID NO: 898 - RNA, 21 nt, synthetic construct
  misc_feature 1..21: note = Description of Artificial Sequence: Synthetic oligonucleotide
  source 1..21: mol_type = other RNA
aatcacatctttagtgtctga

SEQ ID NO: 899 - RNA, 23 nt, synthetic construct
  misc_feature 1..23: note = Description of Artificial Sequence: Synthetic oligonucleotide
  source 1..23: mol_type = other RNA
tcagacactaaagatgtgattgg

SEQ ID NO: 900 - RNA, 21 nt, synthetic construct
  misc_feature 1..21: note = Description of Artificial Sequence: Synthetic oligonucleotide
  source 1..21: mol_type = other RNA
atcacatctttagtgtctgaa

SEQ ID NO: 901 - RNA, 23 nt, synthetic construct
  misc_feature 1..23: note = Description of Artificial Sequence: Synthetic oligonucleotide
  source 1..23: mol_type = other RNA
ttcagacactaaagatgtgattg

SEQ ID NO: 902 - RNA, 21 nt, synthetic construct
  misc_feature 1..21: note = Description of Artificial Sequence: Synthetic oligonucleotide
  source 1..21: mol_type = other RNA
ttccaatcacatctttagtgt

SEQ ID NO: 903 - RNA, 23 nt, synthetic construct
  misc_feature 1..23: note = Description of Artificial Sequence: Synthetic oligonucleotide
  source 1..23: mol_type = other RNA
acactaaagatgtgattggaaat

SEQ ID NO: 904 - RNA, 21 nt, synthetic construct
  misc_feature 1..21: note = Description of Artificial Sequence: Synthetic oligonucleotide
  source 1..21: mol_type = other RNA
tttccaatcacatctttagtg

SEQ ID NO: 905 - RNA, 23 nt, synthetic construct
  misc_feature 1..23: note = Description of Artificial Sequence: Synthetic oligonucleotide
  source 1..23: mol_type = other RNA
cactaaagatgtgattggaaatc

SEQ ID NO: 906 - RNA, 21 nt, synthetic construct
  misc_feature 1..21: note = Description of Artificial Sequence: Synthetic oligonucleotide
  source 1..21: mol_type = other RNA
acgggcatgatgttgagttcc

SEQ ID NO: 907 - RNA, 23 nt, synthetic construct
  misc_feature 1..23: note = Description of Artificial Sequence: Synthetic oligonucleotide
  source 1..23: mol_type = other RNA
ggaactcaacatcatgcccgttc

SEQ ID NO: 908 - RNA, 21 nt, synthetic construct
  misc_feature 1..21: note = Description of Artificial Sequence: Synthetic oligonucleotide
  source 1..21: mol_type = other RNA
cgggcatgatgttgagttcct

SEQ ID NO: 909 - RNA, 23 nt, synthetic construct
  misc_feature 1..23: note = Description of Artificial Sequence: Synthetic oligonucleotide
  source 1..23: mol_type = other RNA
aggaactcaacatcatgcccgtt

SEQ ID NO: 910 - RNA, 21 nt, synthetic construct
  misc_feature 1..21: note = Description of Artificial Sequence: Synthetic oligonucleotide
  source 1..21: mol_type = other RNA
gggaacgggcatgatgttgag

SEQ ID NO: 911 - RNA, 23 nt, synthetic construct
  misc_feature 1..23: note = Description of Artificial Sequence: Synthetic oligonucleotide
  source 1..23: mol_type = other RNA
ctcaacatcatgcccgttcccag

SEQ ID NO: 912 - RNA, 21 nt, synthetic construct
  misc_feature 1..21: note = Description of Artificial Sequence: Synthetic oligonucleotide
  source 1..21: mol_type = other RNA
tgggaacgggcatgatgttga

SEQ ID NO: 913 - RNA, 23 nt, synthetic construct
  misc_feature 1..23: note = Description of Artificial Sequence: Synthetic oligonucleotide
  source 1..23: mol_type = other RNA
tcaacatcatgcccgttcccagg

SEQ ID NO: 914 - RNA, 21 nt, synthetic construct
  misc_feature 1..21: note = Description of Artificial Sequence: Synthetic oligonucleotide
  source 1..21: mol_type = other RNA
actaaggtgaaaagataatga

SEQ ID NO: 915 - RNA, 23 nt, synthetic construct
  misc_feature 1..23: note = Description of Artificial Sequence: Synthetic oligonucleotide
  source 1..23: mol_type = other RNA
tcattatcttttcaccttagtgt

SEQ ID NO: 916 - RNA, 21 nt, synthetic construct
  misc_feature 1..21: note = Description of Artificial Sequence: Synthetic oligonucleotide
  source 1..21: mol_type = other RNA
ctaaggtgaaaagataatgat

SEQ ID NO: 917 - RNA, 23 nt, synthetic construct
  misc_feature 1..23: note = Description of Artificial Sequence: Synthetic oligonucleotide
  source 1..23: mol_type = other RNA
atcattatcttttcaccttagtg

SEQ ID NO: 918 - RNA, 21 nt, synthetic construct
  misc_feature 1..21: note = Description of Artificial Sequence: Synthetic oligonucleotide
  source 1..21: mol_type = other RNA
aaacactaaggtgaaaagata

SEQ ID NO: 919 - RNA, 23 nt, synthetic construct
  misc_feature 1..23: note = Description of Artificial Sequence: Synthetic oligonucleotide
  source 1..23: mol_type = other RNA
tatcttttcaccttagtgtttgc

SEQ ID NO: 920 - RNA, 21 nt, synthetic construct
  misc_feature 1..21: note = Description of Artificial Sequence: Synthetic oligonucleotide
  source 1..21: mol_type = other RNA
caaacactaaggtgaaaagat

SEQ ID NO: 921 - RNA, 23 nt, synthetic construct
  misc_feature 1..23: note = Description of Artificial Sequence: Synthetic oligonucleotide
  source 1..23: mol_type = other RNA
atcttttcaccttagtgtttgct

SEQ ID NO: 922 - RNA, 21 nt, synthetic construct
  misc_feature 1..21: note = Description of Artificial Sequence: Synthetic oligonucleotide
  source 1..21: mol_type = other RNA
aggtagcactggagagaattg

SEQ ID NO: 923 - RNA, 23 nt, synthetic construct
  misc_feature 1..23: note = Description of Artificial Sequence: Synthetic oligonucleotide
  source 1..23: mol_type = other RNA
caattctctccagtgctaccttc

SEQ ID NO: 924 - RNA, 21 nt, synthetic construct
  misc_feature 1..21: note = Description of Artificial Sequence: Synthetic oligonucleotide
  source 1..21: mol_type = other RNA
ggtagcactggagagaattgg

SEQ ID NO: 925 - RNA, 23 nt, synthetic construct
  misc_feature 1..23: note = Description of Artificial Sequence: Synthetic oligonucleotide
  source 1..23: mol_type = other RNA
ccaattctctccagtgctacctt

SEQ ID NO: 926 - RNA, 21 nt, synthetic construct
  misc_feature 1..21: note = Description of Artificial Sequence: Synthetic oligonucleotide
  source 1..21: mol_type = other RNA
gagaaggtagcactggagaga

SEQ ID NO: 927 - RNA, 23 nt, synthetic construct
  misc_feature 1..23: note = Description of Artificial Sequence: Synthetic oligonucleotide
  source 1..23: mol_type = other RNA
tctctccagtgctaccttctcaa

SEQ ID NO: 928 - RNA, 21 nt, synthetic construct
  misc_feature 1..21: note = Description of Artificial Sequence: Synthetic oligonucleotide
  source 1..21: mol_type = other RNA
tgagaaggtagcactggagag

SEQ ID NO: 929 - RNA, 23 nt, synthetic construct
  misc_feature 1..23: note = Description of Artificial Sequence: Synthetic oligonucleotide
  source 1..23: mol_type = other RNA
ctctccagtgctaccttctcaaa

SEQ ID NO: 930 - RNA, 21 nt, synthetic construct
  misc_feature 1..21: note = Description of Artificial Sequence: Synthetic oligonucleotide
  source 1..21: mol_type = other RNA
agtggacttgctgcatatgtg

SEQ ID NO: 931 - RNA, 23 nt, synthetic construct
  misc_feature 1..23: note = Description of Artificial Sequence: Synthetic oligonucleotide
  source 1..23: mol_type = other RNA
cacatatgcagcaagtccactgt

SEQ ID NO: 932 - RNA, 21 nt, synthetic construct
  misc_feature 1..21: note = Description of Artificial Sequence: Synthetic oligonucleotide
  source 1..21: mol_type = other RNA
gtggacttgctgcatatgtgg

SEQ ID NO: 933 - RNA, 23 nt, synthetic construct
  misc_feature 1..23: note = Description of Artificial Sequence: Synthetic oligonucleotide
  source 1..23: mol_type = other RNA
ccacatatgcagcaagtccactg

SEQ ID NO: 934 - RNA, 21 nt, synthetic construct
  misc_feature 1..21: note = Description of Artificial Sequence: Synthetic oligonucleotide
  source 1..21: mol_type = other RNA
cgacagtggacttgctgcata

SEQ ID NO: 935 - RNA, 23 nt, synthetic construct
  misc_feature 1..23: note = Description of Artificial Sequence: Synthetic oligonucleotide
  source 1..23: mol_type = other RNA
tatgcagcaagtccactgtcgtc

SEQ ID NO: 936 - RNA, 21 nt, synthetic construct
  misc_feature 1..21: note = Description of Artificial Sequence: Synthetic oligonucleotide
  source 1..21: mol_type = other RNA
acgacagtggacttgctgcat

SEQ ID NO: 937 - RNA, 23 nt, synthetic construct
  misc_feature 1..23: note = Description of Artificial Sequence: Synthetic oligonucleotide
  source 1..23: mol_type = other RNA
atgcagcaagtccactgtcgtct

SEQ ID NO: 938 - RNA, 21 nt, synthetic construct
  misc_feature 1..21: note = Description of Artificial Sequence: Synthetic oligonucleotide
  source 1..21: mol_type = other RNA
aaggtgttcaagatgtcctcg

SEQ ID NO: 939 - RNA, 23 nt, synthetic construct
  misc_feature 1..23: note = Description of Artificial Sequence: Synthetic oligonucleotide
  source 1..23: mol_type = other RNA
cgaggacatcttgaacacctttc

SEQ ID NO: 940 - RNA, 21 nt, synthetic construct
  misc_feature 1..21: note = Description of Artificial Sequence: Synthetic oligonucleotide
  source 1..21: mol_type = other RNA
aggtgttcaagatgtcctcga

SEQ ID NO: 941 - RNA, 23 nt, synthetic construct
  misc_feature 1..23: note = Description of Artificial Sequence: Synthetic oligonucleotide
  source 1..23: mol_type = other RNA
tcgaggacatcttgaacaccttt

SEQ ID NO: 942 - RNA, 21 nt, synthetic construct
  misc_feature 1..21: note = Description of Artificial Sequence: Synthetic oligonucleotide
  source 1..21: mol_type = other RNA
gagaaaggtgttcaagatgtc

SEQ ID NO: 943 - RNA, 23 nt, synthetic construct
  misc_feature 1..23: note = Description of Artificial Sequence: Synthetic oligonucleotide
  source 1..23: mol_type = other RNA
gacatcttgaacacctttctccc

SEQ ID NO: 944 - RNA, 21 nt, synthetic construct
  misc_feature 1..21: note = Description of Artificial Sequence: Synthetic oligonucleotide
  source 1..21: mol_type = other RNA
ggagaaaggtgttcaagatgt

SEQ ID NO: 945 - RNA, 23 nt, synthetic construct
  misc_feature 1..23: note = Description of Artificial Sequence: Synthetic oligonucleotide
  source 1..23: mol_type = other RNA
acatcttgaacacctttctcccc

SEQ ID NO: 946 - RNA, 21 nt, synthetic construct
  misc_feature 1..21: note = Description of Artificial Sequence: Synthetic oligonucleotide
  source 1..21: mol_type = other RNA
aaccgtctggatgatgtgcgt

SEQ ID NO: 947 - RNA, 23 nt, synthetic construct
  misc_feature 1..23: note = Description of Artificial Sequence: Synthetic oligonucleotide
  source 1..23: mol_type = other RNA
acgcacatcatccagacggttgc

SEQ ID NO: 948 - RNA, 21 nt, synthetic construct
  misc_feature 1..21: note = Description of Artificial Sequence: Synthetic oligonucleotide
  source 1..21: mol_type = other RNA
accgtctggatgatgtgcgta

SEQ ID NO: 949 - RNA, 23 nt, synthetic construct
  misc_feature 1..23: note = Description of Artificial Sequence: Synthetic oligonucleotide
  source 1..23: mol_type = other RNA
tacgcacatcatccagacggttg

SEQ ID NO: 950 - RNA, 21 nt, synthetic construct
  misc_feature 1..21: note = Description of Artificial Sequence: Synthetic oligonucleotide
  source 1..21: mol_type = other RNA
gggcaaccgtctggatgatgt

SEQ ID NO: 951 - RNA, 23 nt, synthetic construct
  misc_feature 1..23: note = Description of Artificial Sequence: Synthetic oligonucleotide
  source 1..23: mol_type = other RNA
acatcatccagacggttgcccag

SEQ ID NO: 952 - RNA, 21 nt, synthetic construct
  misc_feature 1..21: note = Description of Artificial Sequence: Synthetic oligonucleotide
  source 1..21: mol_type = other RNA
tgggcaaccgtctggatgatg

SEQ ID NO: 953 - RNA, 23 nt, synthetic construct
  misc_feature 1..23: note = Description of Artificial Sequence: Synthetic oligonucleotide
  source 1..23: mol_type = other RNA
catcatccagacggttgcccagg

SEQ ID NO: 954 - RNA, 21 nt, synthetic construct
  misc_feature 1..21: note = Description of Artificial Sequence: Synthetic oligonucleotide
  source 1..21: mol_type = other RNA
gaaactttggctgataatatt

SEQ ID NO: 955 - RNA, 23 nt, synthetic construct
  misc_feature 1..23: note = Description of Artificial Sequence: Synthetic oligonucleotide
  source 1..23: mol_type = other RNA
aatattatcagccaaagtttctt

SEQ ID NO: 956 - RNA, 21 nt, synthetic construct
  misc_feature 1..21: note = Description of Artificial Sequence: Synthetic oligonucleotide
  source 1..21: mol_type = other RNA
aaactttggctgataatattg

SEQ ID NO: 957 - RNA, 23 nt, synthetic construct
  misc_feature 1..23: note = Description of Artificial Sequence: Synthetic oligonucleotide
  source 1..23: mol_type = other RNA
caatattatcagccaaagtttct

SEQ ID NO: 958 - RNA, 21 nt, synthetic construct
  misc_feature 1..21: note = Description of Artificial Sequence: Synthetic oligonucleotide
  source 1..21: mol_type = other RNA
tgaagaaactttggctgataa

SEQ ID NO: 959 - RNA, 23 nt, synthetic construct
  misc_feature 1..23: note = Description of Artificial Sequence: Synthetic oligonucleotide
  source 1..23: mol_type = other RNA
ttatcagccaaagtttcttcatc

SEQ ID NO: 960 - RNA, 21 nt, synthetic construct
  misc_feature 1..21: note = Description of Artificial Sequence: Synthetic oligonucleotide
  source 1..21: mol_type = other RNA
atgaagaaactttggctgata

SEQ ID NO: 961 - RNA, 23 nt, synthetic construct
  misc_feature 1..23: note = Description of Artificial Sequence: Synthetic oligonucleotide
  source 1..23: mol_type = other RNA
tatcagccaaagtttcttcatca

SEQ ID NO: 962 - RNA, 21 nt, synthetic construct
  misc_feature 1..21: note = Description of Artificial Sequence: Synthetic oligonucleotide
  source 1..21: mol_type = other RNA
aaaggtgttcaagatgtcctc

SEQ ID NO: 963 - RNA, 23 nt, synthetic construct
  misc_feature 1..23: note = Description of Artificial Sequence: Synthetic oligonucleotide
  source 1..23: mol_type = other RNA
gaggacatcttgaacacctttct

SEQ ID NO: 964 - RNA, 21 nt, synthetic construct
  misc_feature 1..21: note = Description of Artificial Sequence: Synthetic oligonucleotide
  source 1..21: mol_type = other RNA
aaggtgttcaagatgtcctcg

SEQ ID NO: 965 - RNA, 23 nt, synthetic construct
  misc_feature 1..23: note = Description of Artificial Sequence: Synthetic oligonucleotide
  source 1..23: mol_type = other RNA
cgaggacatcttgaacacctttc

SEQ ID NO: 966 - RNA, 21 nt, synthetic construct
  misc_feature 1..21: note = Description of Artificial Sequence: Synthetic oligonucleotide
  source 1..21: mol_type = other RNA
ggagaaaggtgttcaagatgt

SEQ ID NO: 967 - RNA, 23 nt, synthetic construct
  misc_feature 1..23: note = Description of Artificial Sequence: Synthetic oligonucleotide
  source 1..23: mol_type = other RNA
acatcttgaacacctttctcccc

SEQ ID NO: 968 - RNA, 21 nt, synthetic construct
  misc_feature 1..21: note = Description of Artificial Sequence: Synthetic oligonucleotide
  source 1..21: mol_type = other RNA
gggagaaaggtgttcaagatg

SEQ ID NO: 969 - RNA, 23 nt, synthetic construct
  misc_feature 1..23: note = Description of Artificial Sequence: Synthetic oligonucleotide
  source 1..23: mol_type = other RNA
catcttgaacacctttctccccc

SEQ ID NO: 970 - RNA, 21 nt, synthetic construct
  misc_feature 1..21: note = Description of Artificial Sequence: Synthetic oligonucleotide
  source 1..21: mol_type = other RNA
aaatcagtacttccaaagtct

SEQ ID NO: 971 - RNA, 23 nt, synthetic construct
  misc_feature 1..23: note = Description of Artificial Sequence: Synthetic oligonucleotide
  source 1..23: mol_type = other RNA
agactttggaagtactgatttag

SEQ ID NO: 972 - RNA, 21 nt, synthetic construct
  misc_feature 1..21: note = Description of Artificial Sequence: Synthetic oligonucleotide
  source 1..21: mol_type = other RNA
aatcagtacttccaaagtcta

SEQ ID NO: 973 - RNA, 23 nt, synthetic construct
  misc_feature 1..23: note = Description of Artificial Sequence: Synthetic oligonucleotide
  source 1..23: mol_type = other RNA
tagactttggaagtactgattta

SEQ ID NO: 974 - RNA, 21 nt, synthetic construct
  misc_feature 1..21: note = Description of Artificial Sequence: Synthetic oligonucleotide
  source 1..21: mol_type = other RNA
tgctaaatcagtacttccaaa

SEQ ID NO: 975 - RNA, 23 nt, synthetic construct
  misc_feature 1..23: note = Description of Artificial Sequence: Synthetic oligonucleotide
  source 1..23: mol_type = other RNA
tttggaagtactgatttagcatg

SEQ ID NO: 976 - RNA, 21 nt, synthetic construct
  misc_feature 1..21: note = Description of Artificial Sequence: Synthetic oligonucleotide
  source 1..21: mol_type = other RNA
atgctaaatcagtacttccaa

SEQ ID NO: 977 - RNA, 23 nt, synthetic construct
  misc_feature 1..23: note = Description of Artificial Sequence: Synthetic oligonucleotide
  source 1..23: mol_type = other RNA
ttggaagtactgatttagcatgt

SEQ ID NO: 978 - RNA, 21 nt, synthetic construct
  misc_feature 1..21: note = Description of Artificial Sequence: Synthetic oligonucleotide
  source 1..21: mol_type = other RNA
acatctttagtgtctgaatat

SEQ ID NO: 979 - RNA, 23 nt, synthetic construct
  misc_feature 1..23: note = Description of Artificial Sequence: Synthetic oligonucleotide
  source 1..23: mol_type = other RNA
atattcagacactaaagatgtga

SEQ ID NO: 980 - RNA, 21 nt, synthetic construct
  misc_feature 1..21: note = Description of Artificial Sequence: Synthetic oligonucleotide
  source 1..21: mol_type = other RNA
catctttagtgtctgaatata

SEQ ID NO: 981 - RNA, 23 nt, synthetic construct
  misc_feature 1..23: note = Description of Artificial Sequence: Synthetic oligonucleotide
  source 1..23: mol_type = other RNA
tatattcagacactaaagatgtg

SEQ ID NO: 982 - RNA, 21 nt, synthetic construct
  misc_feature 1..21: note = Description of Artificial Sequence: Synthetic oligonucleotide
  source 1..21: mol_type = other RNA
aatcacatctttagtgtctga

SEQ ID NO: 983 - RNA, 23 nt, synthetic construct
  misc_feature 1..23: note = Description of Artificial Sequence: Synthetic oligonucleotide
  source 1..23: mol_type = other RNA
tcagacactaaagatgtgattgg

SEQ ID NO: 984 - RNA, 21 nt, synthetic construct
  misc_feature 1..21: note = Description of Artificial Sequence: Synthetic oligonucleotide
  source 1..21: mol_type = other RNA
caatcacatctttagtgtctg

SEQ ID NO: 985 - RNA, 23 nt, synthetic construct
  misc_feature 1..23: note = Description of Artificial Sequence: Synthetic oligonucleotide
  source 1..23: mol_type = other RNA
cagacactaaagatgtgattgga

SEQ ID NO: 986 - RNA, 21 nt, synthetic construct
  misc_feature 1..21: note = Description of Artificial Sequence: Synthetic oligonucleotide
  source 1..21: mol_type = other RNA
gcatgtattacttgacaaaga

SEQ ID NO: 987 - RNA, 23 nt, synthetic construct
  misc_feature 1..23: note = Description of Artificial Sequence: Synthetic oligonucleotide
  source 1..23: mol_type = other RNA
tctttgtcaagtaatacatgctg

SEQ ID NO: 988 - RNA, 21 nt, synthetic construct
  misc_feature 1..21: note = Description of Artificial Sequence: Synthetic oligonucleotide
  source 1..21: mol_type = other RNA
catgtattacttgacaaagag

SEQ ID NO: 989 - RNA, 23 nt, synthetic construct
  misc_feature 1..23: note = Description of Artificial Sequence: Synthetic oligonucleotide
  source 1..23: mol_type = other RNA
ctctttgtcaagtaatacatgct

SEQ ID NO: 990 - RNA, 21 nt, synthetic construct
  misc_feature 1..21: note = Description of Artificial Sequence: Synthetic oligonucleotide
  source 1..21: mol_type = other RNA
ttcagcatgtattacttgaca

SEQ ID NO: 991 - RNA, 23 nt, synthetic construct
  misc_feature 1..23: note = Description of Artificial Sequence: Synthetic oligonucleotide
  source 1..23: mol_type = other RNA
tgtcaagtaatacatgctgaaaa

SEQ ID NO: 992 - RNA, 21 nt, synthetic construct
  misc_feature 1..21: note = Description of Artificial Sequence: Synthetic oligonucleotide
  source 1..21: mol_type = other RNA
tttcagcatgtattacttgac

SEQ ID NO: 993 - RNA, 23 nt, synthetic construct
  misc_feature 1..23: note = Description of Artificial Sequence: Synthetic oligonucleotide
  source 1..23: mol_type = other RNA
gtcaagtaatacatgctgaaaaa

SEQ ID NO: 994 - RNA, 21 nt, synthetic construct
  misc_feature 1..21: note = Description of Artificial Sequence: Synthetic oligonucleotide
  source 1..21: mol_type = other RNA
atgttacttcttagagagaaa

SEQ ID NO: 995 - RNA, 23 nt, synthetic construct
  misc_feature 1..23: note = Description of Artificial Sequence: Synthetic oligonucleotide
  source 1..23: mol_type = other RNA
tttctctctaagaagtaacatac

SEQ ID NO: 996 - RNA, 21 nt, synthetic construct
  misc_feature 1..21: note = Description of Artificial Sequence: Synthetic oligonucleotide
  source 1..21: mol_type = other RNA
tgttacttcttagagagaaat

SEQ ID NO: 997 - RNA, 23 nt, synthetic construct
  misc_feature 1..23: note = Description of Artificial Sequence: Synthetic oligonucleotide
  source 1..23: mol_type = other RNA
atttctctctaagaagtaacata

SEQ ID NO: 998 - RNA, 21 nt, synthetic construct
  misc_feature 1..21: note = Description of Artificial Sequence: Synthetic oligonucleotide
  source 1..21: mol_type = other RNA
atgtatgttacttcttagaga

SEQ ID NO: 999 - RNA, 23 nt, synthetic construct
  misc_feature 1..23: note = Description of Artificial Sequence: Synthetic oligonucleotide
  source 1..23: mol_type = other RNA
tctctaagaagtaacatacatcc

SEQ ID NO: 1000 - RNA, 21 nt, synthetic construct
  misc_feature 1..21: note = Description of Artificial Sequence: Synthetic oligonucleotide
  source 1..21: mol_type = other RNA
gatgtatgttacttcttagag

SEQ ID NO: 1001 - RNA, 23 nt, synthetic construct
  misc_feature 1..23: note = Description of Artificial Sequence: Synthetic oligonucleotide
  source 1..23: mol_type = other RNA
ctctaagaagtaacatacatcct

SEQ ID NO: 1002 - RNA, 21 nt, synthetic construct
  misc_feature 1..21: note = Description of Artificial Sequence: Synthetic oligonucleotide
  source 1..21: mol_type = other RNA
acaactttgagaaggtagcac

SEQ ID NO: 1003 - RNA, 23 nt, synthetic construct
  misc_feature 1..23: note = Description of Artificial Sequence: Synthetic oligonucleotide
  source 1..23: mol_type = other RNA
gtgctaccttctcaaagttgtga

SEQ ID NO: 1004 - RNA, 21 nt, synthetic construct
  misc_feature 1..21: note = Description of Artificial Sequence: Synthetic oligonucleotide
  source 1..21: mol_type = other RNA
caactttgagaaggtagcact

SEQ ID NO: 1005 - RNA, 23 nt, synthetic construct
  misc_feature 1..23: note = Description of Artificial Sequence: Synthetic oligonucleotide
  source 1..23: mol_type = other RNA
agtgctaccttctcaaagttgtg

SEQ ID NO: 1006 - RNA, 21 nt, synthetic construct
  misc_feature 1..21: note = Description of Artificial Sequence: Synthetic oligonucleotide
  source 1..21: mol_type = other RNA
attcacaactttgagaaggta

SEQ ID NO: 1007 - RNA, 23 nt, synthetic construct
  misc_feature 1..23: note = Description of Artificial Sequence: Synthetic oligonucleotide
  source 1..23: mol_type = other RNA
taccttctcaaagttgtgaatca

SEQ ID NO: 1008 - RNA, 21 nt, synthetic construct
  misc_feature 1..21: note = Description of Artificial Sequence: Synthetic oligonucleotide
  source 1..21: mol_type = other RNA
gattcacaactttgagaaggt

SEQ ID NO: 1009 - RNA, 23 nt, synthetic construct
  misc_feature 1..23: note = Description of Artificial Sequence: Synthetic oligonucleotide
  source 1..23: mol_type = other RNA
accttctcaaagttgtgaatcag

SEQ ID NO: 1010 - RNA, 21 nt, synthetic construct
  misc_feature 1..21: note = Description of Artificial Sequence: Synthetic oligonucleotide
  source 1..21: mol_type = other RNA
aacatgctaaatcagtacttc

SEQ ID NO: 1011 - RNA, 23 nt, synthetic construct
  misc_feature 1..23: note = Description of Artificial Sequence: Synthetic oligonucleotide
  source 1..23: mol_type = other RNA
gaagtactgatttagcatgttgt

SEQ ID NO: 1012 - RNA, 21 nt, synthetic construct
  misc_feature 1..21: note = Description of Artificial Sequence: Synthetic oligonucleotide
  source 1..21: mol_type = other RNA
acatgctaaatcagtacttcc

SEQ ID NO: 1013 - RNA, 23 nt, synthetic construct
  misc_feature 1..23: note = Description of Artificial Sequence: Synthetic oligonucleotide
  source 1..23: mol_type = other RNA
ggaagtactgatttagcatgttg

SEQ ID NO: 1014 - RNA, 21 nt, synthetic construct
  misc_feature 1..21: note = Description of Artificial Sequence: Synthetic oligonucleotide
  source 1..21: mol_type = other RNA
gaacaacatgctaaatcagta

SEQ ID NO: 1015 - RNA, 23 nt, synthetic construct
  misc_feature 1..23: note = Description of Artificial Sequence: Synthetic oligonucleotide
  source 1..23: mol_type = other RNA
tactgatttagcatgttgttcat

SEQ ID NO: 1016 - RNA, 21 nt, synthetic construct
  misc_feature 1..21: note = Description of Artificial Sequence: Synthetic oligonucleotide
  source 1..21: mol_type = other RNA
tgaacaacatgctaaatcagt

SEQ ID NO: 1017 - RNA, 23 nt, synthetic construct
  misc_feature 1..23: note = Description of Artificial Sequence: Synthetic oligonucleotide
  source 1..23: mol_type = other RNA
actgatttagcatgttgttcata

SEQ ID NO: 1018 - RNA, 21 nt, synthetic construct
  misc_feature 1..21: note = Description of Artificial Sequence: Synthetic oligonucleotide
  source 1..21: mol_type = other RNA
aaaccagtactttatcatttt

SEQ ID NO: 1019 - RNA, 23 nt, synthetic construct
  misc_feature 1..23: note = Description of Artificial Sequence: Synthetic oligonucleotide
  source 1..23: mol_type = other RNA
aaaatgataaagtactggtttca

SEQ ID NO: 1020 - RNA, 21 nt, synthetic construct
  misc_feature 1..21: note = Description of Artificial Sequence: Synthetic oligonucleotide
  source 1..21: mol_type = other RNA
aaccagtactttatcattttc

SEQ ID NO: 1021 - RNA, 23 nt, synthetic construct
  misc_feature 1..23: note = Description of Artificial Sequence: Synthetic oligonucleotide
  source 1..23: mol_type = other RNA
gaaaatgataaagtactggtttc

SEQ ID NO: 1022 - RNA, 21 nt, synthetic construct
  misc_feature 1..21: note = Description of Artificial Sequence: Synthetic oligonucleotide
  source 1..21: mol_type = other RNA
tttgaaaccagtactttatca

SEQ ID NO: 1023 - RNA, 23 nt, synthetic construct
  misc_feature 1..23: note = Description of Artificial Sequence: Synthetic oligonucleotide
  source 1..23: mol_type = other RNA
tgataaagtactggtttcaaaat

SEQ ID NO: 1024 - RNA, 21 nt, synthetic construct
  misc_feature 1..21: note = Description of Artificial Sequence: Synthetic oligonucleotide
  source 1..21: mol_type = other RNA
ttttgaaaccagtactttatc

SEQ ID NO: 1025 - RNA, 23 nt, synthetic construct
  misc_feature 1..23: note = Description of Artificial Sequence: Synthetic oligonucleotide
  source 1..23: mol_type = other RNA
gataaagtactggtttcaaaatt

SEQ ID NO: 1026 - RNA, 21 nt, synthetic construct
  misc_feature 1..21: note = Description of Artificial Sequence: Synthetic oligonucleotide
  source 1..21: mol_type = other RNA
gagaagatgggctacaaggcc

SEQ ID NO: 1027 - RNA, 23 nt, synthetic construct
  misc_feature 1..23: note = Description of Artificial Sequence: Synthetic oligonucleotide
  source 1..23: mol_type = other RNA
ggccttgtagcccatcttctctg

SEQ ID NO: 1028 - RNA, 21 nt, synthetic construct
  misc_feature 1..21: note = Description of Artificial Sequence: Synthetic oligonucleotide
  source 1..21: mol_type = other RNA
agaagatgggctacaaggcca

SEQ ID NO: 1029 - RNA, 23 nt, synthetic construct
  misc_feature 1..23: note = Description of Artificial Sequence: Synthetic oligonucleotide
  source 1..23: mol_type = other RNA
tggccttgtagcccatcttctct

SEQ ID NO: 1030 - RNA, 21 nt, synthetic construct
  misc_feature 1..21: note = Description of Artificial Sequence: Synthetic oligonucleotide
  source 1..21: mol_type = other RNA
ggcagagaagatgggctacaa

SEQ ID NO: 1031 - RNA, 23 nt, synthetic construct
  misc_feature 1..23: note = Description of Artificial Sequence: Synthetic oligonucleotide
  source 1..23: mol_type = other RNA
ttgtagcccatcttctctgcctg

SEQ ID NO: 1032 - RNA, 21 nt, synthetic construct
  misc_feature 1..21: note = Description of Artificial Sequence: Synthetic oligonucleotide
  source 1..21: mol_type = other RNA
aggcagagaagatgggctaca

SEQ ID NO: 1033 - RNA, 23 nt, synthetic construct
  misc_feature 1..23: note = Description of Artificial Sequence: Synthetic oligonucleotide
  source 1..23: mol_type = other RNA
tgtagcccatcttctctgcctgc

SEQ ID NO: 1034 - RNA, 21 nt, synthetic construct
  misc_feature 1..21: note = Description of Artificial Sequence: Synthetic oligonucleotide
  source 1..21: mol_type = other RNA
aacgggcatgatgttgagttc

SEQ ID NO: 1035 - RNA, 23 nt, synthetic construct
  misc_feature 1..23: note = Description of Artificial Sequence: Synthetic oligonucleotide
  source 1..23: mol_type = other RNA
gaactcaacatcatgcccgttcc

SEQ ID NO: 1036 - RNA, 21 nt, synthetic construct
  misc_feature 1..21: note = Description of Artificial Sequence: Synthetic oligonucleotide
  source 1..21: mol_type = other RNA
acgggcatgatgttgagttcc

SEQ ID NO: 1037 - RNA, 23 nt, synthetic construct
  misc_feature 1..23: note = Description of Artificial Sequence: Synthetic oligonucleotide
  source 1..23: mol_type = other RNA
ggaactcaacatcatgcccgttc

SEQ ID NO: 1038 - RNA, 21 nt, synthetic construct
  misc_feature 1..21: note = Description of Artificial Sequence: Synthetic oligonucleotide
  source 1..21: mol_type = other RNA
tgggaacgggcatgatgttga

SEQ ID NO: 1039 - RNA, 23 nt, synthetic construct
  misc_feature 1..23: note = Description of Artificial Sequence: Synthetic oligonucleotide
  source 1..23: mol_type = other RNA
tcaacatcatgcccgttcccagg

SEQ ID NO: 1040 - RNA, 21 nt, synthetic construct
  misc_feature 1..21: note = Description of Artificial Sequence: Synthetic oligonucleotide
  source 1..21: mol_type = other RNA
ctgggaacgggcatgatgttg

SEQ ID NO: 1041 - RNA, 23 nt, synthetic construct
  misc_feature 1..23: note = Description of Artificial Sequence: Synthetic oligonucleotide
  source 1..23: mol_type = other RNA
caacatcatgcccgttcccaggg

SEQ ID NO: 1042 - RNA, 21 nt, synthetic construct
  misc_feature 1..21: note = Description of Artificial Sequence: Synthetic oligonucleotide
  source 1..21: mol_type = other RNA
atgtggctaaagcaatagacc

SEQ ID NO: 1043 - RNA, 23 nt, synthetic construct
  misc_feature 1..23: note = Description of Artificial Sequence: Synthetic oligonucleotide
  source 1..23: mol_type = other RNA
ggtctattgctttagccacatat

SEQ ID NO: 1044 - RNA, 21 nt, synthetic construct
  misc_feature 1..21: note = Description of Artificial Sequence: Synthetic oligonucleotide
  source 1..21: mol_type = other RNA
tgtggctaaagcaatagaccc

SEQ ID NO: 1045 - RNA, 23 nt, synthetic construct
  misc_feature 1..23: note = Description of Artificial Sequence: Synthetic oligonucleotide
  source 1..23: mol_type = other RNA
gggtctattgctttagccacata

SEQ ID NO: 1046 - RNA, 21 nt, synthetic construct
  misc_feature 1..21: note = Description of Artificial Sequence: Synthetic oligonucleotide
  source 1..21: mol_type = other RNA
gcatatgtggctaaagcaata

SEQ ID NO: 1047 - RNA, 23 nt, synthetic construct
  misc_feature 1..23: note = Description of Artificial Sequence: Synthetic oligonucleotide
  source 1..23: mol_type = other RNA
tattgctttagccacatatgcag

SEQ ID NO: 1048 - RNA, 21 nt, synthetic construct
  misc_feature 1..21: note = Description of Artificial Sequence: Synthetic oligonucleotide
  source 1..21: mol_type = other RNA
tgcatatgtggctaaagcaat

SEQ ID NO: 1049 - RNA, 23 nt, synthetic construct
  misc_feature 1..23: note = Description of Artificial Sequence: Synthetic oligonucleotide
  source 1..23: mol_type = other RNA
attgctttagccacatatgcagc

SEQ ID NO: 1050 - RNA, 21 nt, synthetic construct
  misc_feature 1..21: note = Description of Artificial Sequence: Synthetic oligonucleotide
  source 1..21: mol_type = other RNA
aggatgctccggaatgttgct

SEQ ID NO: 1051 - RNA, 23 nt, synthetic construct
  misc_feature 1..23: note = Description of Artificial Sequence: Synthetic oligonucleotide
  source 1..23: mol_type = other RNA
agcaacattccggagcatccttg

SEQ ID NO: 1052 - RNA, 21 nt, synthetic construct
  misc_feature 1..21: note = Description of Artificial Sequence: Synthetic oligonucleotide
  source 1..21: mol_type = other RNA
ggatgctccggaatgttgctg

SEQ ID NO: 1053 - RNA, 23 nt, synthetic construct
  misc_feature 1..23: note = Description of Artificial Sequence: Synthetic oligonucleotide
  source 1..23: mol_type = other RNA
cagcaacattccggagcatcctt

SEQ ID NO: 1054 - RNA, 21 nt, synthetic construct
  misc_feature 1..21: note = Description of Artificial Sequence: Synthetic oligonucleotide
  source 1..21: mol_type = other RNA
tccaaggatgctccggaatgt

SEQ ID NO: 1055 - RNA, 23 nt, synthetic construct
  misc_feature 1..23: note = Description of Artificial Sequence: Synthetic oligonucleotide
  source 1..23: mol_type = other RNA
acattccggagcatccttggata

SEQ ID NO: 1056 - RNA, 21 nt, synthetic construct
  misc_feature 1..21: note = Description of Artificial Sequence: Synthetic oligonucleotide
  source 1..21: mol_type = other RNA
atccaaggatgctccggaatg

SEQ ID NO: 1057 - RNA, 23 nt, synthetic construct
  misc_feature 1..23: note = Description of Artificial Sequence: Synthetic oligonucleotide
  source 1..23: mol_type = other RNA
cattccggagcatccttggatac

SEQ ID NO: 1058 - RNA, 21 nt, synthetic construct
  misc_feature 1..21: note = Description of Artificial Sequence: Synthetic oligonucleotide
  source 1..21: mol_type = other RNA
tcacatctttagtgtctgaat

SEQ ID NO: 1059 - RNA, 23 nt, synthetic construct
  misc_feature 1..23: note = Description of Artificial Sequence: Synthetic oligonucleotide
  source 1..23: mol_type = other RNA
attcagacactaaagatgtgatt

SEQ ID NO: 1060 - RNA, 21 nt, synthetic construct
  misc_feature 1..21: note = Description of Artificial Sequence: Synthetic oligonucleotide
  source 1..21: mol_type = other RNA
cacatctttagtgtctgaata

SEQ ID NO: 1061 - RNA, 23 nt, synthetic construct
  misc_feature 1..23: note = Description of Artificial Sequence: Synthetic oligonucleotide
  source 1..23: mol_type = other RNA
tattcagacactaaagatgtgat

SEQ ID NO: 1062 - RNA, 21 nt, synthetic construct
  misc_feature 1..21: note = Description of Artificial Sequence: Synthetic oligonucleotide
  source 1..21: mol_type = other RNA
ccaatcacatctttagtgtct

SEQ ID NO: 1063 - RNA, 23 nt, synthetic construct
  misc_feature 1..23: note = Description of Artificial Sequence: Synthetic oligonucleotide
  source 1..23: mol_type = other RNA
agacactaaagatgtgattggaa

SEQ ID NO: 1064 - RNA, 21 nt, synthetic construct
  misc_feature 1..21: note = Description of Artificial Sequence: Synthetic oligonucleotide
  source 1..21: mol_type = other RNA
tccaatcacatctttagtgtc

SEQ ID NO: 1065 - RNA, 23 nt, synthetic construct
  misc_feature 1..23: note = Description of Artificial Sequence: Synthetic oligonucleotide
  source 1..23: mol_type = other RNA
gacactaaagatgtgattggaaa

SEQ ID NO: 1066 - RNA, 21 nt, synthetic construct
  misc_feature 1..21: note = Description of Artificial Sequence: Synthetic oligonucleotide
  source 1..21: mol_type = other RNA
aaatgtgtttagacaacgtca

SEQ ID NO: 1067 - RNA, 23 nt, synthetic construct
  misc_feature 1..23: note = Description of Artificial Sequence: Synthetic oligonucleotide
  source 1..23: mol_type = other RNA
tgacgttgtctaaacacattttc

SEQ ID NO: 1068 - RNA, 21 nt, synthetic construct
  misc_feature 1..21: note = Description of Artificial Sequence: Synthetic oligonucleotide
  source 1..21: mol_type = other RNA
aatgtgtttagacaacgtcat

SEQ ID NO: 1069 - RNA, 23 nt, synthetic construct
  misc_feature 1..23: note = Description of Artificial Sequence: Synthetic oligonucleotide
  source 1..23: mol_type = other RNA
atgacgttgtctaaacacatttt

SEQ ID NO: 1070 - RNA, 21 nt, synthetic construct
  misc_feature 1..21: note = Description of Artificial Sequence: Synthetic oligonucleotide
  source 1..21: mol_type = other RNA
ttgaaaatgtgtttagacaac

SEQ ID NO: 1071 - RNA, 23 nt, synthetic construct
  misc_feature 1..23: note = Description of Artificial Sequence: Synthetic oligonucleotide
  source 1..23: mol_type = other RNA
gttgtctaaacacattttcaatg

SEQ ID NO: 1072 - RNA, 21 nt, synthetic construct
  misc_feature 1..21: note = Description of Artificial Sequence: Synthetic oligonucleotide
  source 1..21: mol_type = other RNA
attgaaaatgtgtttagacaa

SEQ ID NO: 1073 - RNA, 23 nt, synthetic construct
  misc_feature 1..23: note = Description of Artificial Sequence: Synthetic oligonucleotide
  source 1..23: mol_type = other RNA
ttgtctaaacacattttcaatgt

SEQ ID NO: 1074 - RNA, 21 nt, synthetic construct
  misc_feature 1..21: note = Description of Artificial Sequence: Synthetic oligonucleotide
  source 1..21: mol_type = other RNA
tactaaaggaagaattccggt

SEQ ID NO: 1075 - RNA, 23 nt, synthetic construct
  misc_feature 1..23: note = Description of Artificial Sequence: Synthetic oligonucleotide
  source 1..23: mol_type = other RNA
accggaattcttcctttagtatc

SEQ ID NO: 1076 - RNA, 21 nt, synthetic construct
  misc_feature 1..21: note = Description of Artificial Sequence: Synthetic oligonucleotide
  source 1..21: mol_type = other RNA
actaaaggaagaattccggtt

SEQ ID NO: 1077 - RNA, 23 nt, synthetic construct
  misc_feature 1..23: note = Description of Artificial Sequence: Synthetic oligonucleotide
  source 1..23: mol_type = other RNA
aaccggaattcttcctttagtat

SEQ ID NO: 1078 - RNA, 21 nt, synthetic construct
  misc_feature 1..21: note = Description of Artificial Sequence: Synthetic oligonucleotide
  source 1..21: mol_type = other RNA
gagatactaaaggaagaattc

SEQ ID NO: 1079 - RNA, 23 nt, synthetic construct
  misc_feature 1..23: note = Description of Artificial Sequence: Synthetic oligonucleotide
  source 1..23: mol_type = other RNA
gaattcttcctttagtatctcga

SEQ ID NO: 1080 - RNA, 21 nt, synthetic construct
  misc_feature 1..21: note = Description of Artificial Sequence: Synthetic oligonucleotide
  source 1..21: mol_type = other RNA
cgagatactaaaggaagaatt

SEQ ID NO: 1081 - RNA, 23 nt, synthetic construct
  misc_feature 1..23: note = Description of Artificial Sequence: Synthetic oligonucleotide
  source 1..23: mol_type = other RNA
aattcttcctttagtatctcgag

SEQ ID NO: 1082 - RNA, 21 nt, synthetic construct
  misc_feature 1..21: note = Description of Artificial Sequence: Synthetic oligonucleotide
  source 1..21: mol_type = other RNA
aactttggctgataatattgc

SEQ ID NO: 1083 - RNA, 23 nt, synthetic construct
  misc_feature 1..23: note = Description of Artificial Sequence: Synthetic oligonucleotide
  source 1..23: mol_type = other RNA
gcaatattatcagccaaagtttc

SEQ ID NO: 1084 - RNA, 21 nt, synthetic construct
  misc_feature 1..21: note = Description of Artificial Sequence: Synthetic oligonucleotide
  source 1..21: mol_type = other RNA
actttggctgataatattgca

SEQ ID NO: 1085 - RNA, 23 nt, synthetic construct
  misc_feature 1..23: note = Description of Artificial Sequence: Synthetic oligonucleotide
  source 1..23: mol_type = other RNA
tgcaatattatcagccaaagttt

SEQ ID NO: 1086 - RNA, 21 nt, synthetic construct
  misc_feature 1..21: note = Description of Artificial Sequence: Synthetic oligonucleotide
  source 1..21: mol_type = other RNA
aagaaactttggctgataata

SEQ ID NO: 1087 - RNA, 23 nt, synthetic construct
  misc_feature 1..23: note = Description of Artificial Sequence: Synthetic oligonucleotide
  source 1..23: mol_type = other RNA
tattatcagccaaagtttcttca

SEQ ID NO: 1088 - RNA, 21 nt, synthetic construct
  misc_feature 1..21: note = Description of Artificial Sequence: Synthetic oligonucleotide
  source 1..21: mol_type = other RNA
gaagaaactttggctgataat

SEQ ID NO: 1089 - RNA, 23 nt, synthetic construct
  misc_feature 1..23: note = Description of Artificial Sequence: Synthetic oligonucleotide
  source 1..23: mol_type = other RNA
attatcagccaaagtttcttcat

SEQ ID NO: 1090 - RNA, 21 nt, synthetic construct
  misc_feature 1..21: note = Description of Artificial Sequence: Synthetic oligonucleotide
  source 1..21: mol_type = other RNA
aaatggctgagaagactgaca

SEQ ID NO: 1091 - RNA, 23 nt, synthetic construct
  misc_feature 1..23: note = Description of Artificial Sequence: Synthetic oligonucleotide
  source 1..23: mol_type = other RNA
tgtcagtcttctcagccatttga

SEQ ID NO: 1092 - RNA, 21 nt, synthetic construct
  misc_feature 1..21: note = Description of Artificial Sequence: Synthetic oligonucleotide
  source 1..21: mol_type = other RNA
aatggctgagaagactgacat

SEQ ID NO: 1093 - RNA, 23 nt, synthetic construct
  misc_feature 1..23: note = Description of Artificial Sequence: Synthetic oligonucleotide
  source 1..23: mol_type = other RNA
atgtcagtcttctcagccatttg

SEQ ID NO: 1094 - RNA, 21 nt, synthetic construct
  misc_feature 1..21: note = Description of Artificial Sequence: Synthetic oligonucleotide
  source 1..21: mol_type = other RNA
tatcaaatggctgagaagact

SEQ ID NO: 1095 - RNA, 23 nt, synthetic construct
  misc_feature 1..23: note = Description of Artificial Sequence: Synthetic oligonucleotide
  source 1..23: mol_type = other RNA
agtcttctcagccatttgatatc

SEQ ID NO: 1096 - RNA, 21 nt, synthetic construct
  misc_feature 1..21: note = Description of Artificial Sequence: Synthetic oligonucleotide
  source 1..21: mol_type = other RNA
atatcaaatggctgagaagac

SEQ ID NO: 1097 - RNA, 23 nt, synthetic construct
  misc_feature 1..23: note = Description of Artificial Sequence: Synthetic oligonucleotide
  source 1..23: mol_type = other RNA
gtcttctcagccatttgatatct

SEQ ID NO: 1098 - RNA, 21 nt, synthetic construct
  misc_feature 1..21: note = Description of Artificial Sequence: Synthetic oligonucleotide
  source 1..21: mol_type = other RNA
gtggttcttaaattgtaagct

SEQ ID NO: 1099 - RNA, 23 nt, synthetic construct
  misc_feature 1..23: note = Description of Artificial Sequence: Synthetic oligonucleotide
  source 1..23: mol_type = other RNA
agcttacaatttaagaaccactg

SEQ ID NO: 1100 - RNA, 21 nt, synthetic construct
  misc_feature 1..21: note = Description of Artificial Sequence: Synthetic oligonucleotide
  source 1..21: mol_type = other RNA
tggttcttaaattgtaagctc

SEQ ID NO: 1101 - RNA, 23 nt, synthetic construct
  misc_feature 1..23: note = Description of Artificial Sequence: Synthetic oligonucleotide
  source 1..23: mol_type = other RNA
gagcttacaatttaagaaccact

SEQ ID NO: 1102 - RNA, 21 nt, synthetic construct
  misc_feature 1..21: note = Description of Artificial Sequence: Synthetic oligonucleotide
  source 1..21: mol_type = other RNA
aacagtggttcttaaattgta

SEQ ID NO: 1103 - RNA, 23 nt, synthetic construct
  misc_feature 1..23: note = Description of Artificial Sequence: Synthetic oligonucleotide
  source 1..23: mol_type = other RNA
tacaatttaagaaccactgtttt

SEQ ID NO: 1104 - RNA, 21 nt, synthetic construct
  misc_feature 1..21: note = Description of Artificial Sequence: Synthetic oligonucleotide
  source 1..21: mol_type = other RNA
aaacagtggttcttaaattgt

SEQ ID NO: 1105 - RNA, 23 nt, synthetic construct
  misc_feature 1..23: note = Description of Artificial Sequence: Synthetic oligonucleotide
  source 1..23: mol_type = other RNA
acaatttaagaaccactgtttta

SEQ ID NO: 1106 - RNA, 21 nt, synthetic construct
  misc_feature 1..21: note = Description of Artificial Sequence: Synthetic oligonucleotide
  source 1..21: mol_type = other RNA
aagtcatcgacaagacattgg

SEQ ID NO: 1107 - RNA, 23 nt, synthetic construct
  misc_feature 1..23: note = Description of Artificial Sequence: Synthetic oligonucleotide
  source 1..23: mol_type = other RNA
ccaatgtcttgtcgatgactttc

SEQ ID NO: 1108 - RNA, 21 nt, synthetic construct
  misc_feature 1..21: note = Description of Artificial Sequence: Synthetic oligonucleotide
  source 1..21: mol_type = other RNA
agtcatcgacaagacattggt

SEQ ID NO: 1109 - RNA, 23 nt, synthetic construct
  misc_feature 1..23: note = Description of Artificial Sequence: Synthetic oligonucleotide
  source 1..23: mol_type = other RNA
accaatgtcttgtcgatgacttt

SEQ ID NO: 1110 - RNA, 21 nt, synthetic construct
  misc_feature 1..21: note = Description of Artificial Sequence: Synthetic oligonucleotide
  source 1..21: mol_type = other RNA
gtgaaagtcatcgacaagaca

SEQ ID NO: 1111 - RNA, 23 nt, synthetic construct
  misc_feature 1..23: note = Description of Artificial Sequence: Synthetic oligonucleotide
  source 1..23: mol_type = other RNA
tgtcttgtcgatgactttcacat

SEQ ID NO: 1112 - RNA, 21 nt, synthetic construct
  misc_feature 1..21: note = Description of Artificial Sequence: Synthetic oligonucleotide
  source 1..21: mol_type = other RNA
tgtgaaagtcatcgacaagac

SEQ ID NO: 1113 - RNA, 23 nt, synthetic construct
  misc_feature 1..23: note = Description of Artificial Sequence: Synthetic oligonucleotide
  source 1..23: mol_type = other RNA
gtcttgtcgatgactttcacatt

SEQ ID NO: 1114 - RNA, 21 nt, synthetic construct
  misc_feature 1..21: note = Description of Artificial Sequence: Synthetic oligonucleotide
  source 1..21: mol_type = other RNA
gataatattgcagcattttcc

SEQ ID NO: 1115 - RNA, 23 nt, synthetic construct
  misc_feature 1..23: note = Description of Artificial Sequence: Synthetic oligonucleotide
  source 1..23: mol_type = other RNA
ggaaaatgctgcaatattatcag

SEQ ID NO: 1116 - RNA, 21 nt, synthetic construct
  misc_feature 1..21: note = Description of Artificial Sequence: Synthetic oligonucleotide
  source 1..21: mol_type = other RNA
ataatattgcagcattttcca

SEQ ID NO: 1117 - RNA, 23 nt, synthetic construct
  misc_feature 1..23: note = Description of Artificial Sequence: Synthetic oligonucleotide
  source 1..23: mol_type = other RNA
tggaaaatgctgcaatattatca

SEQ ID NO: 1118 - RNA, 21 nt, synthetic construct
  misc_feature 1..21: note = Description of Artificial Sequence: Synthetic oligonucleotide
  source 1..21: mol_type = other RNA
ggctgataatattgcagcatt

SEQ ID NO: 1119 - RNA, 23 nt, synthetic construct
  misc_feature 1..23: note = Description of Artificial Sequence: Synthetic oligonucleotide
  source 1..23: mol_type = other RNA
aatgctgcaatattatcagccaa

SEQ ID NO: 1120 - RNA, 21 nt, synthetic construct
  misc_feature 1..21: note = Description of Artificial Sequence: Synthetic oligonucleotide
  source 1..21: mol_type = other RNA
tggctgataatattgcagcat

SEQ ID NO: 1121 - RNA, 23 nt, synthetic construct
  misc_feature 1..23: note = Description of Artificial Sequence: Synthetic oligonucleotide
  source 1..23: mol_type = other RNA
atgctgcaatattatcagccaaa

SEQ ID NO: 1122 - RNA, 21 nt, synthetic construct
  misc_feature 1..21: note = Description of Artificial Sequence: Synthetic oligonucleotide
  source 1..21: mol_type = other RNA
gctaatttgtatcaatgatta

SEQ ID NO: 1123 - RNA, 23 nt, synthetic construct
  misc_feature 1..23: note = Description of Artificial Sequence: Synthetic oligonucleotide
  source 1..23: mol_type = other RNA
taatcattgatacaaattagccg

SEQ ID NO: 1124 - RNA, 21 nt, synthetic construct
  misc_feature 1..21: note = Description of Artificial Sequence: Synthetic oligonucleotide
  source 1..21: mol_type = other RNA
ctaatttgtatcaatgattat

SEQ ID NO: 1125 - RNA, 23 nt, synthetic construct
  misc_feature 1..23: note = Description of Artificial Sequence: Synthetic oligonucleotide
  source 1..23: mol_type = other RNA
ataatcattgatacaaattagcc

SEQ ID NO: 1126 - RNA, 21 nt, synthetic construct
  misc_feature 1..21: note = Description of Artificial Sequence: Synthetic oligonucleotide
  source 1..21: mol_type = other RNA
cccggctaatttgtatcaatg

SEQ ID NO: 1127 - RNA, 23 nt, synthetic construct
  misc_feature 1..23: note = Description of Artificial Sequence: Synthetic oligonucleotide
  source 1..23: mol_type = other RNA
cattgatacaaattagccggggg

SEQ ID NO: 1128 - RNA, 21 nt, synthetic construct
  misc_feature 1..21: note = Description of Artificial Sequence: Synthetic oligonucleotide
  source 1..21: mol_type = other RNA
ccccggctaatttgtatcaat

SEQ ID NO: 1129 - RNA, 23 nt, synthetic construct
  misc_feature 1..23: note = Description of Artificial Sequence: Synthetic oligonucleotide
  source 1..23: mol_type = other RNA
attgatacaaattagccggggga

SEQ ID NO: 1130 - RNA, 21 nt, synthetic construct
  misc_feature 1..21: note = Description of Artificial Sequence: Synthetic oligonucleotide
  source 1..21: mol_type = other RNA
taattggtgatacttctttga

SEQ ID NO: 1131 - RNA, 23 nt, synthetic construct
  misc_feature 1..23: note = Description of Artificial Sequence: Synthetic oligonucleotide
  source 1..23: mol_type = other RNA
tcaaagaagtatcaccaattacc

SEQ ID NO: 1132 - RNA, 21 nt, synthetic construct
  misc_feature 1..21: note = Description of Artificial Sequence: Synthetic oligonucleotide
  source 1..21: mol_type = other RNA
aattggtgatacttctttgaa

SEQ ID NO: 1133 - RNA, 23 nt, synthetic construct
  misc_feature 1..23: note = Description of Artificial Sequence: Synthetic oligonucleotide
  source 1..23: mol_type = other RNA
ttcaaagaagtatcaccaattac

SEQ ID NO: 1134 - RNA, 21 nt, synthetic construct
  misc_feature 1..21: note = Description of Artificial Sequence: Synthetic oligonucleotide
  source 1..21: mol_type = other RNA
gcggtaattggtgatacttct

SEQ ID NO: 1135 - RNA, 23 nt, synthetic construct
  misc_feature 1..23: note = Description of Artificial Sequence: Synthetic oligonucleotide
  source 1..23: mol_type = other RNA
agaagtatcaccaattaccgcca

SEQ ID NO: 1136 - RNA, 21 nt, synthetic construct
  misc_feature 1..21: note = Description of Artificial Sequence: Synthetic oligonucleotide
  source 1..21: mol_type = other RNA
ggcggtaattggtgatacttc

SEQ ID NO: 1137 - RNA, 23 nt, synthetic construct
  misc_feature 1..23: note = Description of Artificial Sequence: Synthetic oligonucleotide
  source 1..23: mol_type = other RNA
gaagtatcaccaattaccgccac

SEQ ID NO: 1138 - RNA, 21 nt, synthetic construct
  misc_feature 1..21: note = Description of Artificial Sequence: Synthetic oligonucleotide
  source 1..21: mol_type = other RNA
cagtggttcttaaattgtaag

SEQ ID NO: 1139 - RNA, 23 nt, synthetic construct
  misc_feature 1..23: note = Description of Artificial Sequence: Synthetic oligonucleotide
  source 1..23: mol_type = other RNA
cttacaatttaagaaccactgtt

SEQ ID NO: 1140 - RNA, 21 nt, synthetic construct
  misc_feature 1..21: note = Description of Artificial Sequence: Synthetic oligonucleotide
  source 1..21: mol_type = other RNA
agtggttcttaaattgtaagc

SEQ ID NO: 1141 - RNA, 23 nt, synthetic construct
  misc_feature 1..23: note = Description of Artificial Sequence: Synthetic oligonucleotide
  source 1..23: mol_type = other RNA
gcttacaatttaagaaccactgt

SEQ ID NO: 1142 - RNA, 21 nt, synthetic construct
  misc_feature 1..21: note = Description of Artificial Sequence: Synthetic oligonucleotide
  source 1..21: mol_type = other RNA
aaaacagtggttcttaaattg

SEQ ID NO: 1143 - RNA, 23 nt, synthetic construct
  misc_feature 1..23: note = Description of Artificial Sequence: Synthetic oligonucleotide
  source 1..23: mol_type = other RNA
caatttaagaaccactgttttaa

SEQ ID NO: 1144 - RNA, 21 nt, synthetic construct
  misc_feature 1..21: note = Description of Artificial Sequence: Synthetic oligonucleotide
  source 1..21: mol_type = other RNA
taaaacagtggttcttaaatt

SEQ ID NO: 1145 - RNA, 23 nt, synthetic construct
  misc_feature 1..23: note = Description of Artificial Sequence: Synthetic oligonucleotide
  source 1..23: mol_type = other RNA
aatttaagaaccactgttttaaa

SEQ ID NO: 1146 - RNA, 21 nt, synthetic construct
  misc_feature 1..21: note = Description of Artificial Sequence: Synthetic oligonucleotide
  source 1..21: mol_type = other RNA
acctgtattctgtttacatgt

SEQ ID NO: 1147 - RNA, 23 nt, synthetic construct
  misc_feature 1..23: note = Description of Artificial Sequence: Synthetic oligonucleotide
  source 1..23: mol_type = other RNA
acatgtaaacagaatacaggtta

SEQ ID NO: 1148 - RNA, 21 nt, synthetic construct
  misc_feature 1..21: note = Description of Artificial Sequence: Synthetic oligonucleotide
  source 1..21: mol_type = other RNA
cctgtattctgtttacatgtc

SEQ ID NO: 1149 - RNA, 23 nt, synthetic construct
  misc_feature 1..23: note = Description of Artificial Sequence: Synthetic oligonucleotide
  source 1..23: mol_type = other RNA
gacatgtaaacagaatacaggtt

SEQ ID NO: 1150 - RNA, 21 nt, synthetic construct
  misc_feature 1..21: note = Description of Artificial Sequence: Synthetic oligonucleotide
  source 1..21: mol_type = other RNA
attaacctgtattctgtttac

SEQ ID NO: 1151 - RNA, 23 nt, synthetic construct
  misc_feature 1..23: note = Description of Artificial Sequence: Synthetic oligonucleotide
  source 1..23: mol_type = other RNA
gtaaacagaatacaggttaataa

SEQ ID NO: 1152 - RNA, 21 nt, synthetic construct
  misc_feature 1..21: note = Description of Artificial Sequence: Synthetic oligonucleotide
  source 1..21: mol_type = other RNA
tattaacctgtattctgttta

SEQ ID NO: 1153 - RNA, 23 nt, synthetic construct
  misc_feature 1..23: note = Description of Artificial Sequence: Synthetic oligonucleotide
  source 1..23: mol_type = other RNA
taaacagaatacaggttaataaa

SEQ ID NO: 1154 - RNA, 21 nt, synthetic construct
  misc_feature 1..21: note = Description of Artificial Sequence: Synthetic oligonucleotide
  source 1..21: mol_type = other RNA
aagaaactttggctgataata

SEQ ID NO: 1155 - RNA, 23 nt, synthetic construct
  misc_feature 1..23: note = Description of Artificial Sequence: Synthetic oligonucleotide
  source 1..23: mol_type = other RNA
tattatcagccaaagtttcttca

SEQ ID NO: 1156 - RNA, 21 nt, synthetic construct
  misc_feature 1..21: note = Description of Artificial Sequence: Synthetic oligonucleotide
  source 1..21: mol_type = other RNA
agaaactttggctgataatat

SEQ ID NO: 1157 - RNA, 23 nt, synthetic construct
  misc_feature 1..23: note = Description of Artificial Sequence: Synthetic oligonucleotide
  source 1..23: mol_type = other RNA
atattatcagccaaagtttcttc

SEQ ID NO: 1158 - RNA, 21 nt, synthetic construct
  misc_feature 1..21: note = Description of Artificial Sequence: Synthetic oligonucleotide
  source 1..21: mol_type = other RNA
gatgaagaaactttggctgat

SEQ ID NO: 1159 - RNA, 23 nt, synthetic construct
  misc_feature 1..23: note = Description of Artificial Sequence: Synthetic oligonucleotide
  source 1..23: mol_type = other RNA
atcagccaaagtttcttcatcat

SEQ ID NO: 1160 - RNA, 21 nt, synthetic construct
  misc_feature 1..21: note = Description of Artificial Sequence: Synthetic oligonucleotide
  source 1..21: mol_type = other RNA
tgatgaagaaactttggctga

SEQ ID NO: 1161 - RNA, 23 nt, synthetic construct
  misc_feature 1..23: note = Description of Artificial Sequence: Synthetic oligonucleotide
  source 1..23: mol_type = other RNA
tcagccaaagtttcttcatcatt

SEQ ID NO: 1162 - RNA, 21 nt, synthetic construct
  misc_feature 1..21: note = Description of Artificial Sequence: Synthetic oligonucleotide
  source 1..21: mol_type = other RNA
gaaaggtgttcaagatgtcct

SEQ ID NO: 1163 - RNA, 23 nt, synthetic construct
  misc_feature 1..23: note = Description of Artificial Sequence: Synthetic oligonucleotide
  source 1..23: mol_type = other RNA
aggacatcttgaacacctttctc

SEQ ID NO: 1164 - RNA, 21 nt, synthetic construct
  misc_feature 1..21: note = Description of Artificial Sequence: Synthetic oligonucleotide
  source 1..21: mol_type = other RNA
aaaggtgttcaagatgtcctc

SEQ ID NO: 1165 - RNA, 23 nt, synthetic construct
  misc_feature 1..23: note = Description of Artificial Sequence: Synthetic oligonucleotide
  source 1..23: mol_type = other RNA
gaggacatcttgaacacctttct

SEQ ID NO: 1166 - RNA, 21 nt, synthetic construct
  misc_feature 1..21: note = Description of Artificial Sequence: Synthetic oligonucleotide
  source 1..21: mol_type = other RNA
gggagaaaggtgttcaagatg

SEQ ID NO: 1167 - RNA, 23 nt, synthetic construct
  misc_feature 1..23: note = Description of Artificial Sequence: Synthetic oligonucleotide
  source 1..23: mol_type = other RNA
catcttgaacacctttctccccc

SEQ ID NO: 1168 - RNA, 21 nt, synthetic construct
  misc_feature 1..21: note = Description of Artificial Sequence: Synthetic oligonucleotide
  source 1..21: mol_type = other RNA
ggggagaaaggtgttcaagat

SEQ ID NO: 1169 - RNA, 23 nt, synthetic construct
  misc_feature 1..23: note = Description of Artificial Sequence: Synthetic oligonucleotide
  source 1..23: mol_type = other RNA
atcttgaacacctttctccccct

SEQ ID NO: 1170 - RNA, 21 nt, synthetic construct
  misc_feature 1..21: note = Description of Artificial Sequence: Synthetic oligonucleotide
  source 1..21: mol_type = other RNA
atcttggtgtcgaatcatggg

SEQ ID NO: 1171 - RNA, 23 nt, synthetic construct
  misc_feature 1..23: note = Description of Artificial Sequence: Synthetic oligonucleotide
  source 1..23: mol_type = other RNA
cccatgattcgacaccaagatcc

SEQ ID NO: 1172 - RNA, 21 nt, synthetic construct
  misc_feature 1..21: note = Description of Artificial Sequence: Synthetic oligonucleotide
  source 1..21: mol_type = other RNA
tcttggtgtcgaatcatgggg

SEQ ID NO: 1173 - RNA, 23 nt, synthetic construct
  misc_feature 1..23: note = Description of Artificial Sequence: Synthetic oligonucleotide
  source 1..23: mol_type = other RNA
ccccatgattcgacaccaagatc

SEQ ID NO: 1174 - RNA, 21 nt, synthetic construct
  misc_feature 1..21: note = Description of Artificial Sequence: Synthetic oligonucleotide
  source 1..21: mol_type = other RNA
tgggatcttggtgtcgaatca

SEQ ID NO: 1175 - RNA, 23 nt, synthetic construct
  misc_feature 1..23: note = Description of Artificial Sequence: Synthetic oligonucleotide
  source 1..23: mol_type = other RNA
tgattcgacaccaagatcccatt

SEQ ID NO: 1176 - RNA, 21 nt, synthetic construct
  misc_feature 1..21: note = Description of Artificial Sequence: Synthetic oligonucleotide
  source 1..21: mol_type = other RNA
atgggatcttggtgtcgaatc

SEQ ID NO: 1177 - RNA, 23 nt, synthetic construct
  misc_feature 1..23: note = Description of Artificial Sequence: Synthetic oligonucleotide
  source 1..23: mol_type = other RNA
gattcgacaccaagatcccattc

SEQ ID NO: 1178 - RNA, 21 nt, synthetic construct
  misc_feature 1..21: note = Description of Artificial Sequence: Synthetic oligonucleotide
  source 1..21: mol_type = other RNA
gctacaaggccatatttgtga

SEQ ID NO: 1179 - RNA, 23 nt, synthetic construct
  misc_feature 1..23: note = Description of Artificial Sequence: Synthetic oligonucleotide
  source 1..23: mol_type = other RNA
tcacaaatatggccttgtagccc

SEQ ID NO: 1180 - RNA, 21 nt, synthetic construct
  misc_feature 1..21: note = Description of Artificial Sequence: Synthetic oligonucleotide
  source 1..21: mol_type = other RNA
ctacaaggccatatttgtgac

SEQ ID NO: 1181 - RNA, 23 nt, synthetic construct
  misc_feature 1..23: note = Description of Artificial Sequence: Synthetic oligonucleotide
  source 1..23: mol_type = other RNA
gtcacaaatatggccttgtagcc

SEQ ID NO: 1182 - RNA, 21 nt, synthetic construct
  misc_feature 1..21: note = Description of Artificial Sequence: Synthetic oligonucleotide
  source 1..21: mol_type = other RNA
atgggctacaaggccatattt

SEQ ID NO: 1183 - RNA, 23 nt, synthetic construct
  misc_feature 1..23: note = Description of Artificial Sequence: Synthetic oligonucleotide
  source 1..23: mol_type = other RNA
aaatatggccttgtagcccatct

SEQ ID NO: 1184 - RNA, 21 nt, synthetic construct
  misc_feature 1..21: note = Description of Artificial Sequence: Synthetic oligonucleotide
  source 1..21: mol_type = other RNA
gatgggctacaaggccatatt

SEQ ID NO: 1185 - RNA, 23 nt, synthetic construct
  misc_feature 1..23: note = Description of Artificial Sequence: Synthetic oligonucleotide
  source 1..23: mol_type = other RNA
aatatggccttgtagcccatctt

SEQ ID NO: 1186 - RNA, 21 nt, synthetic construct
  misc_feature 1..21: note = Description of Artificial Sequence: Synthetic oligonucleotide
  source 1..21: mol_type = other RNA
actggagagaattggaatggg

SEQ ID NO: 1187 - RNA, 23 nt, synthetic construct
  misc_feature 1..23: note = Description of Artificial Sequence: Synthetic oligonucleotide
  source 1..23: mol_type = other RNA
cccattccaattctctccagtgc

SEQ ID NO: 1188 - RNA, 21 nt, synthetic construct
  misc_feature 1..21: note = Description of Artificial Sequence: Synthetic oligonucleotide
  source 1..21: mol_type = other RNA
ctggagagaattggaatgggt

SEQ ID NO: 1189 - RNA, 23 nt, synthetic construct
  misc_feature 1..23: note = Description of Artificial Sequence: Synthetic oligonucleotide
  source 1..23: mol_type = other RNA
acccattccaattctctccagtg

SEQ ID NO: 1190 - RNA, 21 nt, synthetic construct
  misc_feature 1..21: note = Description of Artificial Sequence: Synthetic oligonucleotide
  source 1..21: mol_type = other RNA
tagcactggagagaattggaa

SEQ ID NO: 1191 - RNA, 23 nt, synthetic construct
  misc_feature 1..23: note = Description of Artificial Sequence: Synthetic oligonucleotide
  source 1..23: mol_type = other RNA
ttccaattctctccagtgctacc

SEQ ID NO: 1192 - RNA, 21 nt, synthetic construct
  misc_feature 1..21: note = Description of Artificial Sequence: Synthetic oligonucleotide
  source 1..21: mol_type = other RNA
gtagcactggagagaattgga

SEQ ID NO: 1193 - RNA, 23 nt, synthetic construct
  misc_feature 1..23: note = Description of Artificial Sequence: Synthetic oligonucleotide
  source 1..23: mol_type = other RNA
tccaattctctccagtgctacct

SEQ ID NO: 1194 - RNA, 21 nt, synthetic construct
  misc_feature 1..21: note = Description of Artificial Sequence: Synthetic oligonucleotide
  source 1..21: mol_type = other RNA
acagtggacacaccttacctg

SEQ ID NO: 1195 - RNA, 23 nt, synthetic construct
  misc_feature 1..23: note = Description of Artificial Sequence: Synthetic oligonucleotide
  source 1..23: mol_type = other RNA
caggtaaggtgtgtccactgtca

SEQ ID NO: 1196 - RNA, 21 nt, synthetic construct
  misc_feature 1..21: note = Description of Artificial Sequence: Synthetic oligonucleotide
  source 1..21: mol_type = other RNA
cagtggacacaccttacctgg

SEQ ID NO: 1197 - RNA, 23 nt, synthetic construct
  misc_feature 1..23: note = Description of Artificial Sequence: Synthetic oligonucleotide
  source 1..23: mol_type = other RNA
ccaggtaaggtgtgtccactgtc

SEQ ID NO: 1198 - RNA, 21 nt, synthetic construct
  misc_feature 1..21: note = Description of Artificial Sequence: Synthetic oligonucleotide
  source 1..21: mol_type = other RNA
tgtgacagtggacacacctta

SEQ ID NO: 1199 - RNA, 23 nt, synthetic construct
  misc_feature 1..23: note = Description of Artificial Sequence: Synthetic oligonucleotide
  source 1..23: mol_type = other RNA
taaggtgtgtccactgtcacaaa

SEQ ID NO: 1200 - RNA, 21 nt, synthetic construct
  misc_feature 1..21: note = Description of Artificial Sequence: Synthetic oligonucleotide
  source 1..21: mol_type = other RNA
ttgtgacagtggacacacctt

SEQ ID NO: 1201 - RNA, 23 nt, synthetic construct
  misc_feature 1..23: note = Description of Artificial Sequence: Synthetic oligonucleotide
  source 1..23: mol_type = other RNA
aaggtgtgtccactgtcacaaat

SEQ ID NO: 1202 - RNA, 21 nt, synthetic construct
  misc_feature 1..21: note = Description of Artificial Sequence: Synthetic oligonucleotide
  source 1..21: mol_type = other RNA
gaagactgacatcattgccaa

SEQ ID NO: 1203 - RNA, 23 nt, synthetic construct
  misc_feature 1..23: note = Description of Artificial Sequence: Synthetic oligonucleotide
  source 1..23: mol_type = other RNA
ttggcaatgatgtcagtcttctc

SEQ ID NO: 1204 - RNA, 21 nt, synthetic construct
  misc_feature 1..21: note = Description of Artificial Sequence: Synthetic oligonucleotide
  source 1..21: mol_type = other RNA
aagactgacatcattgccaat

SEQ ID NO: 1205 - RNA, 23 nt, synthetic construct
  misc_feature 1..23: note = Description of Artificial Sequence: Synthetic oligonucleotide
  source 1..23: mol_type = other RNA
attggcaatgatgtcagtcttct

SEQ ID NO: 1206 - RNA, 21 nt, synthetic construct
  misc_feature 1..21: note = Description of Artificial Sequence: Synthetic oligonucleotide
  source 1..21: mol_type = other RNA
ctgagaagactgacatcattg

SEQ ID NO: 1207 - RNA, 23 nt, synthetic construct
  misc_feature 1..23: note = Description of Artificial Sequence: Synthetic oligonucleotide
  source 1..23: mol_type = other RNA
caatgatgtcagtcttctcagcc

SEQ ID NO: 1208 - RNA, 21 nt, synthetic construct
  misc_feature 1..21: note = Description of Artificial Sequence: Synthetic oligonucleotide
  source 1..21: mol_type = other RNA
gctgagaagactgacatcatt

SEQ ID NO: 1209 - RNA, 23 nt, synthetic construct
  misc_feature 1..23: note = Description of Artificial Sequence: Synthetic oligonucleotide
  source 1..23: mol_type = other RNA
aatgatgtcagtcttctcagcca

SEQ ID NO: 1210 - RNA, 21 nt, synthetic construct
  misc_feature 1..21: note = Description of Artificial Sequence: Synthetic oligonucleotide
  source 1..21: mol_type = other RNA
gctcaggttcaaagtgttggt

SEQ ID NO: 1211 - RNA, 23 nt, synthetic construct
  misc_feature 1..23: note = Description of Artificial Sequence: Synthetic oligonucleotide
  source 1..23: mol_type = other RNA
accaacactttgaacctgagctt

SEQ ID NO: 1212 - RNA, 21 nt, synthetic construct
  misc_feature 1..21: note = Description of Artificial Sequence: Synthetic oligonucleotide
  source 1..21: mol_type = other RNA
ctcaggttcaaagtgttggta

SEQ ID NO: 1213 - RNA, 23 nt, synthetic construct
  misc_feature 1..23: note = Description of Artificial Sequence: Synthetic oligonucleotide
  source 1..23: mol_type = other RNA
taccaacactttgaacctgagct

SEQ ID NO: 1214 - RNA, 21 nt, synthetic construct
  misc_feature 1..21: note = Description of Artificial Sequence: Synthetic oligonucleotide
  source 1..21: mol_type = other RNA
gtaagctcaggttcaaagtgt

SEQ ID NO: 1215 - RNA, 23 nt, synthetic construct
  misc_feature 1..23: note = Description of Artificial Sequence: Synthetic oligonucleotide
  source 1..23: mol_type = other RNA
acactttgaacctgagcttacaa

SEQ ID NO: 1216 - RNA, 21 nt, synthetic construct
  misc_feature 1..21: note = Description of Artificial Sequence: Synthetic oligonucleotide
  source 1..21: mol_type = other RNA
tgtaagctcaggttcaaagtg

SEQ ID NO: 1217 - RNA, 23 nt, synthetic construct
  misc_feature 1..23: note = Description of Artificial Sequence: Synthetic oligonucleotide
  source 1..23: mol_type = other RNA
cactttgaacctgagcttacaat

SEQ ID NO: 1218 - RNA, 21 nt, synthetic construct
  misc_feature 1..21: note = Description of Artificial Sequence: Synthetic oligonucleotide
  source 1..21: mol_type = other RNA
atgtattacttgacaaagaga

SEQ ID NO: 1219 - RNA, 23 nt, synthetic construct
  misc_feature 1..23: note = Description of Artificial Sequence: Synthetic oligonucleotide
  source 1..23: mol_type = other RNA
tctctttgtcaagtaatacatgc

SEQ ID NO: 1220 - RNA, 21 nt, synthetic construct
  misc_feature 1..21: note = Description of Artificial Sequence: Synthetic oligonucleotide
  source 1..21: mol_type = other RNA
tgtattacttgacaaagagac

SEQ ID NO: 1221 - RNA, 23 nt, synthetic construct
  misc_feature 1..23: note = Description of Artificial Sequence: Synthetic oligonucleotide
  source 1..23: mol_type = other RNA
gtctctttgtcaagtaatacatg

SEQ ID NO: 1222 - RNA, 21 nt, synthetic construct
  misc_feature 1..21: note = Description of Artificial Sequence: Synthetic oligonucleotide
  source 1..21: mol_type = other RNA
cagcatgtattacttgacaaa

SEQ ID NO: 1223 - RNA, 23 nt, synthetic construct
  misc_feature 1..23: note = Description of Artificial Sequence: Synthetic oligonucleotide
  source 1..23: mol_type = other RNA
tttgtcaagtaatacatgctgaa

SEQ ID NO: 1224 - RNA, 21 nt, synthetic construct
  misc_feature 1..21: note = Description of Artificial Sequence: Synthetic oligonucleotide
  source 1..21: mol_type = other RNA
tcagcatgtattacttgacaa

SEQ ID NO: 1225 - RNA, 23 nt, synthetic construct
  misc_feature 1..23: note = Description of Artificial Sequence: Synthetic oligonucleotide
  source 1..23: mol_type = other RNA
ttgtcaagtaatacatgctgaaa

SEQ ID NO: 1226 - RNA, 21 nt, synthetic construct
  misc_feature 1..21: note = Description of Artificial Sequence: Synthetic oligonucleotide
  source 1..21: mol_type = other RNA
ctgcaactgtatatctacaag

SEQ ID NO: 1227 - RNA, 23 nt, synthetic construct
  misc_feature 1..23: note = Description of Artificial Sequence: Synthetic oligonucleotide
  source 1..23: mol_type = other RNA
cttgtagatatacagttgcagcc

SEQ ID NO: 1228 - RNA, 21 nt, synthetic construct
  misc_feature 1..21: note = Description of Artificial Sequence: Synthetic oligonucleotide
  source 1..21: mol_type = other RNA
tgcaactgtatatctacaagg

SEQ ID NO: 1229 - RNA, 23 nt, synthetic construct
  misc_feature 1..23: note = Description of Artificial Sequence: Synthetic oligonucleotide
  source 1..23: mol_type = other RNA
ccttgtagatatacagttgcagc

SEQ ID NO: 1230 - RNA, 21 nt, synthetic construct
  misc_feature 1..21: note = Description of Artificial Sequence: Synthetic oligonucleotide
  source 1..21: mol_type = other RNA
ttggctgcaactgtatatcta

SEQ ID NO: 1231 - RNA, 23 nt, synthetic construct
  misc_feature 1..23: note = Description of Artificial Sequence: Synthetic oligonucleotide
  source 1..23: mol_type = other RNA
tagatatacagttgcagccaacg

SEQ ID NO: 1232 - RNA, 21 nt, synthetic construct
  misc_feature 1..21: note = Description of Artificial Sequence: Synthetic oligonucleotide
  source 1..21: mol_type = other RNA
gttggctgcaactgtatatct

SEQ ID NO: 1233 - RNA, 23 nt, synthetic construct
  misc_feature 1..23: note = Description of Artificial Sequence: Synthetic oligonucleotide
  source 1..23: mol_type = other RNA
agatatacagttgcagccaacga

SEQ ID NO: 1234 - RNA, 21 nt, synthetic construct
  misc_feature 1..21: note = Description of Artificial Sequence: Synthetic oligonucleotide
  source 1..21: mol_type = other RNA
caaatgatgaagaaactttgg

SEQ ID NO: 1235 - RNA, 23 nt, synthetic construct
  misc_feature 1..23: note = Description of Artificial Sequence: Synthetic oligonucleotide
  source 1..23: mol_type = other RNA
ccaaagtttcttcatcatttgcc

SEQ ID NO: 1236 - RNA, 21 nt, synthetic construct
  misc_feature 1..21: note = Description of Artificial Sequence: Synthetic oligonucleotide
  source 1..21: mol_type = other RNA
aaatgatgaagaaactttggc

SEQ ID NO: 1237 - RNA, 23 nt, synthetic construct
  misc_feature 1..23: note = Description of Artificial Sequence: Synthetic oligonucleotide
  source 1..23: mol_type = other RNA
gccaaagtttcttcatcatttgc

SEQ ID NO: 1238 - RNA, 21 nt, synthetic construct
  misc_feature 1..21: note = Description of Artificial Sequence: Synthetic oligonucleotide
  source 1..21: mol_type = other RNA
ggggcaaatgatgaagaaact

SEQ ID NO: 1239 - RNA, 23 nt, synthetic construct
  misc_feature 1..23: note = Description of Artificial Sequence: Synthetic oligonucleotide
  source 1..23: mol_type = other RNA
agtttcttcatcatttgccccag

SEQ ID NO: 1240 - RNA, 21 nt, synthetic construct
  misc_feature 1..21: note = Description of Artificial Sequence: Synthetic oligonucleotide
  source 1..21: mol_type = other RNA
tggggcaaatgatgaagaaac

SEQ ID NO: 1241 - RNA, 23 nt, synthetic construct
  misc_feature 1..23: note = Description of Artificial Sequence: Synthetic oligonucleotide
  source 1..23: mol_type = other RNA
gtttcttcatcatttgccccaga

SEQ ID NO: 1242 - RNA, 21 nt, synthetic construct
  misc_feature 1..21: note = Description of Artificial Sequence: Synthetic oligonucleotide
  source 1..21: mol_type = other RNA
caaagggtgtcgttcttttcc

SEQ ID NO: 1243 - RNA, 23 nt, synthetic construct
  misc_feature 1..23: note = Description of Artificial Sequence: Synthetic oligonucleotide
  source 1..23: mol_type = other RNA
ggaaaagaacgacaccctttgta

SEQ ID NO: 1244 - RNA, 21 nt, synthetic construct
  misc_feature 1..21: note = Description of Artificial Sequence: Synthetic oligonucleotide
  source 1..21: mol_type = other RNA
aaagggtgtcgttcttttcca

SEQ ID NO: 1245 - RNA, 23 nt, synthetic construct
  misc_feature 1..23: note = Description of Artificial Sequence: Synthetic oligonucleotide
  source 1..23: mol_type = other RNA
tggaaaagaacgacaccctttgt

SEQ ID NO: 1246 - RNA, 21 nt, synthetic construct
  misc_feature 1..21: note = Description of Artificial Sequence: Synthetic oligonucleotide
  source 1..21: mol_type = other RNA
aatacaaagggtgtcgttctt

SEQ ID NO: 1247 - RNA, 23 nt, synthetic construct
  misc_feature 1..23: note = Description of Artificial Sequence: Synthetic oligonucleotide
  source 1..23: mol_type = other RNA
aagaacgacaccctttgtattga

SEQ ID NO: 1248 - RNA, 21 nt, synthetic construct
  misc_feature 1..21: note = Description of Artificial Sequence: Synthetic oligonucleotide
  source 1..21: mol_type = other RNA
caatacaaagggtgtcgttct

SEQ ID NO: 1249 - RNA, 23 nt, synthetic construct
  misc_feature 1..23: note = Description of Artificial Sequence: Synthetic oligonucleotide
  source 1..23: mol_type = other RNA
agaacgacaccctttgtattgaa

SEQ ID NO: 1250 - RNA, 21 nt, synthetic construct
  misc_feature 1..21: note = Description of Artificial Sequence: Synthetic oligonucleotide
  source 1..21: mol_type = other RNA
aaaggcactgatgttctgaaa

SEQ ID NO: 1251 - RNA, 23 nt, synthetic construct
  misc_feature 1..23: note = Description of Artificial Sequence: Synthetic oligonucleotide
  source 1..23: mol_type = other RNA
tttcagaacatcagtgcctttcc

SEQ ID NO: 1252 - RNA, 21 nt, synthetic construct
  misc_feature 1..21: note = Description of Artificial Sequence: Synthetic oligonucleotide
  source 1..21: mol_type = other RNA
aaggcactgatgttctgaaag

SEQ ID NO: 1253 - RNA, 23 nt, synthetic construct
  misc_feature 1..23: note = Description of Artificial Sequence: Synthetic oligonucleotide
  source 1..23: mol_type = other RNA
ctttcagaacatcagtgcctttc

SEQ ID NO: 1254 - RNA, 21 nt, synthetic construct
  misc_feature 1..21: note = Description of Artificial Sequence: Synthetic oligonucleotide
  source 1..21: mol_type = other RNA
gcggaaaggcactgatgttct

SEQ ID NO: 1255 - RNA, 23 nt, synthetic construct
  misc_feature 1..23: note = Description of Artificial Sequence: Synthetic oligonucleotide
  source 1..23: mol_type = other RNA
agaacatcagtgcctttccgcac

SEQ ID NO: 1256 - RNA, 21 nt, synthetic construct
  misc_feature 1..21: note = Description of Artificial Sequence: Synthetic oligonucleotide
  source 1..21: mol_type = other RNA
tgcggaaaggcactgatgttc

SEQ ID NO: 1257 - RNA, 23 nt, synthetic construct
  misc_feature 1..23: note = Description of Artificial Sequence: Synthetic oligonucleotide
  source 1..23: mol_type = other RNA
gaacatcagtgcctttccgcaca

SEQ ID NO: 1258 - RNA, 21 nt, synthetic construct
  misc_feature 1..21: note = Description of Artificial Sequence: Synthetic oligonucleotide
  source 1..21: mol_type = other RNA
aaggatgctccggaatgttgc

SEQ ID NO: 1259 - RNA, 23 nt, synthetic construct
  misc_feature 1..23: note = Description of Artificial Sequence: Synthetic oligonucleotide
  source 1..23: mol_type = other RNA
gcaacattccggagcatccttgg

SEQ ID NO: 1260 - RNA, 21 nt, synthetic construct
  misc_feature 1..21: note = Description of Artificial Sequence: Synthetic oligonucleotide
  source 1..21: mol_type = other RNA
aggatgctccggaatgttgct

SEQ ID NO: 1261 - RNA, 23 nt, synthetic construct
  misc_feature 1..23: note = Description of Artificial Sequence: Synthetic oligonucleotide
  source 1..23: mol_type = other RNA
agcaacattccggagcatccttg

SEQ ID NO: 1262 - RNA, 21 nt, synthetic construct
  misc_feature 1..21: note = Description of Artificial Sequence: Synthetic oligonucleotide
  source 1..21: mol_type = other RNA
atccaaggatgctccggaatg

SEQ ID NO: 1263 - RNA, 23 nt, synthetic construct
  misc_feature 1..23: note = Description of Artificial Sequence: Synthetic oligonucleotide
  source 1..23: mol_type = other RNA
cattccggagcatccttggatac

SEQ ID NO: 1264 - RNA, 21 nt, synthetic construct
  misc_feature 1..21: note = Description of Artificial Sequence: Synthetic oligonucleotide
  source 1..21: mol_type = other RNA
tatccaaggatgctccggaat

SEQ ID NO: 1265 - RNA, 23 nt, synthetic construct
  misc_feature 1..23: note = Description of Artificial Sequence: Synthetic oligonucleotide
  source 1..23: mol_type = other RNA
attccggagcatccttggataca

SEQ ID NO: 1266 - RNA, 21 nt, synthetic construct
  misc_feature 1..21: note = Description of Artificial Sequence: Synthetic oligonucleotide
  source 1..21: mol_type = other RNA
aatgggtggcggtaattggtg

SEQ ID NO: 1267 - RNA, 23 nt, synthetic construct
  misc_feature 1..23: note = Description of Artificial Sequence: Synthetic oligonucleotide
  source 1..23: mol_type = other RNA
caccaattaccgccacccattcc

SEQ ID NO: 1268 - RNA, 21 nt, synthetic construct
  misc_feature 1..21: note = Description of Artificial Sequence: Synthetic oligonucleotide
  source 1..21: mol_type = other RNA
atgggtggcggtaattggtga

SEQ ID NO: 1269 - RNA, 23 nt, synthetic construct
  misc_feature 1..23: note = Description of Artificial Sequence: Synthetic oligonucleotide
  source 1..23: mol_type = other RNA
tcaccaattaccgccacccattc

SEQ ID NO: 1270 - RNA, 21 nt, synthetic construct
  misc_feature 1..21: note = Description of Artificial Sequence: Synthetic oligonucleotide
  source 1..21: mol_type = other RNA
ttggaatgggtggcggtaatt

SEQ ID NO: 1271 - RNA, 23 nt, synthetic construct
  misc_feature 1..23: note = Description of Artificial Sequence: Synthetic oligonucleotide
  source 1..23: mol_type = other RNA
aattaccgccacccattccaatt

SEQ ID NO: 1272 - RNA, 21 nt, synthetic construct
  misc_feature 1..21: note = Description of Artificial Sequence: Synthetic oligonucleotide
  source 1..21: mol_type = other RNA
attggaatgggtggcggtaat

SEQ ID NO: 1273 - RNA, 23 nt, synthetic construct
  misc_feature 1..23: note = Description of Artificial Sequence: Synthetic oligonucleotide
  source 1..23: mol_type = other RNA
attaccgccacccattccaattc

SEQ ID NO: 1274 - RNA, 21 nt, synthetic construct
  misc_feature 1..21: note = Description of Artificial Sequence: Synthetic oligonucleotide
  source 1..21: mol_type = other RNA
ggaaaggcactgatgttctga

SEQ ID NO: 1275 - RNA, 23 nt, synthetic construct
  misc_feature 1..23: note = Description of Artificial Sequence: Synthetic oligonucleotide
  source 1..23: mol_type = other RNA
tcagaacatcagtgcctttccgc

SEQ ID NO: 1276 - RNA, 21 nt, synthetic construct
  misc_feature 1..21: note = Description of Artificial Sequence: Synthetic oligonucleotide
  source 1..21: mol_type = other RNA
gaaaggcactgatgttctgaa

SEQ ID NO: 1277 - RNA, 23 nt, synthetic construct
  misc_feature 1..23: note = Description of Artificial Sequence: Synthetic oligonucleotide
  source 1..23: mol_type = other RNA
ttcagaacatcagtgcctttccg

SEQ ID NO: 1278 - RNA, 21 nt, synthetic construct
  misc_feature 1..21: note = Description of Artificial Sequence: Synthetic oligonucleotide
  source 1..21: mol_type = other RNA
gtgcggaaaggcactgatgtt

SEQ ID NO: 1279 - RNA, 23 nt, synthetic construct
  misc_feature 1..23: note = Description of Artificial Sequence: Synthetic oligonucleotide
  source 1..23: mol_type = other RNA
aacatcagtgcctttccgcacac

SEQ ID NO: 1280 - RNA, 21 nt, synthetic construct
  misc_feature 1..21: note = Description of Artificial Sequence: Synthetic oligonucleotide
  source 1..21: mol_type = other RNA
tgtgcggaaaggcactgatgt

SEQ ID NO: 1281 - RNA, 23 nt, synthetic construct
  misc_feature 1..23: note = Description of Artificial Sequence: Synthetic oligonucleotide
  source 1..23: mol_type = other RNA
acatcagtgcctttccgcacacc

SEQ ID NO: 1282 - RNA, 21 nt, synthetic construct
  misc_feature 1..21: note = Description of Artificial Sequence: Synthetic oligonucleotide
  source 1..21: mol_type = other RNA
aattgtaagctcaggttcaaa

SEQ ID NO: 1283 - RNA, 23 nt, synthetic construct
  misc_feature 1..23: note = Description of Artificial Sequence: Synthetic oligonucleotide
  source 1..23: mol_type = other RNA
tttgaacctgagcttacaattta

SEQ ID NO: 1284 - RNA, 21 nt, synthetic construct
  misc_feature 1..21: note = Description of Artificial Sequence: Synthetic oligonucleotide
  source 1..21: mol_type = other RNA
attgtaagctcaggttcaaag

SEQ ID NO: 1285 - RNA, 23 nt, synthetic construct
  misc_feature 1..23: note = Description of Artificial Sequence: Synthetic oligonucleotide
  source 1..23: mol_type = other RNA
ctttgaacctgagcttacaattt

SEQ ID NO: 1286 - RNA, 21 nt, synthetic construct
  misc_feature 1..21: note = Description of Artificial Sequence: Synthetic oligonucleotide
  source 1..21: mol_type = other RNA
cttaaattgtaagctcaggtt

SEQ ID NO: 1287 - RNA, 23 nt, synthetic construct
  misc_feature 1..23: note = Description of Artificial Sequence: Synthetic oligonucleotide
  source 1..23: mol_type = other RNA
aacctgagcttacaatttaagaa

SEQ ID NO: 1288 - RNA, 21 nt, synthetic construct
  misc_feature 1..21: note = Description of Artificial Sequence: Synthetic oligonucleotide
  source 1..21: mol_type = other RNA
tcttaaattgtaagctcaggt

SEQ ID NO: 1289 - RNA, 23 nt, synthetic construct
  misc_feature 1..23: note = Description of Artificial Sequence: Synthetic oligonucleotide
  source 1..23: mol_type = other RNA
acctgagcttacaatttaagaac

SEQ ID NO: 1290 - RNA, 21 nt, synthetic construct
  misc_feature 1..21: note = Description of Artificial Sequence: Synthetic oligonucleotide
  source 1..21: mol_type = other RNA
gcaaacactaaggtgaaaaga

SEQ ID NO: 1291 - RNA, 23 nt, synthetic construct
  misc_feature 1..23: note = Description of Artificial Sequence: Synthetic oligonucleotide
  source 1..23: mol_type = other RNA
tcttttcaccttagtgtttgcta

SEQ ID NO: 1292 - RNA, 21 nt, synthetic construct
  misc_feature 1..21: note = Description of Artificial Sequence: Synthetic oligonucleotide
  source 1..21: mol_type = other RNA
caaacactaaggtgaaaagat

SEQ ID NO: 1293 - RNA, 23 nt, synthetic construct
  misc_feature 1..23: note = Description of Artificial Sequence: Synthetic oligonucleotide
  source 1..23: mol_type = other RNA
atcttttcaccttagtgtttgct

SEQ ID NO: 1294 - RNA, 21 nt, synthetic construct
  misc_feature 1..21: note = Description of Artificial Sequence: Synthetic oligonucleotide
  source 1..21: mol_type = other RNA
ggtagcaaacactaaggtgaa

SEQ ID NO: 1295 - RNA, 23 nt, synthetic construct
  misc_feature 1..23: note = Description of Artificial Sequence: Synthetic oligonucleotide
  source 1..23: mol_type = other RNA
ttcaccttagtgtttgctacctc

SEQ ID NO: 1296 - RNA, 21 nt, synthetic construct
  misc_feature 1..21: note = Description of Artificial Sequence: Synthetic oligonucleotide
  source 1..21: mol_type = other RNA
aggtagcaaacactaaggtga

SEQ ID NO: 1297 - RNA, 23 nt, synthetic construct
  misc_feature 1..23: note = Description of Artificial Sequence: Synthetic oligonucleotide
  source 1..23: mol_type = other RNA
tcaccttagtgtttgctacctcc

SEQ ID NO: 1298 - RNA, 21 nt, synthetic construct
  misc_feature 1..21: note = Description of Artificial Sequence: Synthetic oligonucleotide
  source 1..21: mol_type = other RNA
aggtagcaaacactaaggtga

SEQ ID NO: 1299 - RNA, 23 nt, synthetic construct
  misc_feature 1..23: note = Description of Artificial Sequence: Synthetic oligonucleotide
  source 1..23: mol_type = other RNA
tcaccttagtgtttgctacctcc

SEQ ID NO: 1300 - RNA, 21 nt, synthetic construct
  misc_feature 1..21: note = Description of Artificial Sequence: Synthetic oligonucleotide
  source 1..21: mol_type = other RNA
ggtagcaaacactaaggtgaa

SEQ ID NO: 1301 - RNA, 23 nt, synthetic construct
  misc_feature 1..23: note = Description of Artificial Sequence: Synthetic oligonucleotide
  source 1..23: mol_type = other RNA
ttcaccttagtgtttgctacctc

SEQ ID NO: 1302 - RNA, 21 nt, synthetic construct
  misc_feature 1..21: note = Description of Artificial Sequence: Synthetic oligonucleotide
  source 1..21: mol_type = other RNA
ttggaggtagcaaacactaag

SEQ ID NO: 1303 - RNA, 23 nt, synthetic construct
  misc_feature 1..23: note = Description of Artificial Sequence: Synthetic oligonucleotide
  source 1..23: mol_type = other RNA
cttagtgtttgctacctccaatt

SEQ ID NO: 1304 - RNA, 21 nt, synthetic construct
  misc_feature 1..21: note = Description of Artificial Sequence: Synthetic oligonucleotide
  source 1..21: mol_type = other RNA
attggaggtagcaaacactaa

SEQ ID NO: 1305 - RNA, 23 nt, synthetic construct
  misc_feature 1..23: note = Description of Artificial Sequence: Synthetic oligonucleotide
  source 1..23: mol_type = other RNA
ttagtgtttgctacctccaattt

SEQ ID NO: 1306 - RNA, 21 nt, synthetic construct
  misc_feature 1..21: note = Description of Artificial Sequence: Synthetic oligonucleotide
  source 1..21: mol_type = other RNA
taaagtgctgtatcctttagt

SEQ ID NO: 1307 - RNA, 23 nt, synthetic construct
  misc_feature 1..23: note = Description of Artificial Sequence: Synthetic oligonucleotide
  source 1..23: mol_type = other RNA
actaaaggatacagcactttagc

SEQ ID NO: 1308 - RNA, 21 nt, synthetic construct
  misc_feature 1..21: note = Description of Artificial Sequence: Synthetic oligonucleotide
  source 1..21: mol_type = other RNA
aaagtgctgtatcctttagta

SEQ ID NO: 1309 - RNA, 23 nt, synthetic construct
  misc_feature 1..23: note = Description of Artificial Sequence: Synthetic oligonucleotide
  source 1..23: mol_type = other RNA
tactaaaggatacagcactttag

SEQ ID NO: 1310 - RNA, 21 nt, synthetic construct
  misc_feature 1..21: note = Description of Artificial Sequence: Synthetic oligonucleotide
  source 1..21: mol_type = other RNA
aggctaaagtgctgtatcctt

SEQ ID NO: 1311 - RNA, 23 nt, synthetic construct
  misc_feature 1..23: note = Description of Artificial Sequence: Synthetic oligonucleotide
  source 1..23: mol_type = other RNA
aaggatacagcactttagcctgc

SEQ ID NO: 1312 - RNA, 21 nt, synthetic construct
  misc_feature 1..21: note = Description of Artificial Sequence: Synthetic oligonucleotide
  source 1..21: mol_type = other RNA
caggctaaagtgctgtatcct

SEQ ID NO: 1313 - RNA, 23 nt, synthetic construct
  misc_feature 1..23: note = Description of Artificial Sequence: Synthetic oligonucleotide
  source 1..23: mol_type = other RNA
aggatacagcactttagcctgcc

SEQ ID NO: 1314 - RNA, 21 nt, synthetic construct
  misc_feature 1..21: note = Description of Artificial Sequence: Synthetic oligonucleotide
  source 1..21: mol_type = other RNA
aagacattggtgaggaaaaat

SEQ ID NO: 1315 - RNA, 23 nt, synthetic construct
  misc_feature 1..23: note = Description of Artificial Sequence: Synthetic oligonucleotide
  source 1..23: mol_type = other RNA
atttttcctcaccaatgtcttgt

SEQ ID NO: 1316 - RNA, 21 nt, synthetic construct
  misc_feature 1..21: note = Description of Artificial Sequence: Synthetic oligonucleotide
  source 1..21: mol_type = other RNA
agacattggtgaggaaaaatc

SEQ ID NO: 1317 - RNA, 23 nt, synthetic construct
  misc_feature 1..23: note = Description of Artificial Sequence: Synthetic oligonucleotide
  source 1..23: mol_type = other RNA
gatttttcctcaccaatgtcttg

SEQ ID NO: 1318 - RNA, 21 nt, synthetic construct
  misc_feature 1..21: note = Description of Artificial Sequence: Synthetic oligonucleotide
  source 1..21: mol_type = other RNA
cgacaagacattggtgaggaa

SEQ ID NO: 1319 - RNA, 23 nt, synthetic construct
  misc_feature 1..23: note = Description of Artificial Sequence: Synthetic oligonucleotide
  source 1..23: mol_type = other RNA
ttcctcaccaatgtcttgtcgat

SEQ ID NO: 1320 - RNA, 21 nt, synthetic construct
  misc_feature 1..21: note = Description of Artificial Sequence: Synthetic oligonucleotide
  source 1..21: mol_type = other RNA
tcgacaagacattggtgagga

SEQ ID NO: 1321 - RNA, 23 nt, synthetic construct
  misc_feature 1..23: note = Description of Artificial Sequence: Synthetic oligonucleotide
  source 1..23: mol_type = other RNA
tcctcaccaatgtcttgtcgatg

SEQ ID NO: 1322 - RNA, 21 nt, synthetic construct
  misc_feature 1..21: note = Description of Artificial Sequence: Synthetic oligonucleotide
  source 1..21: mol_type = other RNA
aagatgtcctcgagatactaa

SEQ ID NO: 1323 - RNA, 23 nt, synthetic construct
  misc_feature 1..23: note = Description of Artificial Sequence: Synthetic oligonucleotide
  source 1..23: mol_type = other RNA
ttagtatctcgaggacatcttga

SEQ ID NO: 1324 - RNA, 21 nt, synthetic construct
  misc_feature 1..21: note = Description of Artificial Sequence: Synthetic oligonucleotide
  source 1..21: mol_type = other RNA
agatgtcctcgagatactaaa

SEQ ID NO: 1325 - RNA, 23 nt, synthetic construct
  misc_feature 1..23: note = Description of Artificial Sequence: Synthetic oligonucleotide
  source 1..23: mol_type = other RNA
tttagtatctcgaggacatcttg

SEQ ID NO: 1326 - RNA, 21 nt, synthetic construct
  misc_feature 1..21: note = Description of Artificial Sequence: Synthetic oligonucleotide
  source 1..21: mol_type = other RNA
gttcaagatgtcctcgagata

SEQ ID NO: 1327 - RNA, 23 nt, synthetic construct
  misc_feature 1..23: note = Description of Artificial Sequence: Synthetic oligonucleotide
  source 1..23: mol_type = other RNA
tatctcgaggacatcttgaacac

SEQ ID NO: 1328 - RNA, 21 nt, synthetic construct
  misc_feature 1..21: note = Description of Artificial Sequence: Synthetic oligonucleotide
  source 1..21: mol_type = other RNA
tgttcaagatgtcctcgagat

SEQ ID NO: 1329 - RNA, 23 nt, synthetic construct
  misc_feature 1..23: note = Description of Artificial Sequence: Synthetic oligonucleotide
  source 1..23: mol_type = other RNA
atctcgaggacatcttgaacacc

SEQ ID NO: 1330 - RNA, 21 nt, synthetic construct
  misc_feature 1..21: note = Description of Artificial Sequence: Synthetic oligonucleotide
  source 1..21: mol_type = other RNA
gagaaaggtgttcaagatgtc

SEQ ID NO: 1331 - RNA, 23 nt, synthetic construct
  misc_feature 1..23: note = Description of Artificial Sequence: Synthetic oligonucleotide
  source 1..23: mol_type = other RNA
gacatcttgaacacctttctccc

SEQ ID NO: 1332 - RNA, 21 nt, synthetic construct
  misc_feature 1..21: note = Description of Artificial Sequence: Synthetic oligonucleotide
  source 1..21: mol_type = other RNA
agaaaggtgttcaagatgtcc

SEQ ID NO: 1333 - RNA, 23 nt, synthetic construct
  misc_feature 1..23: note = Description of Artificial Sequence: Synthetic oligonucleotide
  source 1..23: mol_type = other RNA
ggacatcttgaacacctttctcc

SEQ ID NO: 1334 - RNA, 21 nt, synthetic construct
  misc_feature 1..21: note = Description of Artificial Sequence: Synthetic oligonucleotide
  source 1..21: mol_type = other RNA
gggggagaaaggtgttcaaga

SEQ ID NO: 1335 - RNA, 23 nt, synthetic construct
  misc_feature 1..23: note = Description of Artificial Sequence: Synthetic oligonucleotide
  source 1..23: mol_type = other RNA
tcttgaacacctttctccccctg

SEQ ID NO: 1336 - RNA, 21 nt, synthetic construct
  misc_feature 1..21: note = Description of Artificial Sequence: Synthetic oligonucleotide
  source 1..21: mol_type = other RNA
agggggagaaaggtgttcaag

SEQ ID NO: 1337 - RNA, 23 nt, synthetic construct
  misc_feature 1..23: note = Description of Artificial Sequence: Synthetic oligonucleotide
  source 1..23: mol_type = other RNA
cttgaacacctttctccccctgg

SEQ ID NO: 1338 - RNA, 21 nt, synthetic construct
  misc_feature 1..21: note = Description of Artificial Sequence: Synthetic oligonucleotide
  source 1..21: mol_type = other RNA
gctgggaagatatcaaatggc

SEQ ID NO: 1339 - RNA, 23 nt, synthetic construct
  misc_feature 1..23: note = Description of Artificial Sequence: Synthetic oligonucleotide
  source 1..23: mol_type = other RNA
gccatttgatatcttcccagctg

SEQ ID NO: 1340 - RNA, 21 nt, synthetic construct
  misc_feature 1..21: note = Description of Artificial Sequence: Synthetic oligonucleotide
  source 1..21: mol_type = other RNA
ctgggaagatatcaaatggct

SEQ ID NO: 1341 - RNA, 23 nt, synthetic construct
  misc_feature 1..23: note = Description of Artificial Sequence: Synthetic oligonucleotide
  source 1..23: mol_type = other RNA
agccatttgatatcttcccagct

SEQ ID NO: 1342 - RNA, 21 nt, synthetic construct
  misc_feature 1..21: note = Description of Artificial Sequence: Synthetic oligonucleotide
  source 1..21: mol_type = other RNA
atcagctgggaagatatcaaa

SEQ ID NO: 1343 - RNA, 23 nt, synthetic construct
  misc_feature 1..23: note = Description of Artificial Sequence: Synthetic oligonucleotide
  source 1..23: mol_type = other RNA
tttgatatcttcccagctgatag

SEQ ID NO: 1344 - RNA, 21 nt, synthetic construct
  misc_feature 1..21: note = Description of Artificial Sequence: Synthetic oligonucleotide
  source 1..21: mol_type = other RNA
tatcagctgggaagatatcaa

SEQ ID NO: 1345 - RNA, 23 nt, synthetic construct
  misc_feature 1..23: note = Description of Artificial Sequence: Synthetic oligonucleotide
  source 1..23: mol_type = other RNA
ttgatatcttcccagctgataga

SEQ ID NO: 1346 - RNA, 21 nt, synthetic construct
  misc_feature 1..21: note = Description of Artificial Sequence: Synthetic oligonucleotide
  source 1..21: mol_type = other RNA
tctgtcgacttctgttttagg

SEQ ID NO: 1347 - RNA, 23 nt, synthetic construct
  misc_feature 1..23: note = Description of Artificial Sequence: Synthetic oligonucleotide
  source 1..23: mol_type = other RNA
cctaaaacagaagtcgacagatc

SEQ ID NO: 1348 - RNA, 21 nt, synthetic construct
  misc_feature 1..21: note = Description of Artificial Sequence: Synthetic oligonucleotide
  source 1..21: mol_type = other RNA
ctgtcgacttctgttttagga

SEQ ID NO: 1349 - RNA, 23 nt, synthetic construct
  misc_feature 1..23: note = Description of Artificial Sequence: Synthetic oligonucleotide
  source 1..23: mol_type = other RNA
tcctaaaacagaagtcgacagat

SEQ ID NO: 1350 - RNA, 21 nt, synthetic construct
  misc_feature 1..21: note = Description of Artificial Sequence: Synthetic oligonucleotide
  source 1..21: mol_type = other RNA
cagatctgtcgacttctgttt

SEQ ID NO: 1351 - RNA, 23 nt, synthetic construct
  misc_feature 1..23: note = Description of Artificial Sequence: Synthetic oligonucleotide
  source 1..23: mol_type = other RNA
aaacagaagtcgacagatctgtt

SEQ ID NO: 1352 - RNA, 21 nt, synthetic construct
  misc_feature 1..21: note = Description of Artificial Sequence: Synthetic oligonucleotide
  source 1..21: mol_type = other RNA
acagatctgtcgacttctgtt

SEQ ID NO: 1353 - RNA, 23 nt, synthetic construct
  misc_feature 1..23: note = Description of Artificial Sequence: Synthetic oligonucleotide
  source 1..23: mol_type = other RNA
aacagaagtcgacagatctgttt

SEQ ID NO: 1354 - RNA, 21 nt, synthetic construct
  misc_feature 1..21: note = Description of Artificial Sequence: Synthetic oligonucleotide
  source 1..21: mol_type = other RNA
tacttctttgaatgtagattt

SEQ ID NO: 1355 - RNA, 23 nt, synthetic construct
  misc_feature 1..23: note = Description of Artificial Sequence: Synthetic oligonucleotide
  source 1..23: mol_type = other RNA
aaatctacattcaaagaagtatc

SEQ ID NO: 1356 - RNA, 21 nt, synthetic construct
  misc_feature 1..21: note = Description of Artificial Sequence: Synthetic oligonucleotide
  source 1..21: mol_type = other RNA
acttctttgaatgtagatttc

SEQ ID NO: 1357 - RNA, 23 nt, synthetic construct
  misc_feature 1..23: note = Description of Artificial Sequence: Synthetic oligonucleotide
  source 1..23: mol_type = other RNA
gaaatctacattcaaagaagtat

SEQ ID NO: 1358 - RNA, 21 nt, synthetic construct
  misc_feature 1..21: note = Description of Artificial Sequence: Synthetic oligonucleotide
  source 1..21: mol_type = other RNA
gtgatacttctttgaatgtag

SEQ ID NO: 1359 - RNA, 23 nt, synthetic construct
  misc_feature 1..23: note = Description of Artificial Sequence: Synthetic oligonucleotide
  source 1..23: mol_type = other RNA
ctacattcaaagaagtatcacca

SEQ ID NO: 1360 - RNA, 21 nt, synthetic construct
  misc_feature 1..21: note = Description of Artificial Sequence: Synthetic oligonucleotide
  source 1..21: mol_type = other RNA
ggtgatacttctttgaatgta

SEQ ID NO: 1361 - RNA, 23 nt, synthetic construct
  misc_feature 1..23: note = Description of Artificial Sequence: Synthetic oligonucleotide
  source 1..23: mol_type = other RNA
tacattcaaagaagtatcaccaa

SEQ ID NO: 1362 - RNA, 21 nt, synthetic construct
  misc_feature 1..21: note = Description of Artificial Sequence: Synthetic oligonucleotide
  source 1..21: mol_type = other RNA
tgggaagatatcaaatggctg

SEQ ID NO: 1363 - RNA, 23 nt, synthetic construct
  misc_feature 1..23: note = Description of Artificial Sequence: Synthetic oligonucleotide
  source 1..23: mol_type = other RNA
cagccatttgatatcttcccagc

SEQ ID NO: 1364 - RNA, 21 nt, synthetic construct
  misc_feature 1..21: note = Description of Artificial Sequence: Synthetic oligonucleotide
  source 1..21: mol_type = other RNA
gggaagatatcaaatggctga

SEQ ID NO: 1365 - RNA, 23 nt, synthetic construct
  misc_feature 1..23: note = Description of Artificial Sequence: Synthetic oligonucleotide
  source 1..23: mol_type = other RNA
tcagccatttgatatcttcccag

SEQ ID NO: 1366 - RNA, 21 nt, synthetic construct
  misc_feature 1..21: note = Description of Artificial Sequence: Synthetic oligonucleotide
  source 1..21: mol_type = other RNA
cagctgggaagatatcaaatg

SEQ ID NO: 1367 - RNA, 23 nt, synthetic construct
  misc_feature 1..23: note = Description of Artificial Sequence: Synthetic oligonucleotide
  source 1..23: mol_type = other RNA
catttgatatcttcccagctgat

SEQ ID NO: 1368 - RNA, 21 nt, synthetic construct
  misc_feature 1..21: note = Description of Artificial Sequence: Synthetic oligonucleotide
  source 1..21: mol_type = other RNA
tcagctgggaagatatcaaat

SEQ ID NO: 1369 - RNA, 23 nt, synthetic construct
  misc_feature 1..23: note = Description of Artificial Sequence: Synthetic oligonucleotide
  source 1..23: mol_type = other RNA
atttgatatcttcccagctgata

SEQ ID NO: 1370 - RNA, 21 nt, synthetic construct
  misc_feature 1..21: note = Description of Artificial Sequence: Synthetic oligonucleotide
  source 1..21: mol_type = other RNA
tccaaagtctatatatgacta

SEQ ID NO: 1371 - RNA, 23 nt, synthetic construct
  misc_feature 1..23: note = Description of Artificial Sequence: Synthetic oligonucleotide
  source 1..23: mol_type = other RNA
tagtcatatatagactttggaag

SEQ ID NO: 1372 - RNA, 21 nt, synthetic construct
  misc_feature 1..21: note = Description of Artificial Sequence: Synthetic oligonucleotide
  source 1..21: mol_type = other RNA
ccaaagtctatatatgactat

SEQ ID NO: 1373 - RNA, 23 nt, synthetic construct
  misc_feature 1..23: note = Description of Artificial Sequence: Synthetic oligonucleotide
  source 1..23: mol_type = other RNA
atagtcatatatagactttggaa

SEQ ID NO: 1374 - RNA, 21 nt, synthetic construct
  misc_feature 1..21: note = Description of Artificial Sequence: Synthetic oligonucleotide
  source 1..21: mol_type = other RNA
tacttccaaagtctatatatg

SEQ ID NO: 1375 - RNA, 23 nt, synthetic construct
  misc_feature 1..23: note = Description of Artificial Sequence: Synthetic oligonucleotide
  source 1..23: mol_type = other RNA
catatatagactttggaagtact

SEQ ID NO: 1376 - RNA, 21 nt, synthetic construct
  misc_feature 1..21: note = Description of Artificial Sequence: Synthetic oligonucleotide
  source 1..21: mol_type = other RNA
gtacttccaaagtctatatat

SEQ ID NO: 1377 - RNA, 23 nt, synthetic construct
  misc_feature 1..23: note = Description of Artificial Sequence: Synthetic oligonucleotide
  source 1..23: mol_type = other RNA
atatatagactttggaagtactg

SEQ ID NO: 1378 - RNA, 21 nt, synthetic construct
  misc_feature 1..21: note = Description of Artificial Sequence: Synthetic oligonucleotide
  source 1..21: mol_type = other RNA
ttatgaacaacatgctaaatc

SEQ ID NO: 1379 - RNA, 23 nt, synthetic construct
  misc_feature 1..23: note = Description of Artificial Sequence: Synthetic oligonucleotide
  source 1..23: mol_type = other RNA
gatttagcatgttgttcataatc

SEQ ID NO: 1380 - RNA, 21 nt, synthetic construct
  misc_feature 1..21: note = Description of Artificial Sequence: Synthetic oligonucleotide
  source 1..21: mol_type = other RNA
tatgaacaacatgctaaatca

SEQ ID NO: 1381 - RNA, 23 nt, synthetic construct
  misc_feature 1..23: note = Description of Artificial Sequence: Synthetic oligonucleotide
  source 1..23: mol_type = other RNA
tgatttagcatgttgttcataat

SEQ ID NO: 1382 - RNA, 21 nt, synthetic construct
  misc_feature 1..21: note = Description of Artificial Sequence: Synthetic oligonucleotide
  source 1..21: mol_type = other RNA
atgattatgaacaacatgcta

SEQ ID NO: 1383 - RNA, 23 nt, synthetic construct
  misc_feature 1..23: note = Description of Artificial Sequence: Synthetic oligonucleotide
  source 1..23: mol_type = other RNA
tagcatgttgttcataatcattg

SEQ ID NO: 1384 - RNA, 21 nt, synthetic construct
  misc_feature 1..21: note = Description of Artificial Sequence: Synthetic oligonucleotide
  source 1..21: mol_type = other RNA
aatgattatgaacaacatgct

SEQ ID NO: 1385 - RNA, 23 nt, synthetic construct
  misc_feature 1..23: note = Description of Artificial Sequence: Synthetic oligonucleotide
  source 1..23: mol_type = other RNA
agcatgttgttcataatcattga

SEQ ID NO: 1386 - RNA, 21 nt, synthetic construct
  misc_feature 1..21: note = Description of Artificial Sequence: Synthetic oligonucleotide
  source 1..21: mol_type = other RNA
aattccccacttcaatacaaa

SEQ ID NO: 1387 - RNA, 23 nt, synthetic construct
  misc_feature 1..23: note = Description of Artificial Sequence: Synthetic oligonucleotide
  source 1..23: mol_type = other RNA
tttgtattgaagtggggaattac

SEQ ID NO: 1388 - RNA, 21 nt, synthetic construct
  misc_feature 1..21: note = Description of Artificial Sequence: Synthetic oligonucleotide
  source 1..21: mol_type = other RNA
attccccacttcaatacaaag

SEQ ID NO: 1389 - RNA, 23 nt, synthetic construct
  misc_feature 1..23: note = Description of Artificial Sequence: Synthetic oligonucleotide
  source 1..23: mol_type = other RNA
ctttgtattgaagtggggaatta

SEQ ID NO: 1390 - RNA, 21 nt, synthetic construct
  misc_feature 1..21: note = Description of Artificial Sequence: Synthetic oligonucleotide
  source 1..21: mol_type = other RNA
ctgtaattccccacttcaata

SEQ ID NO: 1391 - RNA, 23 nt, synthetic construct
  misc_feature 1..23: note = Description of Artificial Sequence: Synthetic oligonucleotide
  source 1..23: mol_type = other RNA
tattgaagtggggaattacagac

SEQ ID NO: 1392 - RNA, 21 nt, synthetic construct
  misc_feature 1..21: note = Description of Artificial Sequence: Synthetic oligonucleotide
  source 1..21: mol_type = other RNA
tctgtaattccccacttcaat

SEQ ID NO: 1393 - RNA, 23 nt, synthetic construct
  misc_feature 1..23: note = Description of Artificial Sequence: Synthetic oligonucleotide
  source 1..23: mol_type = other RNA
attgaagtggggaattacagact

SEQ ID NO: 1394 - RNA, 21 nt, synthetic construct
  misc_feature 1..21: note = Description of Artificial Sequence: Synthetic oligonucleotide
  source 1..21: mol_type = other RNA
tgatgtgcgtaacagattcaa

SEQ ID NO: 1395 - RNA, 23 nt, synthetic construct
  misc_feature 1..23: note = Description of Artificial Sequence: Synthetic oligonucleotide
  source 1..23: mol_type = other RNA
ttgaatctgttacgcacatcatc

SEQ ID NO: 1396 - RNA, 21 nt, synthetic construct
  misc_feature 1..21: note = Description of Artificial Sequence: Synthetic oligonucleotide
  source 1..21: mol_type = other RNA
gatgtgcgtaacagattcaaa

SEQ ID NO: 1397 - RNA, 23 nt, synthetic construct
  misc_feature 1..23: note = Description of Artificial Sequence: Synthetic oligonucleotide
  source 1..23: mol_type = other RNA
tttgaatctgttacgcacatcat

SEQ ID NO: 1398 - RNA, 21 nt, synthetic construct
  misc_feature 1..21: note = Description of Artificial Sequence: Synthetic oligonucleotide
  source 1..21: mol_type = other RNA
tggatgatgtgcgtaacagat

SEQ ID NO: 1399 - RNA, 23 nt, synthetic construct
  misc_feature 1..23: note = Description of Artificial Sequence: Synthetic oligonucleotide
  source 1..23: mol_type = other RNA
atctgttacgcacatcatccaga

SEQ ID NO: 1400 - RNA, 21 nt, synthetic construct
  misc_feature 1..21: note = Description of Artificial Sequence: Synthetic oligonucleotide
  source 1..21: mol_type = other RNA
ctggatgatgtgcgtaacaga

SEQ ID NO: 1401 - RNA, 23 nt, synthetic construct
  misc_feature 1..23: note = Description of Artificial Sequence: Synthetic oligonucleotide
  source 1..23: mol_type = other RNA
tctgttacgcacatcatccagac

SEQ ID NO: 1402 - RNA, 21 nt, synthetic construct
  misc_feature 1..21: note = Description of Artificial Sequence: Synthetic oligonucleotide
  source 1..21: mol_type = other RNA
gaatgggtggcggtaattggt

SEQ ID NO: 1403 - RNA, 23 nt, synthetic construct
  misc_feature 1..23: note = Description of Artificial Sequence: Synthetic oligonucleotide
  source 1..23: mol_type = other RNA
accaattaccgccacccattcca

SEQ ID NO: 1404 - RNA, 21 nt, synthetic construct
  misc_feature 1..21: note = Description of Artificial Sequence: Synthetic oligonucleotide
  source 1..21: mol_type = other RNA
aatgggtggcggtaattggtg

SEQ ID NO: 1405 - RNA, 23 nt, synthetic construct
  misc_feature 1..23: note = Description of Artificial Sequence: Synthetic oligonucleotide
  source 1..23: mol_type = other RNA
caccaattaccgccacccattcc

SEQ ID NO: 1406 - RNA, 21 nt, synthetic construct
  misc_feature 1..21: note = Description of Artificial Sequence: Synthetic oligonucleotide
  source 1..21: mol_type = other RNA
attggaatgggtggcggtaat

SEQ ID NO: 1407 - RNA, 23 nt, synthetic construct
  misc_feature 1..23: note = Description of Artificial Sequence: Synthetic oligonucleotide
  source 1..23: mol_type = other RNA
attaccgccacccattccaattc

SEQ ID NO: 1408 - RNA, 21 nt, synthetic construct
  misc_feature 1..21: note = Description of Artificial Sequence: Synthetic oligonucleotide
  source 1..21: mol_type = other RNA
aattggaatgggtggcggtaa

SEQ ID NO: 1409 - RNA, 23 nt, synthetic construct
  misc_feature 1..23: note = Description of Artificial Sequence: Synthetic oligonucleotide
  source 1..23: mol_type = other RNA
ttaccgccacccattccaattct

SEQ ID NO: 1410 - RNA, 21 nt, synthetic construct
  misc_feature 1..21: note = Description of Artificial Sequence: Synthetic oligonucleotide
  source 1..21: mol_type = other RNA
tccggaatgttgctgaaacag

SEQ ID NO: 1411 - RNA, 23 nt, synthetic construct
  misc_feature 1..23: note = Description of Artificial Sequence: Synthetic oligonucleotide
  source 1..23: mol_type = other RNA
ctgtttcagcaacattccggagc

SEQ ID NO: 1412 - RNA, 21 nt, synthetic construct
  misc_feature 1..21: note = Description of Artificial Sequence: Synthetic oligonucleotide
  source 1..21: mol_type = other RNA
ccggaatgttgctgaaacaga

SEQ ID NO: 1413 - RNA, 23 nt, synthetic construct
  misc_feature 1..23: note = Description of Artificial Sequence: Synthetic oligonucleotide
  source 1..23: mol_type = other RNA
tctgtttcagcaacattccggag

SEQ ID NO: 1414 - RNA, 21 nt, synthetic construct
  misc_feature 1..21: note = Description of Artificial Sequence: Synthetic oligonucleotide
  source 1..21: mol_type = other RNA
atgctccggaatgttgctgaa

SEQ ID NO: 1415 - RNA, 23 nt, synthetic construct
  misc_feature 1..23: note = Description of Artificial Sequence: Synthetic oligonucleotide
  source 1..23: mol_type = other RNA
ttcagcaacattccggagcatcc

SEQ ID NO: 1416 - RNA, 21 nt, synthetic construct
  misc_feature 1..21: note = Description of Artificial Sequence: Synthetic oligonucleotide
  source 1..21: mol_type = other RNA
gatgctccggaatgttgctga

SEQ ID NO: 1417 - RNA, 23 nt, synthetic construct
  misc_feature 1..23: note = Description of Artificial Sequence: Synthetic oligonucleotide
  source 1..23: mol_type = other RNA
tcagcaacattccggagcatcct

SEQ ID NO: 1418 - RNA, 21 nt, synthetic construct
  misc_feature 1..21: note = Description of Artificial Sequence: Synthetic oligonucleotide
  source 1..21: mol_type = other RNA
tgtcctcgagatactaaagga

SEQ ID NO: 1419 - RNA, 23 nt, synthetic construct
  misc_feature 1..23: note = Description of Artificial Sequence: Synthetic oligonucleotide
  source 1..23: mol_type = other RNA
tcctttagtatctcgaggacatc

SEQ ID NO: 1420 - RNA, 21 nt, synthetic construct
  misc_feature 1..21: note = Description of Artificial Sequence: Synthetic oligonucleotide
  source 1..21: mol_type = other RNA
gtcctcgagatactaaaggaa

SEQ ID NO: 1421 - RNA, 23 nt, synthetic construct
  misc_feature 1..23: note = Description of Artificial Sequence: Synthetic oligonucleotide
  source 1..23: mol_type = other RNA
ttcctttagtatctcgaggacat

SEQ ID NO: 1422 - RNA, 21 nt, synthetic construct
  misc_feature 1..21: note = Description of Artificial Sequence: Synthetic oligonucleotide
  source 1..21: mol_type = other RNA
aagatgtcctcgagatactaa

SEQ ID NO: 1423 - RNA, 23 nt, synthetic construct
  misc_feature 1..23: note = Description of Artificial Sequence: Synthetic oligonucleotide
  source 1..23: mol_type = other RNA
ttagtatctcgaggacatcttga

SEQ ID NO: 1424 - RNA, 21 nt, synthetic construct
  misc_feature 1..21: note = Description of Artificial Sequence: Synthetic oligonucleotide
  source 1..21: mol_type = other RNA
caagatgtcctcgagatacta

SEQ ID NO: 1425 - RNA, 23 nt, synthetic construct
  misc_feature 1..23: note = Description of Artificial Sequence: Synthetic oligonucleotide
  source 1..23: mol_type = other RNA
tagtatctcgaggacatcttgaa

SEQ ID NO: 1426 - RNA, 21 nt, synthetic construct
  misc_feature 1..21: note = Description of Artificial Sequence: Synthetic oligonucleotide
  source 1..21: mol_type = other RNA
acaacatgctaaatcagtact

SEQ ID NO: 1427 - RNA, 23 nt, synthetic construct
  misc_feature 1..23: note = Description of Artificial Sequence: Synthetic oligonucleotide
  source 1..23: mol_type = other RNA
agtactgatttagcatgttgttc

SEQ ID NO: 1428 - RNA, 21 nt, synthetic construct
  misc_feature 1..21: note = Description of Artificial Sequence: Synthetic oligonucleotide
  source 1..21: mol_type = other RNA
caacatgctaaatcagtactt

SEQ ID NO: 1429 - RNA, 23 nt, synthetic construct
  misc_feature 1..23: note = Description of Artificial Sequence: Synthetic oligonucleotide
  source 1..23: mol_type = other RNA
aagtactgatttagcatgttgtt

SEQ ID NO: 1430 - RNA, 21 nt, synthetic construct
  misc_feature 1..21: note = Description of Artificial Sequence: Synthetic oligonucleotide
  source 1..21: mol_type = other RNA
atgaacaacatgctaaatcag

SEQ ID NO: 1431 - RNA, 23 nt, synthetic construct
  misc_feature 1..23: note = Description of Artificial Sequence: Synthetic oligonucleotide
  source 1..23: mol_type = other RNA
ctgatttagcatgttgttcataa

SEQ ID NO: 1432 - RNA, 21 nt, synthetic construct
  misc_feature 1..21: note = Description of Artificial Sequence: Synthetic oligonucleotide
  source 1..21: mol_type = other RNA
tatgaacaacatgctaaatca

SEQ ID NO: 1433 - RNA, 23 nt, synthetic construct
  misc_feature 1..23: note = Description of Artificial Sequence: Synthetic oligonucleotide
  source 1..23: mol_type = other RNA
tgatttagcatgttgttcataat

SEQ ID NO: 1434 - RNA, 21 nt, synthetic construct
  misc_feature 1..21: note = Description of Artificial Sequence: Synthetic oligonucleotide
  source 1..21: mol_type = other RNA
gccaaggctgtgtttgtgggg

SEQ ID NO: 1435 - RNA, 23 nt, synthetic construct
  misc_feature 1..23: note = Description of Artificial Sequence: Synthetic oligonucleotide
  source 1..23: mol_type = other RNA
ccccacaaacacagccttggcgc

SEQ ID NO: 1436 - RNA, 21 nt, synthetic construct
  misc_feature 1..21: note = Description of Artificial Sequence: Synthetic oligonucleotide
  source 1..21: mol_type = other RNA
ccaaggctgtgtttgtgggga

SEQ ID NO: 1437 - RNA, 23 nt, synthetic construct
  misc_feature 1..23: note = Description of Artificial Sequence: Synthetic oligonucleotide
  source 1..23: mol_type = other RNA
tccccacaaacacagccttggcg

SEQ ID NO: 1438 - RNA, 21 nt, synthetic construct
  misc_feature 1..21: note = Description of Artificial Sequence: Synthetic oligonucleotide
  source 1..21: mol_type = other RNA
tggcgccaaggctgtgtttgt

SEQ ID NO: 1439 - RNA, 23 nt, synthetic construct
  misc_feature 1..23: note = Description of Artificial Sequence: Synthetic oligonucleotide
  source 1..23: mol_type = other RNA
acaaacacagccttggcgccaag

SEQ ID NO: 1440 - RNA, 21 nt, synthetic construct
  misc_feature 1..21: note = Description of Artificial Sequence: Synthetic oligonucleotide
  source 1..21: mol_type = other RNA
ttggcgccaaggctgtgtttg

SEQ ID NO: 1441 - RNA, 23 nt, synthetic construct
  misc_feature 1..23: note = Description of Artificial Sequence: Synthetic oligonucleotide
  source 1..23: mol_type = other RNA
caaacacagccttggcgccaaga

SEQ ID NO: 1442 - RNA, 21 nt, synthetic construct
  misc_feature 1..21: note = Description of Artificial Sequence: Synthetic oligonucleotide
  source 1..21: mol_type = other RNA
tgaaagctctggctcttggcg

SEQ ID NO: 1443 - RNA, 23 nt, synthetic construct
  misc_feature 1..23: note = Description of Artificial Sequence: Synthetic oligonucleotide
  source 1..23: mol_type = other RNA
cgccaagagccagagctttcaga

SEQ ID NO: 1444 - RNA, 21 nt, synthetic construct
  misc_feature 1..21: note = Description of Artificial Sequence: Synthetic oligonucleotide
  source 1..21: mol_type = other RNA
gaaagctctggctcttggcgc

SEQ ID NO: 1445 - RNA, 23 nt, synthetic construct
  misc_feature 1..23: note = Description of Artificial Sequence: Synthetic oligonucleotide
  source 1..23: mol_type = other RNA
gcgccaagagccagagctttcag

SEQ ID NO: 1446 - RNA, 21 nt, synthetic construct
  misc_feature 1..21: note = Description of Artificial Sequence: Synthetic oligonucleotide
  source 1..21: mol_type = other RNA
gttctgaaagctctggctctt

SEQ ID NO: 1447 - RNA, 23 nt, synthetic construct
  misc_feature 1..23: note = Description of Artificial Sequence: Synthetic oligonucleotide
  source 1..23: mol_type = other RNA
aagagccagagctttcagaacat

SEQ ID NO: 1448 - RNA, 21 nt, synthetic construct
  misc_feature 1..21: note = Description of Artificial Sequence: Synthetic oligonucleotide
  source 1..21: mol_type = other RNA
tgttctgaaagctctggctct

SEQ ID NO: 1449 - RNA, 23 nt, synthetic construct
  misc_feature 1..23: note = Description of Artificial Sequence: Synthetic oligonucleotide
  source 1..23: mol_type = other RNA
agagccagagctttcagaacatc

SEQ ID NO: 1450 - RNA, 21 nt, synthetic construct
  misc_feature 1..21: note = Description of Artificial Sequence: Synthetic oligonucleotide
  source 1..21: mol_type = other RNA
cagccactattgatgttctgc

SEQ ID NO: 1451 - RNA, 23 nt, synthetic construct
  misc_feature 1..23: note = Description of Artificial Sequence: Synthetic oligonucleotide
  source 1..23: mol_type = other RNA
gcagaacatcaatagtggctggc

SEQ ID NO: 1452 - RNA, 21 nt, synthetic construct
  misc_feature 1..21: note = Description of Artificial Sequence: Synthetic oligonucleotide
  source 1..21: mol_type = other RNA
agccactattgatgttctgcc

SEQ ID NO: 1453 - RNA, 23 nt, synthetic construct
  misc_feature 1..23: note = Description of Artificial Sequence: Synthetic oligonucleotide
  source 1..23: mol_type = other RNA
ggcagaacatcaatagtggctgg

SEQ ID NO: 1454 - RNA, 21 nt, synthetic construct
  misc_feature 1..21: note = Description of Artificial Sequence: Synthetic oligonucleotide
  source 1..21: mol_type = other RNA
gtgccagccactattgatgtt

SEQ ID NO: 1455 - RNA, 23 nt, synthetic construct
  misc_feature 1..23: note = Description of Artificial Sequence: Synthetic oligonucleotide
  source 1..23: mol_type = other RNA
aacatcaatagtggctggcaccc

SEQ ID NO: 1456 - RNA, 21 nt, synthetic construct
  misc_feature 1..21: note = Description of Artificial Sequence: Synthetic oligonucleotide
  source 1..21: mol_type = other RNA
ggtgccagccactattgatgt

SEQ ID NO: 1457 - RNA, 23 nt, synthetic construct
  misc_feature 1..23: note = Description of Artificial Sequence: Synthetic oligonucleotide
  source 1..23: mol_type = other RNA
acatcaatagtggctggcacccc

SEQ ID NO: 1458 - RNA, 21 nt, synthetic construct
  misc_feature 1..21: note = Description of Artificial Sequence: Synthetic oligonucleotide
  source 1..21: mol_type = other RNA
acaaggaccgagaagtcacca

SEQ ID NO: 1459 - RNA, 23 nt, synthetic construct
  misc_feature 1..23: note = Description of Artificial Sequence: Synthetic oligonucleotide
  source 1..23: mol_type = other RNA
tggtgacttctcggtccttgtag

SEQ ID NO: 1460 - RNA, 21 nt, synthetic construct
  misc_feature 1..21: note = Description of Artificial Sequence: Synthetic oligonucleotide
  source 1..21: mol_type = other RNA
caaggaccgagaagtcaccaa

SEQ ID NO: 1461 - RNA, 23 nt, synthetic construct
  misc_feature 1..23: note = Description of Artificial Sequence: Synthetic oligonucleotide
  source 1..23: mol_type = other RNA
ttggtgacttctcggtccttgta

SEQ ID NO: 1462 - RNA, 21 nt, synthetic construct
  misc_feature 1..21: note = Description of Artificial Sequence: Synthetic oligonucleotide
  source 1..21: mol_type = other RNA
atctacaaggaccgagaagtc

SEQ ID NO: 1463 - RNA, 23 nt, synthetic construct
  misc_feature 1..23: note = Description of Artificial Sequence: Synthetic oligonucleotide
  source 1..23: mol_type = other RNA
gacttctcggtccttgtagatat

SEQ ID NO: 1464 - RNA, 21 nt, synthetic construct
  misc_feature 1..21: note = Description of Artificial Sequence: Synthetic oligonucleotide
  source 1..21: mol_type = other RNA
tatctacaaggaccgagaagt

SEQ ID NO: 1465 - RNA, 23 nt, synthetic construct
  misc_feature 1..23: note = Description of Artificial Sequence: Synthetic oligonucleotide
  source 1..23: mol_type = other RNA
acttctcggtccttgtagatata

SEQ ID NO: 1466 - RNA, 21 nt, synthetic construct
  misc_feature 1..21: note = Description of Artificial Sequence: Synthetic oligonucleotide
  source 1..21: mol_type = other RNA
cagaatgtgaaagtcatcgac

SEQ ID NO: 1467 - RNA, 23 nt, synthetic construct
  misc_feature 1..23: note = Description of Artificial Sequence: Synthetic oligonucleotide
  source 1..23: mol_type = other RNA
gtcgatgactttcacattctggc

SEQ ID NO: 1468 - RNA, 21 nt, synthetic construct
  misc_feature 1..21: note = Description of Artificial Sequence: Synthetic oligonucleotide
  source 1..21: mol_type = other RNA
agaatgtgaaagtcatcgaca

SEQ ID NO: 1469 - RNA, 23 nt, synthetic construct
  misc_feature 1..23: note = Description of Artificial Sequence: Synthetic oligonucleotide
  source 1..23: mol_type = other RNA
tgtcgatgactttcacattctgg

SEQ ID NO: 1470 - RNA, 21 nt, synthetic construct
  misc_feature 1..21: note = Description of Artificial Sequence: Synthetic oligonucleotide
  source 1..21: mol_type = other RNA
gtgccagaatgtgaaagtcat

SEQ ID NO: 1471 - RNA, 23 nt, synthetic construct
  misc_feature 1..23: note = Description of Artificial Sequence: Synthetic oligonucleotide
  source 1..23: mol_type = other RNA
atgactttcacattctggcaccc

SEQ ID NO: 1472 - RNA, 21 nt, synthetic construct
  misc_feature 1..21: note = Description of Artificial Sequence: Synthetic oligonucleotide
  source 1..21: mol_type = other RNA
ggtgccagaatgtgaaagtca

SEQ ID NO: 1473 - RNA, 23 nt, synthetic construct
  misc_feature 1..23: note = Description of Artificial Sequence: Synthetic oligonucleotide
  source 1..23: mol_type = other RNA
tgactttcacattctggcaccca

SEQ ID NO: 1474 - RNA, 21 nt, synthetic construct
  misc_feature 1..21: note = Description of Artificial Sequence: Synthetic oligonucleotide
  source 1..21: mol_type = other RNA
agatgtcctcgagatactaaa

SEQ ID NO: 1475 - RNA, 23 nt, synthetic construct
  misc_feature 1..23: note = Description of Artificial Sequence: Synthetic oligonucleotide
  source 1..23: mol_type = other RNA
tttagtatctcgaggacatcttg

SEQ ID NO: 1476 - RNA, 21 nt, synthetic construct
  misc_feature 1..21: note = Description of Artificial Sequence: Synthetic oligonucleotide
  source 1..21: mol_type = other RNA
gatgtcctcgagatactaaag

SEQ ID NO: 1477 - RNA, 23 nt, synthetic construct
  misc_feature 1..23: note = Description of Artificial Sequence: Synthetic oligonucleotide
  source 1..23: mol_type = other RNA
ctttagtatctcgaggacatctt

SEQ ID NO: 1478 - RNA, 21 nt, synthetic construct
  misc_feature 1..21: note = Description of Artificial Sequence: Synthetic oligonucleotide
  source 1..21: mol_type = other RNA
ttcaagatgtcctcgagatac

SEQ ID NO: 1479 - RNA, 23 nt, synthetic construct
  misc_feature 1..23: note = Description of Artificial Sequence: Synthetic oligonucleotide
  source 1..23: mol_type = other RNA
gtatctcgaggacatcttgaaca

SEQ ID NO: 1480 - RNA, 21 nt, synthetic construct
  misc_feature 1..21: note = Description of Artificial Sequence: Synthetic oligonucleotide
  source 1..21: mol_type = other RNA
gttcaagatgtcctcgagata

SEQ ID NO: 1481 - RNA, 23 nt, synthetic construct
  misc_feature 1..23: note = Description of Artificial Sequence: Synthetic oligonucleotide
  source 1..23: mol_type = other RNA
tatctcgaggacatcttgaacac

SEQ ID NO: 1482 - RNA, 21 nt, synthetic construct
  misc_feature 1..21: note = Description of Artificial Sequence: Synthetic oligonucleotide
  source 1..21: mol_type = other RNA
gtggacttgctgcatatgtgg

SEQ ID NO: 1483 - RNA, 23 nt, synthetic construct
  misc_feature 1..23: note = Description of Artificial Sequence: Synthetic oligonucleotide
  source 1..23: mol_type = other RNA
ccacatatgcagcaagtccactg

SEQ ID NO: 1484 - RNA, 21 nt, synthetic construct
  misc_feature 1..21: note = Description of Artificial Sequence: Synthetic oligonucleotide
  source 1..21: mol_type = other RNA
tggacttgctgcatatgtggc

SEQ ID NO: 1485 - RNA, 23 nt, synthetic construct
  misc_feature 1..23: note = Description of Artificial Sequence: Synthetic oligonucleotide
  source 1..23: mol_type = other RNA
gccacatatgcagcaagtccact

SEQ ID NO: 1486 - RNA, 21 nt, synthetic construct
  misc_feature 1..21: note = Description of Artificial Sequence: Synthetic oligonucleotide
  source 1..21: mol_type = other RNA
gacagtggacttgctgcatat

SEQ ID NO: 1487 - RNA, 23 nt, synthetic construct
  misc_feature 1..23: note = Description of Artificial Sequence: Synthetic oligonucleotide
  source 1..23: mol_type = other RNA
atatgcagcaagtccactgtcgt

SEQ ID NO: 1488 - RNA, 21 nt, synthetic construct
  misc_feature 1..21: note = Description of Artificial Sequence: Synthetic oligonucleotide
  source 1..21: mol_type = other RNA
cgacagtggacttgctgcata

SEQ ID NO: 1489 - RNA, 23 nt, synthetic construct
  misc_feature 1..23: note = Description of Artificial Sequence: Synthetic oligonucleotide
  source 1..23: mol_type = other RNA
tatgcagcaagtccactgtcgtc

SEQ ID NO: 1490 - RNA, 21 nt, synthetic construct
  misc_feature 1..21: note = Description of Artificial Sequence: Synthetic oligonucleotide
  source 1..21: mol_type = other RNA
aaccagtactttatcattttc

SEQ ID NO: 1491 - RNA, 23 nt, synthetic construct
  misc_feature 1..23: note = Description of Artificial Sequence: Synthetic oligonucleotide
  source 1..23: mol_type = other RNA
gaaaatgataaagtactggtttc

SEQ ID NO: 1492 - RNA, 21 nt, synthetic construct
  misc_feature 1..21: note = Description of Artificial Sequence: Synthetic oligonucleotide
  source 1..21: mol_type = other RNA
accagtactttatcattttct

SEQ ID NO: 1493 - RNA, 23 nt, synthetic construct
  misc_feature 1..23: note = Description of Artificial Sequence: Synthetic oligonucleotide
  source 1..23: mol_type = other RNA
agaaaatgataaagtactggttt

SEQ ID NO: 1494 - RNA, 21 nt, synthetic construct
  misc_feature 1..21: note = Description of Artificial Sequence: Synthetic oligonucleotide
  source 1..21: mol_type = other RNA
ttgaaaccagtactttatcat

SEQ ID NO: 1495 - RNA, 23 nt, synthetic construct
  misc_feature 1..23: note = Description of Artificial Sequence: Synthetic oligonucleotide
  source 1..23: mol_type = other RNA
atgataaagtactggtttcaaaa

SEQ ID NO: 1496 - RNA, 21 nt, synthetic construct
  misc_feature 1..21: note = Description of Artificial Sequence: Synthetic oligonucleotide
  source 1..21: mol_type = other RNA
tttgaaaccagtactttatca

SEQ ID NO: 1497 - RNA, 23 nt, synthetic construct
  misc_feature 1..23: note = Description of Artificial Sequence: Synthetic oligonucleotide
  source 1..23: mol_type = other RNA
tgataaagtactggtttcaaaat

SEQ ID NO: 1498 - RNA, 21 nt, synthetic construct
  misc_feature 1..21: note = Description of Artificial Sequence: Synthetic oligonucleotide
  source 1..21: mol_type = other RNA
cgagaagtcaccaagaagcta

SEQ ID NO: 1499 - RNA, 23 nt, synthetic construct
  misc_feature 1..23: note = Description of Artificial Sequence: Synthetic oligonucleotide
  source 1..23: mol_type = other RNA
tagcttcttggtgacttctcggt

SEQ ID NO: 1500 - RNA, 21 nt, synthetic construct
  misc_feature 1..21: note = Description of Artificial Sequence: Synthetic oligonucleotide
  source 1..21: mol_type = other RNA
gagaagtcaccaagaagctag

SEQ ID NO: 1501 - RNA, 23 nt, synthetic construct
  misc_feature 1..23: note = Description of Artificial Sequence: Synthetic oligonucleotide
  source 1..23: mol_type = other RNA
ctagcttcttggtgacttctcgg

SEQ ID NO: 1502 - RNA, 21 nt, synthetic construct
  misc_feature 1..21: note = Description of Artificial Sequence: Synthetic oligonucleotide
  source 1..21: mol_type = other RNA
ggaccgagaagtcaccaagaa

SEQ ID NO: 1503 - RNA, 23 nt, synthetic construct
  misc_feature 1..23: note = Description of Artificial Sequence: Synthetic oligonucleotide
  source 1..23: mol_type = other RNA
ttcttggtgacttctcggtcctt

SEQ ID NO: 1504 - RNA, 21 nt, synthetic construct
  misc_feature 1..21: note = Description of Artificial Sequence: Synthetic oligonucleotide
  source 1..21: mol_type = other RNA
aggaccgagaagtcaccaaga

SEQ ID NO: 1505 - RNA, 23 nt, synthetic construct
  misc_feature 1..23: note = Description of Artificial Sequence: Synthetic oligonucleotide
  source 1..23: mol_type = other RNA
tcttggtgacttctcggtccttg

SEQ ID NO: 1506 - RNA, 21 nt, synthetic construct
  misc_feature 1..21: note = Description of Artificial Sequence: Synthetic oligonucleotide
  source 1..21: mol_type = other RNA
tcaaagtgttggtaatgcctg

SEQ ID NO: 1507 - RNA, 23 nt, synthetic construct
  misc_feature 1..23: note = Description of Artificial Sequence: Synthetic oligonucleotide
  source 1..23: mol_type = other RNA
caggcattaccaacactttgaac

SEQ ID NO: 1508 - RNA, 21 nt, synthetic construct
  misc_feature 1..21: note = Description of Artificial Sequence: Synthetic oligonucleotide
  source 1..21: mol_type = other RNA
caaagtgttggtaatgcctga

SEQ ID NO: 1509 - RNA, 23 nt, synthetic construct
  misc_feature 1..23: note = Description of Artificial Sequence: Synthetic oligonucleotide
  source 1..23: mol_type = other RNA
tcaggcattaccaacactttgaa

SEQ ID NO: 1510 - RNA, 21 nt, synthetic construct
  misc_feature 1..21: note = Description of Artificial Sequence: Synthetic oligonucleotide
  source 1..21: mol_type = other RNA
aggttcaaagtgttggtaatg

SEQ ID NO: 1511 - RNA, 23 nt, synthetic construct
  misc_feature 1..23: note = Description of Artificial Sequence: Synthetic oligonucleotide
  source 1..23: mol_type = other RNA
cattaccaacactttgaacctga

SEQ ID NO: 1512 - RNA, 21 nt, synthetic construct
  misc_feature 1..21: note = Description of Artificial Sequence: Synthetic oligonucleotide
  source 1..21: mol_type = other RNA
caggttcaaagtgttggtaat

SEQ ID NO: 1513 - RNA, 23 nt, synthetic construct
  misc_feature 1..23: note = Description of Artificial Sequence: Synthetic oligonucleotide
  source 1..23: mol_type = other RNA
attaccaacactttgaacctgag

SEQ ID NO: 1514 - RNA, 21 nt, synthetic construct
  misc_feature 1..21: note = Description of Artificial Sequence: Synthetic oligonucleotide
  source 1..21: mol_type = other RNA
tattacttgacaaagagacac

SEQ ID NO: 1515 - RNA, 23 nt, synthetic construct
  misc_feature 1..23: note = Description of Artificial Sequence: Synthetic oligonucleotide
  source 1..23: mol_type = other RNA
gtgtctctttgtcaagtaataca

SEQ ID NO: 1516 - RNA, 21 nt, synthetic construct
  misc_feature 1..21: note = Description of Artificial Sequence: Synthetic oligonucleotide
  source 1..21: mol_type = other RNA
attacttgacaaagagacact

SEQ ID NO: 1517 - RNA, 23 nt, synthetic construct
  misc_feature 1..23: note = Description of Artificial Sequence: Synthetic oligonucleotide
  source 1..23: mol_type = other RNA
agtgtctctttgtcaagtaatac

SEQ ID NO: 1518 - RNA, 21 nt, synthetic construct
  misc_feature 1..21: note = Description of Artificial Sequence: Synthetic oligonucleotide
  source 1..21: mol_type = other RNA
catgtattacttgacaaagag

SEQ ID NO: 1519 - RNA, 23 nt, synthetic construct
  misc_feature 1..23: note = Description of Artificial Sequence: Synthetic oligonucleotide
  source 1..23: mol_type = other RNA
ctctttgtcaagtaatacatgct

SEQ ID NO: 1520 - RNA, 21 nt, synthetic construct
  misc_feature 1..21: note = Description of Artificial Sequence: Synthetic oligonucleotide
  source 1..21: mol_type = other RNA
gcatgtattacttgacaaaga

SEQ ID NO: 1521 - RNA, 23 nt, synthetic construct
  misc_feature 1..23: note = Description of Artificial Sequence: Synthetic oligonucleotide
  source 1..23: mol_type = other RNA
tctttgtcaagtaatacatgctg

SEQ ID NO: 1522 - RNA, 21 nt, synthetic construct
  misc_feature 1..21: note = Description of Artificial Sequence: Synthetic oligonucleotide
  source 1..21: mol_type = other RNA
aaagtcatcgacaagacattg

SEQ ID NO: 1523 - RNA, 23 nt, synthetic construct
  misc_feature 1..23: note = Description of Artificial Sequence: Synthetic oligonucleotide
  source 1..23: mol_type = other RNA
caatgtcttgtcgatgactttca

SEQ ID NO: 1524 - RNA, 21 nt, synthetic construct
  misc_feature 1..21: note = Description of Artificial Sequence: Synthetic oligonucleotide
  source 1..21: mol_type = other RNA
aagtcatcgacaagacattgg

SEQ ID NO: 1525 - RNA, 23 nt, synthetic construct
  misc_feature 1..23: note = Description of Artificial Sequence: Synthetic oligonucleotide
  source 1..23: mol_type = other RNA
ccaatgtcttgtcgatgactttc

SEQ ID NO: 1526 - RNA, 21 nt, synthetic construct
  misc_feature 1..21: note = Description of Artificial Sequence: Synthetic oligonucleotide
  source 1..21: mol_type = other RNA
tgtgaaagtcatcgacaagac

SEQ ID NO: 1527 - RNA, 23 nt, synthetic construct
  misc_feature 1..23: note = Description of Artificial Sequence: Synthetic oligonucleotide
  source 1..23: mol_type = other RNA
gtcttgtcgatgactttcacatt

SEQ ID NO: 1528 - RNA, 21 nt, synthetic construct
  misc_feature 1..21: note = Description of Artificial Sequence: Synthetic oligonucleotide
  source 1..21: mol_type = other RNA
atgtgaaagtcatcgacaaga

SEQ ID NO: 1529 - RNA, 23 nt, synthetic construct
  misc_feature 1..23: note = Description of Artificial Sequence: Synthetic oligonucleotide
  source 1..23: mol_type = other RNA
tcttgtcgatgactttcacattc

SEQ ID NO: 1530 - RNA, 21 nt, synthetic construct
  misc_feature 1..21: note = Description of Artificial Sequence: Synthetic oligonucleotide
  source 1..21: mol_type = other RNA
atatgtggctaaagcaataga

SEQ ID NO: 1531 - RNA, 23 nt, synthetic construct
  misc_feature 1..23: note = Description of Artificial Sequence: Synthetic oligonucleotide
  source 1..23: mol_type = other RNA
tctattgctttagccacatatgc

SEQ ID NO: 1532 - RNA, 21 nt, synthetic construct
  misc_feature 1..21: note = Description of Artificial Sequence: Synthetic oligonucleotide
  source 1..21: mol_type = other RNA
tatgtggctaaagcaatagac

SEQ ID NO: 1533 - RNA, 23 nt, synthetic construct
  misc_feature 1..23: note = Description of Artificial Sequence: Synthetic oligonucleotide
  source 1..23: mol_type = other RNA
gtctattgctttagccacatatg

SEQ ID NO: 1534 - RNA, 21 nt, synthetic construct
  misc_feature 1..21: note = Description of Artificial Sequence: Synthetic oligonucleotide
  source 1..21: mol_type = other RNA
ctgcatatgtggctaaagcaa

SEQ ID NO: 1535 - RNA, 23 nt, synthetic construct
  misc_feature 1..23: note = Description of Artificial Sequence: Synthetic oligonucleotide
  source 1..23: mol_type = other RNA
ttgctttagccacatatgcagca

SEQ ID NO: 1536 - RNA, 21 nt, synthetic construct
  misc_feature 1..21: note = Description of Artificial Sequence: Synthetic oligonucleotide
  source 1..21: mol_type = other RNA
gctgcatatgtggctaaagca

SEQ ID NO: 1537 - RNA, 23 nt, synthetic construct
  misc_feature 1..23: note = Description of Artificial Sequence: Synthetic oligonucleotide
  source 1..23: mol_type = other RNA
tgctttagccacatatgcagcaa

SEQ ID NO: 1538 - RNA, 21 nt, synthetic construct
  misc_feature 1..21: note = Description of Artificial Sequence: Synthetic oligonucleotide
  source 1..21: mol_type = other RNA
agacgacagtggacttgctgc

SEQ ID NO: 1539 - RNA, 23 nt, synthetic construct
  misc_feature 1..23: note = Description of Artificial Sequence: Synthetic oligonucleotide
  source 1..23: mol_type = other RNA
gcagcaagtccactgtcgtctcc

SEQ ID NO: 1540 - RNA, 21 nt, synthetic construct
  misc_feature 1..21: note = Description of Artificial Sequence: Synthetic oligonucleotide
  source 1..21: mol_type = other RNA
gacgacagtggacttgctgca

SEQ ID NO: 1541 - RNA, 23 nt, synthetic construct
  misc_feature 1..23: note = Description of Artificial Sequence: Synthetic oligonucleotide
  source 1..23: mol_type = other RNA
tgcagcaagtccactgtcgtctc

SEQ ID NO: 1542 - RNA, 21 nt, synthetic construct
  misc_feature 1..21: note = Description of Artificial Sequence: Synthetic oligonucleotide
  source 1..21: mol_type = other RNA
ttggagacgacagtggacttg

SEQ ID NO: 1543 - RNA, 23 nt, synthetic construct
  misc_feature 1..23: note = Description of Artificial Sequence: Synthetic oligonucleotide
  source 1..23: mol_type = other RNA
caagtccactgtcgtctccaaaa

SEQ ID NO: 1544 - RNA, 21 nt, synthetic construct
  misc_feature 1..21: note = Description of Artificial Sequence: Synthetic oligonucleotide
  source 1..21: mol_type = other RNA
tttggagacgacagtggactt

SEQ ID NO: 1545 - RNA, 23 nt, synthetic construct
  misc_feature 1..23: note = Description of Artificial Sequence: Synthetic oligonucleotide
  source 1..23: mol_type = other RNA
aagtccactgtcgtctccaaaat

SEQ ID NO: 1546 - RNA, 21 nt, synthetic construct
  misc_feature 1..21: note = Description of Artificial Sequence: Synthetic oligonucleotide
  source 1..21: mol_type = other RNA
ggccacctcctcaattgaaga

SEQ ID NO: 1547 - RNA, 23 nt, synthetic construct
  misc_feature 1..23: note = Description of Artificial Sequence: Synthetic oligonucleotide
  source 1..23: mol_type = other RNA
tcttcaattgaggaggtggccca

SEQ ID NO: 1548 - RNA, 21 nt, synthetic construct
  misc_feature 1..21: note = Description of Artificial Sequence: Synthetic oligonucleotide
  source 1..21: mol_type = other RNA
gccacctcctcaattgaagaa

SEQ ID NO: 1549 - RNA, 23 nt, synthetic construct
  misc_feature 1..23: note = Description of Artificial Sequence: Synthetic oligonucleotide
  source 1..23: mol_type = other RNA
ttcttcaattgaggaggtggccc

SEQ ID NO: 1550 - RNA, 21 nt, synthetic construct
  misc_feature 1..21: note = Description of Artificial Sequence: Synthetic oligonucleotide
  source 1..21: mol_type = other RNA
cctgggccacctcctcaattg

SEQ ID NO: 1551 - RNA, 23 nt, synthetic construct
  misc_feature 1..23: note = Description of Artificial Sequence: Synthetic oligonucleotide
  source 1..23: mol_type = other RNA
caattgaggaggtggcccaggaa

SEQ ID NO: 1552 - RNA, 21 nt, synthetic construct
  misc_feature 1..21: note = Description of Artificial Sequence: Synthetic oligonucleotide
  source 1..21: mol_type = other RNA
tcctgggccacctcctcaatt

SEQ ID NO: 1553 - RNA, 23 nt, synthetic construct
  misc_feature 1..23: note = Description of Artificial Sequence: Synthetic oligonucleotide
  source 1..23: mol_type = other RNA
aattgaggaggtggcccaggaac

SEQ ID NO: 1554 - RNA, 21 nt, synthetic construct
  misc_feature 1..21: note = Description of Artificial Sequence: Synthetic oligonucleotide
  source 1..21: mol_type = other RNA
tgtatgttacttcttagagag

SEQ ID NO: 1555 - RNA, 23 nt, synthetic construct
  misc_feature 1..23: note = Description of Artificial Sequence: Synthetic oligonucleotide
  source 1..23: mol_type = other RNA
ctctctaagaagtaacatacatc

SEQ ID NO: 1556 - RNA, 21 nt, synthetic construct
  misc_feature 1..21: note = Description of Artificial Sequence: Synthetic oligonucleotide
  source 1..21: mol_type = other RNA
gtatgttacttcttagagaga

SEQ ID NO: 1557 - RNA, 23 nt, synthetic construct
  misc_feature 1..23: note = Description of Artificial Sequence: Synthetic oligonucleotide
  source 1..23: mol_type = other RNA
tctctctaagaagtaacatacat

SEQ ID NO: 1558 - RNA, 21 nt, synthetic construct
  misc_feature 1..21: note = Description of Artificial Sequence: Synthetic oligonucleotide
  source 1..21: mol_type = other RNA
aggatgtatgttacttcttag

SEQ ID NO: 1559 - RNA, 23 nt, synthetic construct
  misc_feature 1..23: note = Description of Artificial Sequence: Synthetic oligonucleotide
  source 1..23: mol_type = other RNA
ctaagaagtaacatacatcctaa

SEQ ID NO: 1560 - RNA, 21 nt, synthetic construct
  misc_feature 1..21: note = Description of Artificial Sequence: Synthetic oligonucleotide
  source 1..21: mol_type = other RNA
taggatgtatgttacttctta

SEQ ID NO: 1561 - RNA, 23 nt, synthetic construct
  misc_feature 1..23: note = Description of Artificial Sequence: Synthetic oligonucleotide
  source 1..23: mol_type = other RNA
taagaagtaacatacatcctaaa

SEQ ID NO: 1562 - RNA, 21 nt, synthetic construct
  misc_feature 1..21: note = Description of Artificial Sequence: Synthetic oligonucleotide
  source 1..21: mol_type = other RNA
aaatgttttaggatgtatgtt

SEQ ID NO: 1563 - RNA, 23 nt, synthetic construct
  misc_feature 1..23: note = Description of Artificial Sequence: Synthetic oligonucleotide
  source 1..23: mol_type = other RNA
aacatacatcctaaaacatttgg

SEQ ID NO: 1564 - RNA, 21 nt, synthetic construct
  misc_feature 1..21: note = Description of Artificial Sequence: Synthetic oligonucleotide
  source 1..21: mol_type = other RNA
aatgttttaggatgtatgtta

SEQ ID NO: 1565 - RNA, 23 nt, synthetic construct
  misc_feature 1..23: note = Description of Artificial Sequence: Synthetic oligonucleotide
  source 1..23: mol_type = other RNA
taacatacatcctaaaacatttg

SEQ ID NO: 1566 - RNA, 21 nt, synthetic construct
  misc_feature 1..21: note = Description of Artificial Sequence: Synthetic oligonucleotide
  source 1..21: mol_type = other RNA
atccaaatgttttaggatgta

SEQ ID NO: 1567 - RNA, 23 nt, synthetic construct
  misc_feature 1..23: note = Description of Artificial Sequence: Synthetic oligonucleotide
  source 1..23: mol_type = other RNA
tacatcctaaaacatttggatat

SEQ ID NO: 1568 - RNA, 21 nt, synthetic construct
  misc_feature 1..21: note = Description of Artificial Sequence: Synthetic oligonucleotide
  source 1..21: mol_type = other RNA
tatccaaatgttttaggatgt

SEQ ID NO: 1569 - RNA, 23 nt, synthetic construct
  misc_feature 1..23: note = Description of Artificial Sequence: Synthetic oligonucleotide
  source 1..23: mol_type = other RNA
acatcctaaaacatttggatata

SEQ ID NO: 1570 - RNA, 21 nt, synthetic construct
  misc_feature 1..21: note = Description of Artificial Sequence: Synthetic oligonucleotide
  source 1..21: mol_type = other RNA
atgggtggcggtaattggtga

SEQ ID NO: 1571 - RNA, 23 nt, synthetic construct
  misc_feature 1..23: note = Description of Artificial Sequence: Synthetic oligonucleotide
  source 1..23: mol_type = other RNA
tcaccaattaccgccacccattc

SEQ ID NO: 1572 - RNA, 21 nt, synthetic construct
  misc_feature 1..21: note = Description of Artificial Sequence: Synthetic oligonucleotide
  source 1..21: mol_type = other RNA
tgggtggcggtaattggtgat

SEQ ID NO: 1573 - RNA, 23 nt, synthetic construct
  misc_feature 1..23: note = Description of Artificial Sequence: Synthetic oligonucleotide
  source 1..23: mol_type = other RNA
atcaccaattaccgccacccatt

SEQ ID NO: 1574 - RNA, 21 nt, synthetic construct
  misc_feature 1..21: note = Description of Artificial Sequence: Synthetic oligonucleotide
  source 1..21: mol_type = other RNA
tggaatgggtggcggtaattg

SEQ ID NO: 1575 - RNA, 23 nt, synthetic construct
  misc_feature 1..23: note = Description of Artificial Sequence: Synthetic oligonucleotide
  source 1..23: mol_type = other RNA
caattaccgccacccattccaat

SEQ ID NO: 1576 - RNA, 21 nt, synthetic construct
  misc_feature 1..21: note = Description of Artificial Sequence: Synthetic oligonucleotide
  source 1..21: mol_type = other RNA
ttggaatgggtggcggtaatt

SEQ ID NO: 1577 - RNA, 23 nt, synthetic construct
  misc_feature 1..23: note = Description of Artificial Sequence: Synthetic oligonucleotide
  source 1..23: mol_type = other RNA
aattaccgccacccattccaatt

SEQ ID NO: 1578 - RNA, 21 nt, synthetic construct
  misc_feature 1..21: note = Description of Artificial Sequence: Synthetic oligonucleotide
  source 1..21: mol_type = other RNA
ttcaaagtgttggtaatgcct

SEQ ID NO: 1579 - RNA, 23 nt, synthetic construct
  misc_feature 1..23: note = Description of Artificial Sequence: Synthetic oligonucleotide
  source 1..23: mol_type = other RNA
aggcattaccaacactttgaacc

SEQ ID NO: 1580 - RNA, 21 nt, synthetic construct
  misc_feature 1..21: note = Description of Artificial Sequence: Synthetic oligonucleotide
  source 1..21: mol_type = other RNA
tcaaagtgttggtaatgcctg

SEQ ID NO: 1581 - RNA, 23 nt, synthetic construct
  misc_feature 1..23: note = Description of Artificial Sequence: Synthetic oligonucleotide
  source 1..23: mol_type = other RNA
caggcattaccaacactttgaac

SEQ ID NO: 1582 - RNA, 21 nt, synthetic construct
  misc_feature 1..21: note = Description of Artificial Sequence: Synthetic oligonucleotide
  source 1..21: mol_type = other RNA
caggttcaaagtgttggtaat

SEQ ID NO: 1583 - RNA, 23 nt, synthetic construct
  misc_feature 1..23: note = Description of Artificial Sequence: Synthetic oligonucleotide
  source 1..23: mol_type = other RNA
attaccaacactttgaacctgag

SEQ ID NO: 1584 - RNA, 21 nt, synthetic construct
  misc_feature 1..21: note = Description of Artificial Sequence: Synthetic oligonucleotide
  source 1..21: mol_type = other RNA
tcaggttcaaagtgttggtaa

SEQ ID NO: 1585 - RNA, 23 nt, synthetic construct
  misc_feature 1..23: note = Description of Artificial Sequence: Synthetic oligonucleotide
  source 1..23: mol_type = other RNA
ttaccaacactttgaacctgagc

SEQ ID NO: 1586 - RNA, 21 nt, synthetic construct
  misc_feature 1..21: note = Description of Artificial Sequence: Synthetic oligonucleotide
  source 1..21: mol_type = other RNA
ccacctcctcaattgaagaag

SEQ ID NO: 1587 - RNA, 23 nt, synthetic construct
  misc_feature 1..23: note = Description of Artificial Sequence: Synthetic oligonucleotide
  source 1..23: mol_type = other RNA
cttcttcaattgaggaggtggcc

SEQ ID NO: 1588 - RNA, 21 nt, synthetic construct
  misc_feature 1..21: note = Description of Artificial Sequence: Synthetic oligonucleotide
  source 1..21: mol_type = other RNA
cacctcctcaattgaagaagt

SEQ ID NO: 1589 - RNA, 23 nt, synthetic construct
  misc_feature 1..23: note = Description of Artificial Sequence: Synthetic oligonucleotide
  source 1..23: mol_type = other RNA
acttcttcaattgaggaggtggc

SEQ ID NO: 1590 - RNA, 21 nt, synthetic construct
  misc_feature 1..21: note = Description of Artificial Sequence: Synthetic oligonucleotide
  source 1..21: mol_type = other RNA
tgggccacctcctcaattgaa

SEQ ID NO: 1591 - RNA, 23 nt, synthetic construct
  misc_feature 1..23: note = Description of Artificial Sequence: Synthetic oligonucleotide
  source 1..23: mol_type = other RNA
ttcaattgaggaggtggcccagg

SEQ ID NO: 1592 - RNA, 21 nt, synthetic construct
  misc_feature 1..21: note = Description of Artificial Sequence: Synthetic oligonucleotide
  source 1..21: mol_type = other RNA
ctgggccacctcctcaattga

SEQ ID NO: 1593 - RNA, 23 nt, synthetic construct
  misc_feature 1..23: note = Description of Artificial Sequence: Synthetic oligonucleotide
  source 1..23: mol_type = other RNA
tcaattgaggaggtggcccagga

SEQ ID NO: 1594 - RNA, 21 nt, synthetic construct
  misc_feature 1..21: note = Description of Artificial Sequence: Synthetic oligonucleotide
  source 1..21: mol_type = other RNA
gagtgggtgccagaatgtgaa

SEQ ID NO: 1595 - RNA, 23 nt, synthetic construct
  misc_feature 1..23: note = Description of Artificial Sequence: Synthetic oligonucleotide
  source 1..23: mol_type = other RNA
ttcacattctggcacccactcag

SEQ ID NO: 1596 - RNA, 21 nt, synthetic construct
  misc_feature 1..21: note = Description of Artificial Sequence: Synthetic oligonucleotide
  source 1..21: mol_type = other RNA
agtgggtgccagaatgtgaaa

SEQ ID NO: 1597 - RNA, 23 nt, synthetic construct
  misc_feature 1..23: note = Description of Artificial Sequence: Synthetic oligonucleotide
  source 1..23: mol_type = other RNA
tttcacattctggcacccactca

SEQ ID NO: 1598 - RNA, 21 nt, synthetic construct
  misc_feature 1..21: note = Description of Artificial Sequence: Synthetic oligonucleotide
  source 1..21: mol_type = other RNA
ctctgagtgggtgccagaatg

SEQ ID NO: 1599 - RNA, 23 nt, synthetic construct
  misc_feature 1..23: note = Description of Artificial Sequence: Synthetic oligonucleotide
  source 1..23: mol_type = other RNA
cattctggcacccactcagagcc

SEQ ID NO: 1600 - RNA, 21 nt, synthetic construct
  misc_feature 1..21: note = Description of Artificial Sequence: Synthetic oligonucleotide
  source 1..21: mol_type = other RNA
gctctgagtgggtgccagaat

SEQ ID NO: 1601 - RNA, 23 nt, synthetic construct
  misc_feature 1..23: note = Description of Artificial Sequence: Synthetic oligonucleotide
  source 1..23: mol_type = other RNA
attctggcacccactcagagcca

SEQ ID NO: 1602 - RNA, 21 nt, synthetic construct
  misc_feature 1..21: note = Description of Artificial Sequence: Synthetic oligonucleotide
  source 1..21: mol_type = other RNA
gcactgatgttctgaaagctc

SEQ ID NO: 1603 - RNA, 23 nt, synthetic construct
  misc_feature 1..23: note = Description of Artificial Sequence: Synthetic oligonucleotide
  source 1..23: mol_type = other RNA
gagctttcagaacatcagtgcct

SEQ ID NO: 1604 - RNA, 21 nt, synthetic construct
  misc_feature 1..21: note = Description of Artificial Sequence: Synthetic oligonucleotide
  source 1..21: mol_type = other RNA
cactgatgttctgaaagctct

SEQ ID NO: 1605 - RNA, 23 nt, synthetic construct
  misc_feature 1..23: note = Description of Artificial Sequence: Synthetic oligonucleotide
  source 1..23: mol_type = other RNA
agagctttcagaacatcagtgcc

SEQ ID NO: 1606 - RNA, 21 nt, synthetic construct
  misc_feature 1..21: note = Description of Artificial Sequence: Synthetic oligonucleotide
  source 1..21: mol_type = other RNA
aaaggcactgatgttctgaaa

SEQ ID NO: 1607 - RNA, 23 nt, synthetic construct
  misc_feature 1..23: note = Description of Artificial Sequence: Synthetic oligonucleotide
  source 1..23: mol_type = other RNA
tttcagaacatcagtgcctttcc

SEQ ID NO: 1608 - RNA, 21 nt, synthetic construct
  misc_feature 1..21: note = Description of Artificial Sequence: Synthetic oligonucleotide
  source 1..21: mol_type = other RNA
gaaaggcactgatgttctgaa

SEQ ID NO: 1609 - RNA, 23 nt, synthetic construct
  misc_feature 1..23: note = Description of Artificial Sequence: Synthetic oligonucleotide
  source 1..23: mol_type = other RNA
ttcagaacatcagtgcctttccg

SEQ ID NO: 1610 - RNA, 21 nt, synthetic construct
  misc_feature 1..21: note = Description of Artificial Sequence: Synthetic oligonucleotide
  source 1..21: mol_type = other RNA
gggaaggtggaagtcttcctg

SEQ ID NO: 1611 - RNA, 23 nt, synthetic construct
  misc_feature 1..23: note = Description of Artificial Sequence: Synthetic oligonucleotide
  source 1..23: mol_type = other RNA
caggaagacttccaccttccctt

SEQ ID NO: 1612 - RNA, 21 nt, synthetic construct
  misc_feature 1..21: note = Description of Artificial Sequence: Synthetic oligonucleotide
  source 1..21: mol_type = other RNA
ggaaggtggaagtcttcctgg

SEQ ID NO: 1613 - RNA, 23 nt, synthetic construct
  misc_feature 1..23: note = Description of Artificial Sequence: Synthetic oligonucleotide
  source 1..23: mol_type = other RNA
ccaggaagacttccaccttccct

SEQ ID NO: 1614 - RNA, 21 nt, synthetic construct
  misc_feature 1..21: note = Description of Artificial Sequence: Synthetic oligonucleotide
  source 1..21: mol_type = other RNA
ggaagggaaggtggaagtctt

SEQ ID NO: 1615 - RNA, 23 nt, synthetic construct
  misc_feature 1..23: note = Description of Artificial Sequence: Synthetic oligonucleotide
  source 1..23: mol_type = other RNA
aagacttccaccttcccttccac

SEQ ID NO: 1616 - RNA, 21 nt, synthetic construct
  misc_feature 1..21: note = Description of Artificial Sequence: Synthetic oligonucleotide
  source 1..21: mol_type = other RNA
tggaagggaaggtggaagtct

SEQ ID NO: 1617 - RNA, 23 nt, synthetic construct
  misc_feature 1..23: note = Description of Artificial Sequence: Synthetic oligonucleotide
  source 1..23: mol_type = other RNA
agacttccaccttcccttccaca

SEQ ID NO: 1618 - RNA, 21 nt, synthetic construct
  misc_feature 1..21: note = Description of Artificial Sequence: Synthetic oligonucleotide
  source 1..21: mol_type = other RNA
tgctaaatcagtacttccaaa

SEQ ID NO: 1619 - RNA, 23 nt, synthetic construct
  misc_feature 1..23: note = Description of Artificial Sequence: Synthetic oligonucleotide
  source 1..23: mol_type = other RNA
tttggaagtactgatttagcatg

SEQ ID NO: 1620 - RNA, 21 nt, synthetic construct
  misc_feature 1..21: note = Description of Artificial Sequence: Synthetic oligonucleotide
  source 1..21: mol_type = other RNA
gctaaatcagtacttccaaag

SEQ ID NO: 1621 - RNA, 23 nt, synthetic construct
  misc_feature 1..23: note = Description of Artificial Sequence: Synthetic oligonucleotide
  source 1..23: mol_type = other RNA
ctttggaagtactgatttagcat

SEQ ID NO: 1622 - RNA, 21 nt, synthetic construct
  misc_feature 1..21: note = Description of Artificial Sequence: Synthetic oligonucleotide
  source 1..21: mol_type = other RNA
aacatgctaaatcagtacttc

SEQ ID NO: 1623 - RNA, 23 nt, synthetic construct
  misc_feature 1..23: note = Description of Artificial Sequence: Synthetic oligonucleotide
  source 1..23: mol_type = other RNA
gaagtactgatttagcatgttgt

SEQ ID NO: 1624 - RNA, 21 nt, synthetic construct
  misc_feature 1..21: note = Description of Artificial Sequence: Synthetic oligonucleotide
  source 1..21: mol_type = other RNA
caacatgctaaatcagtactt

SEQ ID NO: 1625 - RNA, 23 nt, synthetic construct
  misc_feature 1..23: note = Description of Artificial Sequence: Synthetic oligonucleotide
  source 1..23: mol_type = other RNA
aagtactgatttagcatgttgtt

SEQ ID NO: 1626 - RNA, 21 nt, synthetic construct
  misc_feature 1..21: note = Description of Artificial Sequence: Synthetic oligonucleotide
  source 1..21: mol_type = other RNA
ccacaactcaggatgaaaaat

SEQ ID NO: 1627 - RNA, 23 nt, synthetic construct
  misc_feature 1..23: note = Description of Artificial Sequence: Synthetic oligonucleotide
  source 1..23: mol_type = other RNA
atttttcatcctgagttgtggcg

SEQ ID NO: 1628 - RNA, 21 nt, synthetic construct
  misc_feature 1..21: note = Description of Artificial Sequence: Synthetic oligonucleotide
  source 1..21: mol_type = other RNA
cacaactcaggatgaaaaatt

SEQ ID NO: 1629 - RNA, 23 nt, synthetic construct
  misc_feature 1..23: note = Description of Artificial Sequence: Synthetic oligonucleotide
  source 1..23: mol_type = other RNA
aatttttcatcctgagttgtggc

SEQ ID NO: 1630 - RNA, 21 nt, synthetic construct
  misc_feature 1..21: note = Description of Artificial Sequence: Synthetic oligonucleotide
  source 1..21: mol_type = other RNA
gccgccacaactcaggatgaa

SEQ ID NO: 1631 - RNA, 23 nt, synthetic construct
  misc_feature 1..23: note = Description of Artificial Sequence: Synthetic oligonucleotide
  source 1..23: mol_type = other RNA
ttcatcctgagttgtggcggcag

SEQ ID NO: 1632 - RNA, 21 nt, synthetic construct
  misc_feature 1..21: note = Description of Artificial Sequence: Synthetic oligonucleotide
  source 1..21: mol_type = other RNA
tgccgccacaactcaggatga

SEQ ID NO: 1633 - RNA, 23 nt, synthetic construct
  misc_feature 1..23: note = Description of Artificial Sequence: Synthetic oligonucleotide
  source 1..23: mol_type = other RNA
tcatcctgagttgtggcggcagt

SEQ ID NO: 1634 - RNA, 21 nt, synthetic construct
  misc_feature 1..21: note = Description of Artificial Sequence: Synthetic oligonucleotide
  source 1..21: mol_type = other RNA
gcaaccgtctggatgatgtgc

SEQ ID NO: 1635 - RNA, 23 nt, synthetic construct
  misc_feature 1..23: note = Description of Artificial Sequence: Synthetic oligonucleotide
  source 1..23: mol_type = other RNA
gcacatcatccagacggttgccc

SEQ ID NO: 1636 - RNA, 21 nt, synthetic construct
  misc_feature 1..21: note = Description of Artificial Sequence: Synthetic oligonucleotide
  source 1..21: mol_type = other RNA
caaccgtctggatgatgtgcg

SEQ ID NO: 1637 - RNA, 23 nt, synthetic construct
  misc_feature 1..23: note = Description of Artificial Sequence: Synthetic oligonucleotide
  source 1..23: mol_type = other RNA
cgcacatcatccagacggttgcc

SEQ ID NO: 1638 - RNA, 21 nt, synthetic construct
  misc_feature 1..21: note = Description of Artificial Sequence: Synthetic oligonucleotide
  source 1..21: mol_type = other RNA
ctgggcaaccgtctggatgat

SEQ ID NO: 1639 - RNA, 23 nt, synthetic construct
  misc_feature 1..23: note = Description of Artificial Sequence: Synthetic oligonucleotide
  source 1..23: mol_type = other RNA
atcatccagacggttgcccaggt

SEQ ID NO: 1640 - RNA, 21 nt, synthetic construct
  misc_feature 1..21: note = Description of Artificial Sequence: Synthetic oligonucleotide
  source 1..21: mol_type = other RNA
cctgggcaaccgtctggatga

SEQ ID NO: 1641 - RNA, 23 nt, synthetic construct
  misc_feature 1..23: note = Description of Artificial Sequence: Synthetic oligonucleotide
  source 1..23: mol_type = other RNA
tcatccagacggttgcccaggta

SEQ ID NO: 1642 - RNA, 21 nt, synthetic construct
  misc_feature 1..21: note = Description of Artificial Sequence: Synthetic oligonucleotide
  source 1..21: mol_type = other RNA
gcaaatgatgaagaaactttg

SEQ ID NO: 1643 - RNA, 23 nt, synthetic construct
  misc_feature 1..23: note = Description of Artificial Sequence: Synthetic oligonucleotide
  source 1..23: mol_type = other RNA
caaagtttcttcatcatttgccc

SEQ ID NO: 1644 - RNA, 21 nt, synthetic construct
  misc_feature 1..21: note = Description of Artificial Sequence: Synthetic oligonucleotide
  source 1..21: mol_type = other RNA
caaatgatgaagaaactttgg

SEQ ID NO: 1645 - RNA, 23 nt, synthetic construct
  misc_feature 1..23: note = Description of Artificial Sequence: Synthetic oligonucleotide
  source 1..23: mol_type = other RNA
ccaaagtttcttcatcatttgcc

SEQ ID NO: 1646 - RNA, 21 nt, synthetic construct
  misc_feature 1..21: note = Description of Artificial Sequence: Synthetic oligonucleotide
  source 1..21: mol_type = other RNA
tggggcaaatgatgaagaaac

SEQ ID NO: 1647 - RNA, 23 nt, synthetic construct
  misc_feature 1..23: note = Description of Artificial Sequence: Synthetic oligonucleotide
  source 1..23: mol_type = other RNA
gtttcttcatcatttgccccaga

SEQ ID NO: 1648 - RNA, 21 nt, synthetic construct
  misc_feature 1..21: note = Description of Artificial Sequence: Synthetic oligonucleotide
  source 1..21: mol_type = other RNA
ctggggcaaatgatgaagaaa

SEQ ID NO: 1649 - RNA, 23 nt, synthetic construct
  misc_feature 1..23: note = Description of Artificial Sequence: Synthetic oligonucleotide
  source 1..23: mol_type = other RNA
tttcttcatcatttgccccagac

SEQ ID NO: 1650 - RNA, 21 nt, synthetic construct
  misc_feature 1..21: note = Description of Artificial Sequence: Synthetic oligonucleotide
  source 1..21: mol_type = other RNA
ccaaggctgtgtttgtgggga

SEQ ID NO: 1651 - RNA, 23 nt, synthetic construct
  misc_feature 1..23: note = Description of Artificial Sequence: Synthetic oligonucleotide
  source 1..23: mol_type = other RNA
tccccacaaacacagccttggcg

SEQ ID NO: 1652 - RNA, 21 nt, synthetic construct
  misc_feature 1..21: note = Description of Artificial Sequence: Synthetic oligonucleotide
  source 1..21: mol_type = other RNA
caaggctgtgtttgtggggag

SEQ ID NO: 1653 - RNA, 23 nt, synthetic construct
  misc_feature 1..23: note = Description of Artificial Sequence: Synthetic oligonucleotide
  source 1..23: mol_type = other RNA
ctccccacaaacacagccttggc

SEQ ID NO: 1654 - RNA, 21 nt, synthetic construct
  misc_feature 1..21: note = Description of Artificial Sequence: Synthetic oligonucleotide
  source 1..21: mol_type = other RNA
ggcgccaaggctgtgtttgtg

SEQ ID NO: 1655 - RNA, 23 nt, synthetic construct
  misc_feature 1..23: note = Description of Artificial Sequence: Synthetic oligonucleotide
  source 1..23: mol_type = other RNA
cacaaacacagccttggcgccaa

SEQ ID NO: 1656 - RNA, 21 nt, synthetic construct
  misc_feature 1..21: note = Description of Artificial Sequence: Synthetic oligonucleotide
  source 1..21: mol_type = other RNA
tggcgccaaggctgtgtttgt

SEQ ID NO: 1657 - RNA, 23 nt, synthetic construct
  misc_feature 1..23: note = Description of Artificial Sequence: Synthetic oligonucleotide
  source 1..23: mol_type = other RNA
acaaacacagccttggcgccaag

SEQ ID NO: 1658 - RNA, 21 nt, synthetic construct
  misc_feature 1..21: note = Description of Artificial Sequence: Synthetic oligonucleotide
  source 1..21: mol_type = other RNA
actgccgccacaactcaggat

SEQ ID NO: 1659 - RNA, 23 nt, synthetic construct
  misc_feature 1..23: note = Description of Artificial Sequence: Synthetic oligonucleotide
  source 1..23: mol_type = other RNA
atcctgagttgtggcggcagttt

SEQ ID NO: 1660 - RNA, 21 nt, synthetic construct
  misc_feature 1..21: note = Description of Artificial Sequence: Synthetic oligonucleotide
  source 1..21: mol_type = other RNA
ctgccgccacaactcaggatg

SEQ ID NO: 1661 - RNA, 23 nt, synthetic construct
  misc_feature 1..23: note = Description of Artificial Sequence: Synthetic oligonucleotide
  source 1..23: mol_type = other RNA
catcctgagttgtggcggcagtt

SEQ ID NO: 1662 - RNA, 21 nt, synthetic construct
  misc_feature 1..21: note = Description of Artificial Sequence: Synthetic oligonucleotide
  source 1..21: mol_type = other RNA
tcaaactgccgccacaactca

SEQ ID NO: 1663 - RNA, 23 nt, synthetic construct
  misc_feature 1..23: note = Description of Artificial Sequence: Synthetic oligonucleotide
  source 1..23: mol_type = other RNA
tgagttgtggcggcagtttgaat

SEQ ID NO: 1664 - RNA, 21 nt, synthetic construct
  misc_feature 1..21: note = Description of Artificial Sequence: Synthetic oligonucleotide
  source 1..21: mol_type = other RNA
ttcaaactgccgccacaactc

SEQ ID NO: 1665 - RNA, 23 nt, synthetic construct
  misc_feature 1..23: note = Description of Artificial Sequence: Synthetic oligonucleotide
  source 1..23: mol_type = other RNA
gagttgtggcggcagtttgaatc

SEQ ID NO: 1666 - RNA, 21 nt, synthetic construct
  misc_feature 1..21: note = Description of Artificial Sequence: Synthetic oligonucleotide
  source 1..21: mol_type = other RNA
gggaagatatcaaatggctga

SEQ ID NO: 1667 - RNA, 23 nt, synthetic construct
  misc_feature 1..23: note = Description of Artificial Sequence: Synthetic oligonucleotide
  source 1..23: mol_type = other RNA
tcagccatttgatatcttcccag

SEQ ID NO: 1668 - RNA, 21 nt, synthetic construct
  misc_feature 1..21: note = Description of Artificial Sequence: Synthetic oligonucleotide
  source 1..21: mol_type = other RNA
ggaagatatcaaatggctgag

SEQ ID NO: 1669 - RNA, 23 nt, synthetic construct
  misc_feature 1..23: note = Description of Artificial Sequence: Synthetic oligonucleotide
  source 1..23: mol_type = other RNA
ctcagccatttgatatcttccca

SEQ ID NO: 1670 - RNA, 21 nt, synthetic construct
  misc_feature 1..21: note = Description of Artificial Sequence: Synthetic oligonucleotide
  source 1..21: mol_type = other RNA
agctgggaagatatcaaatgg

SEQ ID NO: 1671 - RNA, 23 nt, synthetic construct
  misc_feature 1..23: note = Description of Artificial Sequence: Synthetic oligonucleotide
  source 1..23: mol_type = other RNA
ccatttgatatcttcccagctga

SEQ ID NO: 1672 - RNA, 21 nt, synthetic construct
  misc_feature 1..21: note = Description of Artificial Sequence: Synthetic oligonucleotide
  source 1..21: mol_type = other RNA
cagctgggaagatatcaaatg

SEQ ID NO: 1673 - RNA, 23 nt, synthetic construct
  misc_feature 1..23: note = Description of Artificial Sequence: Synthetic oligonucleotide
  source 1..23: mol_type = other RNA
catttgatatcttcccagctgat

SEQ ID NO: 1674 - RNA, 21 nt, synthetic construct
  misc_feature 1..21: note = Description of Artificial Sequence: Synthetic oligonucleotide
  source 1..21: mol_type = other RNA
aatcagtacttccaaagtcta

SEQ ID NO: 1675 - RNA, 23 nt, synthetic construct
  misc_feature 1..23: note = Description of Artificial Sequence: Synthetic oligonucleotide
  source 1..23: mol_type = other RNA
tagactttggaagtactgattta

SEQ ID NO: 1676 - RNA, 21 nt, synthetic construct
  misc_feature 1..21: note = Description of Artificial Sequence: Synthetic oligonucleotide
  source 1..21: mol_type = other RNA
atcagtacttccaaagtctat

SEQ ID NO: 1677 - RNA, 23 nt, synthetic construct
  misc_feature 1..23: note = Description of Artificial Sequence: Synthetic oligonucleotide
  source 1..23: mol_type = other RNA
atagactttggaagtactgattt

SEQ ID NO: 1678 - RNA, 21 nt, synthetic construct
  misc_feature 1..21: note = Description of Artificial Sequence: Synthetic oligonucleotide
  source 1..21: mol_type = other RNA
gctaaatcagtacttccaaag

SEQ ID NO: 1679 - RNA, 23 nt, synthetic construct
  misc_feature 1..23: note = Description of Artificial Sequence: Synthetic oligonucleotide
  source 1..23: mol_type = other RNA
ctttggaagtactgatttagcat

SEQ ID NO: 1680 - RNA, 21 nt, synthetic construct
  misc_feature 1..21: note = Description of Artificial Sequence: Synthetic oligonucleotide
  source 1..21: mol_type = other RNA
tgctaaatcagtacttccaaa

SEQ ID NO: 1681 - RNA, 23 nt, synthetic construct
  misc_feature 1..23: note = Description of Artificial Sequence: Synthetic oligonucleotide
  source 1..23: mol_type = other RNA
tttggaagtactgatttagcatg

SEQ ID NO: 1682 - RNA, 21 nt, synthetic construct
  misc_feature 1..21: note = Description of Artificial Sequence: Synthetic oligonucleotide
  source 1..21: mol_type = other RNA
tcagcatgccaatatgtgtgg

SEQ ID NO: 1683 - RNA, 23 nt, synthetic construct
  misc_feature 1..23: note = Description of Artificial Sequence: Synthetic oligonucleotide
  source 1..23: mol_type = other RNA
ccacacatattggcatgctgacc

SEQ ID NO: 1684 - RNA, 21 nt, synthetic construct
  misc_feature 1..21: note = Description of Artificial Sequence: Synthetic oligonucleotide
  source 1..21: mol_type = other RNA
cagcatgccaatatgtgtggg

SEQ ID NO: 1685 - RNA, 23 nt, synthetic construct
  misc_feature 1..23: note = Description of Artificial Sequence: Synthetic oligonucleotide
  source 1..23: mol_type = other RNA
cccacacatattggcatgctgac

SEQ ID NO: 1686 - RNA, 21 nt, synthetic construct
  misc_feature 1..21: note = Description of Artificial Sequence: Synthetic oligonucleotide
  source 1..21: mol_type = other RNA
agggtcagcatgccaatatgt

SEQ ID NO: 1687 - RNA, 23 nt, synthetic construct
  misc_feature 1..23: note = Description of Artificial Sequence: Synthetic oligonucleotide
  source 1..23: mol_type = other RNA
acatattggcatgctgaccctct

SEQ ID NO: 1688 - RNA, 21 nt, synthetic construct
  misc_feature 1..21: note = Description of Artificial Sequence: Synthetic oligonucleotide
  source 1..21: mol_type = other RNA
gagggtcagcatgccaatatg

SEQ ID NO: 1689 - RNA, 23 nt, synthetic construct
  misc_feature 1..23: note = Description of Artificial Sequence: Synthetic oligonucleotide
  source 1..23: mol_type = other RNA
catattggcatgctgaccctctg

SEQ ID NO: 1690 - RNA, 21 nt, synthetic construct
  misc_feature 1..21: note = Description of Artificial Sequence: Synthetic oligonucleotide
  source 1..21: mol_type = other RNA
gcatatgtggctaaagcaata

SEQ ID NO: 1691 - RNA, 23 nt, synthetic construct
  misc_feature 1..23: note = Description of Artificial Sequence: Synthetic oligonucleotide
  source 1..23: mol_type = other RNA
tattgctttagccacatatgcag

SEQ ID NO: 1692 - RNA, 21 nt, synthetic construct
  misc_feature 1..21: note = Description of Artificial Sequence: Synthetic oligonucleotide
  source 1..21: mol_type = other RNA
catatgtggctaaagcaatag

SEQ ID NO: 1693 - RNA, 23 nt, synthetic construct
  misc_feature 1..23: note = Description of Artificial Sequence: Synthetic oligonucleotide
  source 1..23: mol_type = other RNA
ctattgctttagccacatatgca

SEQ ID NO: 1694 - RNA, 21 nt, synthetic construct
  misc_feature 1..21: note = Description of Artificial Sequence: Synthetic oligonucleotide
  source 1..21: mol_type = other RNA
tgctgcatatgtggctaaagc

SEQ ID NO: 1695 - RNA, 23 nt, synthetic construct
  misc_feature 1..23: note = Description of Artificial Sequence: Synthetic oligonucleotide
  source 1..23: mol_type = other RNA
gctttagccacatatgcagcaag

SEQ ID NO: 1696 - RNA, 21 nt, synthetic construct
  misc_feature 1..21: note = Description of Artificial Sequence: Synthetic oligonucleotide
  source 1..21: mol_type = other RNA
ttgctgcatatgtggctaaag

SEQ ID NO: 1697 - RNA, 23 nt, synthetic construct
  misc_feature 1..23: note = Description of Artificial Sequence: Synthetic oligonucleotide
  source 1..23: mol_type = other RNA
ctttagccacatatgcagcaagt

SEQ ID NO: 1698 - RNA, 21 nt, synthetic construct
  misc_feature 1..21: note = Description of Artificial Sequence: Synthetic oligonucleotide
  source 1..21: mol_type = other RNA
aaatgatgaagaaactttggc

SEQ ID NO: 1699 - RNA, 23 nt, synthetic construct
  misc_feature 1..23: note = Description of Artificial Sequence: Synthetic oligonucleotide
  source 1..23: mol_type = other RNA
gccaaagtttcttcatcatttgc

SEQ ID NO: 1700 - RNA, 21 nt, synthetic construct
  misc_feature 1..21: note = Description of Artificial Sequence: Synthetic oligonucleotide
  source 1..21: mol_type = other RNA
aatgatgaagaaactttggct

SEQ ID NO: 1701 - RNA, 23 nt, synthetic construct
  misc_feature 1..23: note = Description of Artificial Sequence: Synthetic oligonucleotide
  source 1..23: mol_type = other RNA
agccaaagtttcttcatcatttg

SEQ ID NO: 1702 - RNA, 21 nt, synthetic construct
  misc_feature 1..21: note = Description of Artificial Sequence: Synthetic oligonucleotide
  source 1..21: mol_type = other RNA
gggcaaatgatgaagaaactt

SEQ ID NO: 1703 - RNA, 23 nt, synthetic construct
  misc_feature 1..23: note = Description of Artificial Sequence: Synthetic oligonucleotide
  source 1..23: mol_type = other RNA
aagtttcttcatcatttgcccca

SEQ ID NO: 1704 - RNA, 21 nt, synthetic construct
  misc_feature 1..21: note = Description of Artificial Sequence: Synthetic oligonucleotide
  source 1..21: mol_type = other RNA
ggggcaaatgatgaagaaact

SEQ ID NO: 1705 - RNA, 23 nt, synthetic construct
  misc_feature 1..23: note = Description of Artificial Sequence: Synthetic oligonucleotide
  source 1..23: mol_type = other RNA
agtttcttcatcatttgccccag

SEQ ID NO: 1706 - RNA, 21 nt, synthetic construct
  misc_feature 1..21: note = Description of Artificial Sequence: Synthetic oligonucleotide
  source 1..21: mol_type = other RNA
gagatactaaaggaagaattc

SEQ ID NO: 1707 - RNA, 23 nt, synthetic construct
  misc_feature 1..23: note = Description of Artificial Sequence: Synthetic oligonucleotide
  source 1..23: mol_type = other RNA
gaattcttcctttagtatctcga

SEQ ID NO: 1708 - RNA, 21 nt, synthetic construct
  misc_feature 1..21: note = Description of Artificial Sequence: Synthetic oligonucleotide
  source 1..21: mol_type = other RNA
agatactaaaggaagaattcc

SEQ ID NO: 1709 - RNA, 23 nt, synthetic construct
  misc_feature 1..23: note = Description of Artificial Sequence: Synthetic oligonucleotide
  source 1..23: mol_type = other RNA
ggaattcttcctttagtatctcg

SEQ ID NO: 1710 - RNA, 21 nt, synthetic construct
  misc_feature 1..21: note = Description of Artificial Sequence: Synthetic oligonucleotide
  source 1..21: mol_type = other RNA
cctcgagatactaaaggaaga

SEQ ID NO: 1711 - RNA, 23 nt, synthetic construct
  misc_feature 1..23: note = Description of Artificial Sequence: Synthetic oligonucleotide
  source 1..23: mol_type = other RNA
tcttcctttagtatctcgaggac

SEQ ID NO: 1712 - RNA, 21 nt, synthetic construct
  misc_feature 1..21: note = Description of Artificial Sequence: Synthetic oligonucleotide
  source 1..21: mol_type = other RNA
tcctcgagatactaaaggaag

SEQ ID NO: 1713 - RNA, 23 nt, synthetic construct
  misc_feature 1..23: note = Description of Artificial Sequence: Synthetic oligonucleotide
  source 1..23: mol_type = other RNA
cttcctttagtatctcgaggaca

SEQ ID NO: 1714 - RNA, 21 nt, synthetic construct
  misc_feature 1..21: note = Description of Artificial Sequence: Synthetic oligonucleotide
  source 1..21: mol_type = other RNA
acaactcaggatgaaaaattt

SEQ ID NO: 1715 - RNA, 23 nt, synthetic construct
  misc_feature 1..23: note = Description of Artificial Sequence: Synthetic oligonucleotide
  source 1..23: mol_type = other RNA
aaatttttcatcctgagttgtgg

SEQ ID NO: 1716 - RNA, 21 nt, synthetic construct
  misc_feature 1..21: note = Description of Artificial Sequence: Synthetic oligonucleotide
  source 1..21: mol_type = other RNA
caactcaggatgaaaaatttt

SEQ ID NO: 1717 - RNA, 23 nt, synthetic construct
  misc_feature 1..23: note = Description of Artificial Sequence: Synthetic oligonucleotide
  source 1..23: mol_type = other RNA
aaaatttttcatcctgagttgtg

SEQ ID NO: 1718 - RNA, 21 nt, synthetic construct
  misc_feature 1..21: note = Description of Artificial Sequence: Synthetic oligonucleotide
  source 1..21: mol_type = other RNA
cgccacaactcaggatgaaaa

SEQ ID NO: 1719 - RNA, 23 nt, synthetic construct
  misc_feature 1..23: note = Description of Artificial Sequence: Synthetic oligonucleotide
  source 1..23: mol_type = other RNA
ttttcatcctgagttgtggcggc

SEQ ID NO: 1720 - RNA, 21 nt, synthetic construct
  misc_feature 1..21: note = Description of Artificial Sequence: Synthetic oligonucleotide
  source 1..21: mol_type = other RNA
ccgccacaactcaggatgaaa

SEQ ID NO: 1721 - RNA, 23 nt, synthetic construct
  misc_feature 1..23: note = Description of Artificial Sequence: Synthetic oligonucleotide
  source 1..23: mol_type = other RNA
tttcatcctgagttgtggcggca

SEQ ID NO: 1722 - RNA, 21 nt, synthetic construct
  misc_feature 1..21: note = Description of Artificial Sequence: Synthetic oligonucleotide
  source 1..21: mol_type = other RNA
agggaaggtggaagtcttcct

SEQ ID NO: 1723 - RNA, 23 nt, synthetic construct
  misc_feature 1..23: note = Description of Artificial Sequence: Synthetic oligonucleotide
  source 1..23: mol_type = other RNA
aggaagacttccaccttcccttc

SEQ ID NO: 1724 - RNA, 21 nt, synthetic construct
  misc_feature 1..21: note = Description of Artificial Sequence: Synthetic oligonucleotide
  source 1..21: mol_type = other RNA
gggaaggtggaagtcttcctg

SEQ ID NO: 1725 - RNA, 23 nt, synthetic construct
  misc_feature 1..23: note = Description of Artificial Sequence: Synthetic oligonucleotide
  source 1..23: mol_type = other RNA
caggaagacttccaccttccctt

SEQ ID NO: 1726 - RNA, 21 nt, synthetic construct
  misc_feature 1..21: note = Description of Artificial Sequence: Synthetic oligonucleotide
  source 1..21: mol_type = other RNA
tggaagggaaggtggaagtct

SEQ ID NO: 1727 - RNA, 23 nt, synthetic construct
  misc_feature 1..23: note = Description of Artificial Sequence: Synthetic oligonucleotide
  source 1..23: mol_type = other RNA
agacttccaccttcccttccaca

SEQ ID NO: 1728 - RNA, 21 nt, synthetic construct
  misc_feature 1..21: note = Description of Artificial Sequence: Synthetic oligonucleotide
  source 1..21: mol_type = other RNA
gtggaagggaaggtggaagtc

SEQ ID NO: 1729 - RNA, 23 nt, synthetic construct
  misc_feature 1..23: note = Description of Artificial Sequence: Synthetic oligonucleotide
  source 1..23: mol_type = other RNA
gacttccaccttcccttccacag

SEQ ID NO: 1730 - RNA, 21 nt, synthetic construct
  misc_feature 1..21: note = Description of Artificial Sequence: Synthetic oligonucleotide
  source 1..21: mol_type = other RNA
ggcgagcttgccactgtgaga

SEQ ID NO: 1731 - RNA, 23 nt, synthetic construct
  misc_feature 1..23: note = Description of Artificial Sequence: Synthetic oligonucleotide
  source 1..23: mol_type = other RNA
tctcacagtggcaagctcgccgt

SEQ ID NO: 1732 - RNA, 21 nt, synthetic construct
  misc_feature 1..21: note = Description of Artificial Sequence: Synthetic oligonucleotide
  source 1..21: mol_type = other RNA
gcgagcttgccactgtgagag

SEQ ID NO: 1733 - RNA, 23 nt, synthetic construct
  misc_feature 1..23: note = Description of Artificial Sequence: Synthetic oligonucleotide
  source 1..23: mol_type = other RNA
ctctcacagtggcaagctcgccg

SEQ ID NO: 1734 - RNA, 21 nt, synthetic construct
  misc_feature 1..21: note = Description of Artificial Sequence: Synthetic oligonucleotide
  source 1..21: mol_type = other RNA
ggacggcgagcttgccactgt

SEQ ID NO: 1735 - RNA, 23 nt, synthetic construct
  misc_feature 1..23: note = Description of Artificial Sequence: Synthetic oligonucleotide
  source 1..23: mol_type = other RNA
acagtggcaagctcgccgtccac

SEQ ID NO: 1736 - RNA, 21 nt, synthetic construct
  misc_feature 1..21: note = Description of Artificial Sequence: Synthetic oligonucleotide
  source 1..21: mol_type = other RNA
tggacggcgagcttgccactg

SEQ ID NO: 1737 - RNA, 23 nt, synthetic construct
  misc_feature 1..23: note = Description of Artificial Sequence: Synthetic oligonucleotide
  source 1..23: mol_type = other RNA
cagtggcaagctcgccgtccaca

SEQ ID NO: 1738 - RNA, 21 nt, synthetic construct
  misc_feature 1..21: note = Description of Artificial Sequence: Synthetic oligonucleotide
  source 1..21: mol_type = other RNA
atgtgcgtaacagattcaaac

SEQ ID NO: 1739 - RNA, 23 nt, synthetic construct
  misc_feature 1..23: note = Description of Artificial Sequence: Synthetic oligonucleotide
  source 1..23: mol_type = other RNA
gtttgaatctgttacgcacatca

SEQ ID NO: 1740 - RNA, 21 nt, synthetic construct
  misc_feature 1..21: note = Description of Artificial Sequence: Synthetic oligonucleotide
  source 1..21: mol_type = other RNA
tgtgcgtaacagattcaaact

SEQ ID NO: 1741 - RNA, 23 nt, synthetic construct
  misc_feature 1..23: note = Description of Artificial Sequence: Synthetic oligonucleotide
  source 1..23: mol_type = other RNA
agtttgaatctgttacgcacatc

SEQ ID NO: 1742 - RNA, 21 nt, synthetic construct
  misc_feature 1..21: note = Description of Artificial Sequence: Synthetic oligonucleotide
  source 1..21: mol_type = other RNA
gatgatgtgcgtaacagattc

SEQ ID NO: 1743 - RNA, 23 nt, synthetic construct
  misc_feature 1..23: note = Description of Artificial Sequence: Synthetic oligonucleotide
  source 1..23: mol_type = other RNA
gaatctgttacgcacatcatcca

SEQ ID NO: 1744 - RNA, 21 nt, synthetic construct
  misc_feature 1..21: note = Description of Artificial Sequence: Synthetic oligonucleotide
  source 1..21: mol_type = other RNA
ggatgatgtgcgtaacagatt

SEQ ID NO: 1745 - RNA, 23 nt, synthetic construct
  misc_feature 1..23: note = Description of Artificial Sequence: Synthetic oligonucleotide
  source 1..23: mol_type = other RNA
aatctgttacgcacatcatccag

SEQ ID NO: 1746 - RNA, 21 nt, synthetic construct
  misc_feature 1..21: note = Description of Artificial Sequence: Synthetic oligonucleotide
  source 1..21: mol_type = other RNA
gggtcagcatgccaatatgtg

SEQ ID NO: 1747 - RNA, 23 nt, synthetic construct
  misc_feature 1..23: note = Description of Artificial Sequence: Synthetic oligonucleotide
  source 1..23: mol_type = other RNA
cacatattggcatgctgaccctc

SEQ ID NO: 1748 - RNA, 21 nt, synthetic construct
  misc_feature 1..21: note = Description of Artificial Sequence: Synthetic oligonucleotide
  source 1..21: mol_type = other RNA
ggtcagcatgccaatatgtgt

SEQ ID NO: 1749 - RNA, 23 nt, synthetic construct
  misc_feature 1..23: note = Description of Artificial Sequence: Synthetic oligonucleotide
  source 1..23: mol_type = other RNA
acacatattggcatgctgaccct

SEQ ID NO: 1750 - RNA, 21 nt, synthetic construct
  misc_feature 1..21: note = Description of Artificial Sequence: Synthetic oligonucleotide
  source 1..21: mol_type = other RNA
cagagggtcagcatgccaata

SEQ ID NO: 1751 - RNA, 23 nt, synthetic construct
  misc_feature 1..23: note = Description of Artificial Sequence: Synthetic oligonucleotide
  source 1..23: mol_type = other RNA
tattggcatgctgaccctctgtc

SEQ ID NO: 1752 - RNA, 21 nt, synthetic construct
  misc_feature 1..21: note = Description of Artificial Sequence: Synthetic oligonucleotide
  source 1..21: mol_type = other RNA
acagagggtcagcatgccaat

SEQ ID NO: 1753 - RNA, 23 nt, synthetic construct
  misc_feature 1..23: note = Description of Artificial Sequence: Synthetic oligonucleotide
  source 1..23: mol_type = other RNA
attggcatgctgaccctctgtcc

SEQ ID NO: 1754 - RNA, 21 nt, synthetic construct
  misc_feature 1..21: note = Description of Artificial Sequence: Synthetic oligonucleotide
  source 1..21: mol_type = other RNA
gcttgaatgggatcttggtgt

SEQ ID NO: 1755 - RNA, 23 nt, synthetic construct
  misc_feature 1..23: note = Description of Artificial Sequence: Synthetic oligonucleotide
  source 1..23: mol_type = other RNA
acaccaagatcccattcaagcca

SEQ ID NO: 1756 - RNA, 21 nt, synthetic construct
  misc_feature 1..21: note = Description of Artificial Sequence: Synthetic oligonucleotide
  source 1..21: mol_type = other RNA
cttgaatgggatcttggtgtc

SEQ ID NO: 1757 - RNA, 23 nt, synthetic construct
  misc_feature 1..23: note = Description of Artificial Sequence: Synthetic oligonucleotide
  source 1..23: mol_type = other RNA
gacaccaagatcccattcaagcc

SEQ ID NO: 1758 - RNA, 21 nt, synthetic construct
  misc_feature 1..21: note = Description of Artificial Sequence: Synthetic oligonucleotide
  source 1..21: mol_type = other RNA
catggcttgaatgggatcttg

SEQ ID NO: 1759 - RNA, 23 nt, synthetic construct
  misc_feature 1..23: note = Description of Artificial Sequence: Synthetic oligonucleotide
  source 1..23: mol_type = other RNA
caagatcccattcaagccatgtt

SEQ ID NO: 1760 - RNA, 21 nt, synthetic construct
  misc_feature 1..21: note = Description of Artificial Sequence: Synthetic oligonucleotide
  source 1..21: mol_type = other RNA
acatggcttgaatgggatctt

SEQ ID NO: 1761 - RNA, 23 nt, synthetic construct
  misc_feature 1..23: note = Description of Artificial Sequence: Synthetic oligonucleotide
  source 1..23: mol_type = other RNA
aagatcccattcaagccatgttt

SEQ ID NO: 1762 - RNA, 21 nt, synthetic construct
  misc_feature 1..21: note = Description of Artificial Sequence: Synthetic oligonucleotide
  source 1..21: mol_type = other RNA
tcaaatggctgagaagactga

SEQ ID NO: 1763 - RNA, 23 nt, synthetic construct
  misc_feature 1..23: note = Description of Artificial Sequence: Synthetic oligonucleotide
  source 1..23: mol_type = other RNA
tcagtcttctcagccatttgata

SEQ ID NO: 1764 - RNA, 21 nt, synthetic construct
  misc_feature 1..21: note = Description of Artificial Sequence: Synthetic oligonucleotide
  source 1..21: mol_type = other RNA
caaatggctgagaagactgac

SEQ ID NO: 1765 - RNA, 23 nt, synthetic construct
  misc_feature 1..23: note = Description of Artificial Sequence: Synthetic oligonucleotide
  source 1..23: mol_type = other RNA
gtcagtcttctcagccatttgat

SEQ ID NO: 1766 - RNA, 21 nt, synthetic construct
  misc_feature 1..21: note = Description of Artificial Sequence: Synthetic oligonucleotide
  source 1..21: mol_type = other RNA
gatatcaaatggctgagaaga

SEQ ID NO: 1767 - RNA, 23 nt, synthetic construct
  misc_feature 1..23: note = Description of Artificial Sequence: Synthetic oligonucleotide
  source 1..23: mol_type = other RNA
tcttctcagccatttgatatctt

SEQ ID NO: 1768 - RNA, 21 nt, synthetic construct
  misc_feature 1..21: note = Description of Artificial Sequence: Synthetic oligonucleotide
  source 1..21: mol_type = other RNA
agatatcaaatggctgagaag

SEQ ID NO: 1769 - RNA, 23 nt, synthetic construct
  misc_feature 1..23: note = Description of Artificial Sequence: Synthetic oligonucleotide
  source 1..23: mol_type = other RNA
cttctcagccatttgatatcttc

SEQ ID NO: 1770 - RNA, 21 nt, synthetic construct
  misc_feature 1..21: note = Description of Artificial Sequence: Synthetic oligonucleotide
  source 1..21: mol_type = other RNA
gaaagtcatcgacaagacatt

SEQ ID NO: 1771 - RNA, 23 nt, synthetic construct
  misc_feature 1..23: note = Description of Artificial Sequence: Synthetic oligonucleotide
  source 1..23: mol_type = other RNA
aatgtcttgtcgatgactttcac

SEQ ID NO: 1772 - RNA, 21 nt, synthetic construct
  misc_feature 1..21: note = Description of Artificial Sequence: Synthetic oligonucleotide
  source 1..21: mol_type = other RNA
aaagtcatcgacaagacattg

SEQ ID NO: 1773 - RNA, 23 nt, synthetic construct
  misc_feature 1..23: note = Description of Artificial Sequence: Synthetic oligonucleotide
  source 1..23: mol_type = other RNA
caatgtcttgtcgatgactttca

SEQ ID NO: 1774 - RNA, 21 nt, synthetic construct
  misc_feature 1..21: note = Description of Artificial Sequence: Synthetic oligonucleotide
  source 1..21: mol_type = other RNA
atgtgaaagtcatcgacaaga

SEQ ID NO: 1775 - RNA, 23 nt, synthetic construct
  misc_feature 1..23: note = Description of Artificial Sequence: Synthetic oligonucleotide
  source 1..23: mol_type = other RNA
tcttgtcgatgactttcacattc

SEQ ID NO: 1776 - RNA, 21 nt, synthetic construct
  misc_feature 1..21: note = Description of Artificial Sequence: Synthetic oligonucleotide
  source 1..21: mol_type = other RNA
aatgtgaaagtcatcgacaag

SEQ ID NO: 1777 - RNA, 23 nt, synthetic construct
  misc_feature 1..23: note = Description of Artificial Sequence: Synthetic oligonucleotide
  source 1..23: mol_type = other RNA
cttgtcgatgactttcacattct

SEQ ID NO: 1778 - RNA, 21 nt, synthetic construct
  misc_feature 1..21: note = Description of Artificial Sequence: Synthetic oligonucleotide
  source 1..21: mol_type = other RNA
ggctaatttgtatcaatgatt

SEQ ID NO: 1779 - RNA, 23 nt, synthetic construct
  misc_feature 1..23: note = Description of Artificial Sequence: Synthetic oligonucleotide
  source 1..23: mol_type = other RNA
aatcattgatacaaattagccgg

SEQ ID NO: 1780 - RNA, 21 nt, synthetic construct
  misc_feature 1..21: note = Description of Artificial Sequence: Synthetic oligonucleotide
  source 1..21: mol_type = other RNA
gctaatttgtatcaatgatta

SEQ ID NO: 1781 - RNA, 23 nt, synthetic construct
  misc_feature 1..23: note = Description of Artificial Sequence: Synthetic oligonucleotide
  source 1..23: mol_type = other RNA
taatcattgatacaaattagccg

SEQ ID NO: 1782 - RNA, 21 nt, synthetic construct
  misc_feature 1..21: note = Description of Artificial Sequence: Synthetic oligonucleotide
  source 1..21: mol_type = other RNA
ccccggctaatttgtatcaat

SEQ ID NO: 1783 - RNA, 23 nt, synthetic construct
  misc_feature 1..23: note = Description of Artificial Sequence: Synthetic oligonucleotide
  source 1..23: mol_type = other RNA
attgatacaaattagccggggga

SEQ ID NO: 1784 - RNA, 21 nt, synthetic construct
  misc_feature 1..21: note = Description of Artificial Sequence: Synthetic oligonucleotide
  source 1..21: mol_type = other RNA
cccccggctaatttgtatcaa

SEQ ID NO: 1785 - RNA, 23 nt, synthetic construct
  misc_feature 1..23: note = Description of Artificial Sequence: Synthetic oligonucleotide
  source 1..23: mol_type = other RNA
ttgatacaaattagccgggggag

SEQ ID NO: 1786 - RNA, 21 nt, synthetic construct
  misc_feature 1..21: note = Description of Artificial Sequence: Synthetic oligonucleotide
  source 1..21: mol_type = other RNA
tgtcgacttctgttttaggac

SEQ ID NO: 1787 - RNA, 23 nt, synthetic construct
  misc_feature 1..23: note = Description of Artificial Sequence: Synthetic oligonucleotide
  source 1..23: mol_type = other RNA
gtcctaaaacagaagtcgacaga

SEQ ID NO: 1788 - RNA, 21 nt, synthetic construct
  misc_feature 1..21: note = Description of Artificial Sequence: Synthetic oligonucleotide
  source 1..21: mol_type = other RNA
gtcgacttctgttttaggaca

SEQ ID NO: 1789 - RNA, 23 nt, synthetic construct
  misc_feature 1..23: note = Description of Artificial Sequence: Synthetic oligonucleotide
  source 1..23: mol_type = other RNA
tgtcctaaaacagaagtcgacag

SEQ ID NO: 1790 - RNA, 21 nt, synthetic construct
  misc_feature 1..21: note = Description of Artificial Sequence: Synthetic oligonucleotide
  source 1..21: mol_type = other RNA
gatctgtcgacttctgtttta

SEQ ID NO: 1791 - RNA, 23 nt, synthetic construct
  misc_feature 1..23: note = Description of Artificial Sequence: Synthetic oligonucleotide
  source 1..23: mol_type = other RNA
taaaacagaagtcgacagatctg

SEQ ID NO: 1792 - RNA, 21 nt, synthetic construct
  misc_feature 1..21: note = Description of Artificial Sequence: Synthetic oligonucleotide
  source 1..21: mol_type = other RNA
agatctgtcgacttctgtttt

SEQ ID NO: 1793 - RNA, 23 nt, synthetic construct
  misc_feature 1..23: note = Description of Artificial Sequence: Synthetic oligonucleotide
  source 1..23: mol_type = other RNA
aaaacagaagtcgacagatctgt

SEQ ID NO: 1794 - RNA, 21 nt, synthetic construct
  misc_feature 1..21: note = Description of Artificial Sequence: Synthetic oligonucleotide
  source 1..21: mol_type = other RNA
ccgagaagtcaccaagaagct

SEQ ID NO: 1795 - RNA, 23 nt, synthetic construct
  misc_feature 1..23: note = Description of Artificial Sequence: Synthetic oligonucleotide
  source 1..23: mol_type = other RNA
agcttcttggtgacttctcggtc

SEQ ID NO: 1796 - RNA, 21 nt, synthetic construct
  misc_feature 1..21: note = Description of Artificial Sequence: Synthetic oligonucleotide
  source 1..21: mol_type = other RNA
cgagaagtcaccaagaagcta

SEQ ID NO: 1797 - RNA, 23 nt, synthetic construct
  misc_feature 1..23: note = Description of Artificial Sequence: Synthetic oligonucleotide
  source 1..23: mol_type = other RNA
tagcttcttggtgacttctcggt

SEQ ID NO: 1798 - RNA, 21 nt, synthetic construct
  misc_feature 1..21: note = Description of Artificial Sequence: Synthetic oligonucleotide
  source 1..21: mol_type = other RNA
aggaccgagaagtcaccaaga

SEQ ID NO: 1799 - RNA, 23 nt, synthetic construct
  misc_feature 1..23: note = Description of Artificial Sequence: Synthetic oligonucleotide
  source 1..23: mol_type = other RNA
tcttggtgacttctcggtccttg

SEQ ID NO: 1800 - RNA, 21 nt, synthetic construct
  misc_feature 1..21: note = Description of Artificial Sequence: Synthetic oligonucleotide
  source 1..21: mol_type = other RNA
aaggaccgagaagtcaccaag

SEQ ID NO: 1801 - RNA, 23 nt, synthetic construct
  misc_feature 1..23: note = Description of Artificial Sequence: Synthetic oligonucleotide
  source 1..23: mol_type = other RNA
cttggtgacttctcggtccttgt

SEQ ID NO: 1802 - RNA, 21 nt, synthetic construct
  misc_feature 1..21: note = Description of Artificial Sequence: Synthetic oligonucleotide
  source 1..21: mol_type = other RNA
aaacatggcttgaatgggatc

SEQ ID NO: 1803 - RNA, 23 nt, synthetic construct
  misc_feature 1..23: note = Description of Artificial Sequence: Synthetic oligonucleotide
  source 1..23: mol_type = other RNA
gatcccattcaagccatgtttaa

SEQ ID NO: 1804 - RNA, 21 nt, synthetic construct
  misc_feature 1..21: note = Description of Artificial Sequence: Synthetic oligonucleotide
  source 1..21: mol_type = other RNA
aacatggcttgaatgggatct

SEQ ID NO: 1805 - RNA, 23 nt, synthetic construct
  misc_feature 1..23: note = Description of Artificial Sequence: Synthetic oligonucleotide
  source 1..23: mol_type = other RNA
agatcccattcaagccatgttta

SEQ ID NO: 1806 - RNA, 21 nt, synthetic construct
  misc_feature 1..21: note = Description of Artificial Sequence: Synthetic oligonucleotide
  source 1..21: mol_type = other RNA
tgttaaacatggcttgaatgg

SEQ ID NO: 1807 - RNA, 23 nt, synthetic construct
  misc_feature 1..23: note = Description of Artificial Sequence: Synthetic oligonucleotide
  source 1..23: mol_type = other RNA
ccattcaagccatgtttaacagc

SEQ ID NO: 1808 - RNA, 21 nt, synthetic construct
  misc_feature 1..21: note = Description of Artificial Sequence: Synthetic oligonucleotide
  source 1..21: mol_type = other RNA
ctgttaaacatggcttgaatg

SEQ ID NO: 1809 - RNA, 23 nt, synthetic construct
  misc_feature 1..23: note = Description of Artificial Sequence: Synthetic oligonucleotide
  source 1..23: mol_type = other RNA
cattcaagccatgtttaacagcc

SEQ ID NO: 1810 - RNA, 21 nt, synthetic construct
  misc_feature 1..21: note = Description of Artificial Sequence: Synthetic oligonucleotide
  source 1..21: mol_type = other RNA
gacttgctgcatatgtggcta

SEQ ID NO: 1811 - RNA, 23 nt, synthetic construct
  misc_feature 1..23: note = Description of Artificial Sequence: Synthetic oligonucleotide
  source 1..23: mol_type = other RNA
tagccacatatgcagcaagtcca

SEQ ID NO: 1812 - RNA, 21 nt, synthetic construct
  misc_feature 1..21: note = Description of Artificial Sequence: Synthetic oligonucleotide
  source 1..21: mol_type = other RNA
acttgctgcatatgtggctaa

SEQ ID NO: 1813 - RNA, 23 nt, synthetic construct
  misc_feature 1..23: note = Description of Artificial Sequence: Synthetic oligonucleotide
  source 1..23: mol_type = other RNA
ttagccacatatgcagcaagtcc

SEQ ID NO: 1814 - RNA, 21 nt, synthetic construct
  misc_feature 1..21: note = Description of Artificial Sequence: Synthetic oligonucleotide
  source 1..21: mol_type = other RNA
agtggacttgctgcatatgtg

SEQ ID NO: 1815 - RNA, 23 nt, synthetic construct
  misc_feature 1..23: note = Description of Artificial Sequence: Synthetic oligonucleotide
  source 1..23: mol_type = other RNA
cacatatgcagcaagtccactgt

SEQ ID NO: 1816 - RNA, 21 nt, synthetic construct
  misc_feature 1..21: note = Description of Artificial Sequence: Synthetic oligonucleotide
  source 1..21: mol_type = other RNA
cagtggacttgctgcatatgt

SEQ ID NO: 1817 - RNA, 23 nt, synthetic construct
  misc_feature 1..23: note = Description of Artificial Sequence: Synthetic oligonucleotide
  source 1..23: mol_type = other RNA
acatatgcagcaagtccactgtc

SEQ ID NO: 1818 - RNA, 21 nt, synthetic construct
  misc_feature 1..21: note = Description of Artificial Sequence: Synthetic oligonucleotide
  source 1..21: mol_type = other RNA
taaatcagtacttccaaagtc

SEQ ID NO: 1819 - RNA, 23 nt, synthetic construct
  misc_feature 1..23: note = Description of Artificial Sequence: Synthetic oligonucleotide
  source 1..23: mol_type = other RNA
gactttggaagtactgatttagc

SEQ ID NO: 1820 - RNA, 21 nt, synthetic construct
  misc_feature 1..21: note = Description of Artificial Sequence: Synthetic oligonucleotide
  source 1..21: mol_type = other RNA
aaatcagtacttccaaagtct

SEQ ID NO: 1821 - RNA, 23 nt, synthetic construct
  misc_feature 1..23: note = Description of Artificial Sequence: Synthetic oligonucleotide
  source 1..23: mol_type = other RNA
agactttggaagtactgatttag

SEQ ID NO: 1822 - RNA, 21 nt, synthetic construct
  misc_feature 1..21: note = Description of Artificial Sequence: Synthetic oligonucleotide
  source 1..21: mol_type = other RNA
atgctaaatcagtacttccaa

SEQ ID NO: 1823 - RNA, 23 nt, synthetic construct
  misc_feature 1..23: note = Description of Artificial Sequence: Synthetic oligonucleotide
  source 1..23: mol_type = other RNA
ttggaagtactgatttagcatgt

SEQ ID NO: 1824 - RNA, 21 nt, synthetic construct
  misc_feature 1..21: note = Description of Artificial Sequence: Synthetic oligonucleotide
  source 1..21: mol_type = other RNA
catgctaaatcagtacttcca

SEQ ID NO: 1825 - RNA, 23 nt, synthetic construct
  misc_feature 1..23: note = Description of Artificial Sequence: Synthetic oligonucleotide
  source 1..23: mol_type = other RNA
tggaagtactgatttagcatgtt

SEQ ID NO: 1826 - RNA, 21 nt, synthetic construct
  misc_feature 1..21: note = Description of Artificial Sequence: Synthetic oligonucleotide
  source 1..21: mol_type = other RNA
tcctcaattgaagaagtggcg

SEQ ID NO: 1827 - RNA, 23 nt, synthetic construct
  misc_feature 1..23: note = Description of Artificial Sequence: Synthetic oligonucleotide
  source 1..23: mol_type = other RNA
cgccacttcttcaattgaggagg

SEQ ID NO: 1828 - RNA, 21 nt, synthetic construct
  misc_feature 1..21: note = Description of Artificial Sequence: Synthetic oligonucleotide
  source 1..21: mol_type = other RNA
cctcaattgaagaagtggcgg

SEQ ID NO: 1829 - RNA, 23 nt, synthetic construct
  misc_feature 1..23: note = Description of Artificial Sequence: Synthetic oligonucleotide
  source 1..23: mol_type = other RNA
ccgccacttcttcaattgaggag

SEQ ID NO: 1830 - RNA, 21 nt, synthetic construct
  misc_feature 1..21: note = Description of Artificial Sequence: Synthetic oligonucleotide
  source 1..21: mol_type = other RNA
cacctcctcaattgaagaagt

SEQ ID NO: 1831 - RNA, 23 nt, synthetic construct
  misc_feature 1..23: note = Description of Artificial Sequence: Synthetic oligonucleotide
  source 1..23: mol_type = other RNA
acttcttcaattgaggaggtggc

SEQ ID NO: 1832 - RNA, 21 nt, synthetic construct
  misc_feature 1..21: note = Description of Artificial Sequence: Synthetic oligonucleotide
  source 1..21: mol_type = other RNA
ccacctcctcaattgaagaag

SEQ ID NO: 1833 - RNA, 23 nt, synthetic construct
  misc_feature 1..23: note = Description of Artificial Sequence: Synthetic oligonucleotide
  source 1..23: mol_type = other RNA
cttcttcaattgaggaggtggcc

SEQ ID NO: 1834 - RNA, 21 nt, synthetic construct
  misc_feature 1..21: note = Description of Artificial Sequence: Synthetic oligonucleotide
  source 1..21: mol_type = other RNA
caagatgtcctcgagatacta

SEQ ID NO: 1835 - RNA, 23 nt, synthetic construct
  misc_feature 1..23: note = Description of Artificial Sequence: Synthetic oligonucleotide
  source 1..23: mol_type = other RNA
tagtatctcgaggacatcttgaa

SEQ ID NO: 1836 - RNA, 21 nt, synthetic construct
  misc_feature 1..21: note = Description of Artificial Sequence: Synthetic oligonucleotide
  source 1..21: mol_type = other RNA
aagatgtcctcgagatactaa

SEQ ID NO: 1837 - RNA, 23 nt, synthetic construct
  misc_feature 1..23: note = Description of Artificial Sequence: Synthetic oligonucleotide
  source 1..23: mol_type = other RNA
ttagtatctcgaggacatcttga

SEQ ID NO: 1838 - RNA, 21 nt, synthetic construct
  misc_feature 1..21: note = Description of Artificial Sequence: Synthetic oligonucleotide
  source 1..21: mol_type = other RNA
tgttcaagatgtcctcgagat

SEQ ID NO: 1839 - RNA, 23 nt, synthetic construct
  misc_feature 1..23: note = Description of Artificial Sequence: Synthetic oligonucleotide
  source 1..23: mol_type = other RNA
atctcgaggacatcttgaacacc

SEQ ID NO: 1840 - RNA, 21 nt, synthetic construct
  misc_feature 1..21: note = Description of Artificial Sequence: Synthetic oligonucleotide
  source 1..21: mol_type = other RNA
gtgttcaagatgtcctcgaga

SEQ ID NO: 1841 - RNA, 23 nt, synthetic construct
  misc_feature 1..23: note = Description of Artificial Sequence: Synthetic oligonucleotide
  source 1..23: mol_type = other RNA
tctcgaggacatcttgaacacct

SEQ ID NO: 1842 - RNA, 21 nt, synthetic construct
  misc_feature 1..21: note = Description of Artificial Sequence: Synthetic oligonucleotide
  source 1..21: mol_type = other RNA
acatgctaaatcagtacttcc

SEQ ID NO: 1843 - RNA, 23 nt, synthetic construct
  misc_feature 1..23: note = Description of Artificial Sequence: Synthetic oligonucleotide
  source 1..23: mol_type = other RNA
ggaagtactgatttagcatgttg

SEQ ID NO: 1844 - RNA, 21 nt, synthetic construct
  misc_feature 1..21: note = Description of Artificial Sequence: Synthetic oligonucleotide
  source 1..21: mol_type = other RNA
catgctaaatcagtacttcca

SEQ ID NO: 1845 - RNA, 23 nt, synthetic construct
  misc_feature 1..23: note = Description of Artificial Sequence: Synthetic oligonucleotide
  source 1..23: mol_type = other RNA
tggaagtactgatttagcatgtt

SEQ ID NO: 1846 - RNA, 21 nt, synthetic construct
  misc_feature 1..21: note = Description of Artificial Sequence: Synthetic oligonucleotide
  source 1..21: mol_type = other RNA
aacaacatgctaaatcagtac

SEQ ID NO: 1847 - RNA, 23 nt, synthetic construct
  misc_feature 1..23: note = Description of Artificial Sequence: Synthetic oligonucleotide
  source 1..23: mol_type = other RNA
gtactgatttagcatgttgttca

SEQ ID NO: 1848 - RNA, 21 nt, synthetic construct
  misc_feature 1..21: note = Description of Artificial Sequence: Synthetic oligonucleotide
  source 1..21: mol_type = other RNA
gaacaacatgctaaatcagta

SEQ ID NO: 1849 - RNA, 23 nt, synthetic construct
  misc_feature 1..23: note = Description of Artificial Sequence: Synthetic oligonucleotide
  source 1..23: mol_type = other RNA
tactgatttagcatgttgttcat

SEQ ID NO: 1850 - RNA, 21 nt, synthetic construct
  misc_feature 1..21: note = Description of Artificial Sequence: Synthetic oligonucleotide
  source 1..21: mol_type = other RNA
gaaaggcactgatgttctgaa

SEQ ID NO: 1851 - RNA, 23 nt, synthetic construct
  misc_feature 1..23: note = Description of Artificial Sequence: Synthetic oligonucleotide
  source 1..23: mol_type = other RNA
ttcagaacatcagtgcctttccg

SEQ ID NO: 1852 - RNA, 21 nt, synthetic construct
  misc_feature 1..21: note = Description of Artificial Sequence: Synthetic oligonucleotide
  source 1..21: mol_type = other RNA
aaaggcactgatgttctgaaa

SEQ ID NO: 1853 - RNA, 23 nt, synthetic construct
  misc_feature 1..23: note = Description of Artificial Sequence: Synthetic oligonucleotide
  source 1..23: mol_type = other RNA
tttcagaacatcagtgcctttcc

SEQ ID NO: 1854 - RNA, 21 nt, synthetic construct
  misc_feature 1..21: note = Description of Artificial Sequence: Synthetic oligonucleotide
  source 1..21: mol_type = other RNA
tgcggaaaggcactgatgttc

SEQ ID NO: 1855 - RNA, 23 nt, synthetic construct
  misc_feature 1..23: note = Description of Artificial Sequence: Synthetic oligonucleotide
  source 1..23: mol_type = other RNA
gaacatcagtgcctttccgcaca

SEQ ID NO: 1856 - RNA, 21 nt, synthetic construct
  misc_feature 1..21: note = Description of Artificial Sequence: Synthetic oligonucleotide
  source 1..21: mol_type = other RNA
gtgcggaaaggcactgatgtt

SEQ ID NO: 1857 - RNA, 23 nt, synthetic construct
  misc_feature 1..23: note = Description of Artificial Sequence: Synthetic oligonucleotide
  source 1..23: mol_type = other RNA
aacatcagtgcctttccgcacac

SEQ ID NO: 1858 - RNA, 21 nt, synthetic construct
  misc_feature 1..21: note = Description of Artificial Sequence: Synthetic oligonucleotide
  source 1..21: mol_type = other RNA
gtcagcatgccaatatgtgtg

SEQ ID NO: 1859 - RNA, 23 nt, synthetic construct
  misc_feature 1..23: note = Description of Artificial Sequence: Synthetic oligonucleotide
  source 1..23: mol_type = other RNA
cacacatattggcatgctgaccc

SEQ ID NO: 1860 - RNA, 21 nt, synthetic construct
  misc_feature 1..21: note = Description of Artificial Sequence: Synthetic oligonucleotide
  source 1..21: mol_type = other RNA
tcagcatgccaatatgtgtgg

SEQ ID NO: 1861 - RNA, 23 nt, synthetic construct
  misc_feature 1..23: note = Description of Artificial Sequence: Synthetic oligonucleotide
  source 1..23: mol_type = other RNA
ccacacatattggcatgctgacc

SEQ ID NO: 1862 - RNA, 21 nt, synthetic construct
  misc_feature 1..21: note = Description of Artificial Sequence: Synthetic oligonucleotide
  source 1..21: mol_type = other RNA
gagggtcagcatgccaatatg

SEQ ID NO: 1863 - RNA, 23 nt, synthetic construct
  misc_feature 1..23: note = Description of Artificial Sequence: Synthetic oligonucleotide
  source 1..23: mol_type = other RNA
catattggcatgctgaccctctg

SEQ ID NO: 1864 - RNA, 21 nt, synthetic construct
  misc_feature 1..21: note = Description of Artificial Sequence: Synthetic oligonucleotide
  source 1..21: mol_type = other RNA
agagggtcagcatgccaatat

SEQ ID NO: 1865 - RNA, 23 nt, synthetic construct
  misc_feature 1..23: note = Description of Artificial Sequence: Synthetic oligonucleotide
  source 1..23: mol_type = other RNA
atattggcatgctgaccctctgt

SEQ ID NO: 1866 - RNA, 21 nt, synthetic construct
  misc_feature 1..21: note = Description of Artificial Sequence: Synthetic oligonucleotide
  source 1..21: mol_type = other RNA
gatgctccggaatgttgctga

SEQ ID NO: 1867 - RNA, 23 nt, synthetic construct
  misc_feature 1..23: note = Description of Artificial Sequence: Synthetic oligonucleotide
  source 1..23: mol_type = other RNA
tcagcaacattccggagcatcct

SEQ ID NO: 1868 - RNA, 21 nt, synthetic construct
  misc_feature 1..21: note = Description of Artificial Sequence: Synthetic oligonucleotide
  source 1..21: mol_type = other RNA
atgctccggaatgttgctgaa

SEQ ID NO: 1869 - RNA, 23 nt, synthetic construct
  misc_feature 1..23: note = Description of Artificial Sequence: Synthetic oligonucleotide
  source 1..23: mol_type = other RNA
ttcagcaacattccggagcatcc

SEQ ID NO: 1870 - RNA, 21 nt, synthetic construct
  misc_feature 1..21: note = Description of Artificial Sequence: Synthetic oligonucleotide
  source 1..21: mol_type = other RNA
caaggatgctccggaatgttg

SEQ ID NO: 1871 - RNA, 23 nt, synthetic construct
  misc_feature 1..23: note = Description of Artificial Sequence: Synthetic oligonucleotide
  source 1..23: mol_type = other RNA
caacattccggagcatccttgga

SEQ ID NO: 1872 - RNA, 21 nt, synthetic construct
  misc_feature 1..21: note = Description of Artificial Sequence: Synthetic oligonucleotide
  source 1..21: mol_type = other RNA
ccaaggatgctccggaatgtt

SEQ ID NO: 1873 - RNA, 23 nt, synthetic construct
  misc_feature 1..23: note = Description of Artificial Sequence: Synthetic oligonucleotide
  source 1..23: mol_type = other RNA
aacattccggagcatccttggat

SEQ ID NO: 1874 - RNA, 21 nt, synthetic construct
  misc_feature 1..21: note = Description of Artificial Sequence: Synthetic oligonucleotide
  source 1..21: mol_type = other RNA
gcgtaacagattcaaactgcc

SEQ ID NO: 1875 - RNA, 23 nt, synthetic construct
  misc_feature 1..23: note = Description of Artificial Sequence: Synthetic oligonucleotide
  source 1..23: mol_type = other RNA
ggcagtttgaatctgttacgcac

SEQ ID NO: 1876 - RNA, 21 nt, synthetic construct
  misc_feature 1..21: note = Description of Artificial Sequence: Synthetic oligonucleotide
  source 1..21: mol_type = other RNA
cgtaacagattcaaactgccg

SEQ ID NO: 1877 - RNA, 23 nt, synthetic construct
  misc_feature 1..23: note = Description of Artificial Sequence: Synthetic oligonucleotide
  source 1..23: mol_type = other RNA
cggcagtttgaatctgttacgca

SEQ ID NO: 1878 - RNA, 21 nt, synthetic construct
  misc_feature 1..21: note = Description of Artificial Sequence: Synthetic oligonucleotide
  source 1..21: mol_type = other RNA
atgtgcgtaacagattcaaac

SEQ ID NO: 1879 - RNA, 23 nt, synthetic construct
  misc_feature 1..23: note = Description of Artificial Sequence: Synthetic oligonucleotide
  source 1..23: mol_type = other RNA
gtttgaatctgttacgcacatca

SEQ ID NO: 1880 - RNA, 21 nt, synthetic construct
  misc_feature 1..21: note = Description of Artificial Sequence: Synthetic oligonucleotide
  source 1..21: mol_type = other RNA
gatgtgcgtaacagattcaaa

SEQ ID NO: 1881 - RNA, 23 nt, synthetic construct
  misc_feature 1..23: note = Description of Artificial Sequence: Synthetic oligonucleotide
  source 1..23: mol_type = other RNA
tttgaatctgttacgcacatcat

SEQ ID NO: 1882 - RNA, 21 nt, synthetic construct
  misc_feature 1..21: note = Description of Artificial Sequence: Synthetic oligonucleotide
  source 1..21: mol_type = other RNA
agagaagatgggctacaaggc

SEQ ID NO: 1883 - RNA, 23 nt, synthetic construct
  misc_feature 1..23: note = Description of Artificial Sequence: Synthetic oligonucleotide
  source 1..23: mol_type = other RNA
gccttgtagcccatcttctctgc

SEQ ID NO: 1884 - RNA, 21 nt, synthetic construct
  misc_feature 1..21: note = Description of Artificial Sequence: Synthetic oligonucleotide
  source 1..21: mol_type = other RNA
gagaagatgggctacaaggcc

SEQ ID NO: 1885 - RNA, 23 nt, synthetic construct
  misc_feature 1..23: note = Description of Artificial Sequence: Synthetic oligonucleotide
  source 1..23: mol_type = other RNA
ggccttgtagcccatcttctctg

SEQ ID NO: 1886 - RNA, 21 nt, synthetic construct
  misc_feature 1..21: note = Description of Artificial Sequence: Synthetic oligonucleotide
  source 1..21: mol_type = other RNA
aggcagagaagatgggctaca

SEQ ID NO: 1887 - RNA, 23 nt, synthetic construct
  misc_feature 1..23: note = Description of Artificial Sequence: Synthetic oligonucleotide
  source 1..23: mol_type = other RNA
tgtagcccatcttctctgcctgc

SEQ ID NO: 1888 - RNA, 21 nt, synthetic construct
  misc_feature 1..21: note = Description of Artificial Sequence: Synthetic oligonucleotide
  source 1..21: mol_type = other RNA
caggcagagaagatgggctac

SEQ ID NO: 1889 - RNA, 23 nt, synthetic construct
  misc_feature 1..23: note = Description of Artificial Sequence: Synthetic oligonucleotide
  source 1..23: mol_type = other RNA
gtagcccatcttctctgcctgcc

SEQ ID NO: 1890 - RNA, 21 nt, synthetic construct
  misc_feature 1..21: note = Description of Artificial Sequence: Synthetic oligonucleotide
  source 1..21: mol_type = other RNA
  modified_base 1: mod_base = OTHER; note = 2'-O-methyladenosine-3'- phosphorothioate
  modified_base 2: mod_base = OTHER; note = 2'-O-methyluridine-3'-phosphorothioate
  modified_base 3: mod_base = OTHER; note = 2'-O-methylguanosine-3'-phosphate
  modified_base 4: mod_base = OTHER; note = 2'-O-methyluridine-3'-phosphate
  modified_base 5: mod_base = OTHER; note = 2'-O-methyladenosine-3'-phosphate
  modified_base 6: mod_base = OTHER; note = 2'-O-methyluridine-3'-phosphate
  modified_base 7: mod_base = OTHER; note = 2'-fluoroguanosine-3'-phosphate
  modified_base 8: mod_base = OTHER; note = 2'-O-methyluridine-3'-phosphate
  modified_base 9: mod_base = OTHER; note = 2'-fluorouridine-3'-phosphate
  modified_base 10: mod_base = OTHER; note = 2'-fluoroadenosine-3'-phosphate
  modified_base 11: mod_base = OTHER; note = 2'-fluorocytidine-3'-phosphate
  modified_base 12: mod_base = OTHER; note = 2'-O-methyluridine-3'-phosphate
  modified_base 13: mod_base = OTHER; note = 2'-O-methyluridine-3'-phosphate
  modified_base 14: mod_base = OTHER; note = 2'-O-methylcytidine-3'-phosphate
  modified_base 15: mod_base = OTHER; note = 2'-O-methyluridine-3'-phosphate
  modified_base 16: mod_base = OTHER; note = 2'-O-methyluridine-3'-phosphate
  modified_base 17: mod_base = OTHER; note = 2'-O-methyladenosine-3'-phosphate
  modified_base 18: mod_base = OTHER; note = 2'-O-methylguanosine-3'-phosphate
  modified_base 19: mod_base = OTHER; note = 2'-O-methyladenosine-3'-phosphate
  modified_base 20: mod_base = OTHER; note = 2'-O-methylguanosine-3'-phosphate
  modified_base 21: mod_base = OTHER; note = 2'-O-methyladenosine-3'-phosphate attached to N-[tris(N-acetylgalactosamine-alkyl)-amidodecanoyl)]-4-hydr oxyprolinol Hyp-(N-acetylgalactosamine-alkyl)3
atgtatgttacttcttagaga

SEQ ID NO: 1891 - RNA, 23 nt, synthetic construct
  misc_feature 1..23: note = Description of Artificial Sequence: Synthetic oligonucleotide
  source 1..23: mol_type = other RNA
  modified_base 1: mod_base = OTHER; note = 2'-O-methyluridine-3'-phosphorothioate
  modified_base 2: mod_base = OTHER; note = 2'-fluorocytidine-3'-phosphorothioate
  modified_base 3: mod_base = OTHER; note = 2'-O-methyluridine-3'-phosphate
  modified_base 4: mod_base = OTHER; note = 2'-O-methylcytidine-3'-phosphate
  modified_base 5: mod_base = OTHER; note = 2'-O-methyluridine-3'-phosphate
  modified_base 6: mod_base = OTHER; note = 2'-fluoroadenosine-3'-phosphate
  modified_base 7: mod_base = OTHER; note = 2'-O-methyladenosine-3'-phosphate
  modified_base 8: mod_base = OTHER; note = 2'-fluoroguanosine-3'-phosphate
  modified_base 9: mod_base = OTHER; note = 2'-fluoroadenosine-3'-phosphate
  modified_base 10: mod_base = OTHER; note = 2'-O-methyladenosine-3'-phosphate
  modified_base 11: mod_base = OTHER; note = 2'-O-methylguanosine-3'-phosphate
  modified_base 12: mod_base = OTHER; note = 2'-O-methyluridine-3'-phosphate
  modified_base 13: mod_base = OTHER; note = 2'-O-methyladenosine-3'-phosphate
  modified_base 14: mod_base = OTHER; note = 2'-fluoroadenosine-3'-phosphate
  modified_base 15: mod_base = OTHER; note = 2'-O-methylcytidine-3'-phosphate
  modified_base 16: mod_base = OTHER; note = 2'-fluoroadenosine-3'-phosphate
  modified_base 17: mod_base = OTHER; note = 2'-O-methyluridine-3'-phosphate
  modified_base 18: mod_base = OTHER; note = 2'-O-methyladenosine-3'-phosphate
  modified_base 19: mod_base = OTHER; note = 2'-O-methylcytidine-3'-phosphate
  modified_base 20: mod_base = OTHER; note = 2'-O-methyladenosine-3'-phosphate
  modified_base 21: mod_base = OTHER; note = 2'-O-methyluridine-3'-phosphorothioate
  modified_base 22: mod_base = OTHER; note = 2'-O-methylcytidine-3'- phosphorothioate
  modified_base 23: mod_base = OTHER; note = 2'-O-methylcytidine-3'-phosphate
tctctaagaagtaacatacatcc

SEQ ID NO: 1892 - RNA, 21 nt, synthetic construct
  misc_feature 1..21: note = Description of Artificial Sequence: Synthetic oligonucleotide
  source 1..21: mol_type = other RNA
  modified_base 1: mod_base = OTHER; note = 2'-O-methyluridine-3'-phosphorothioate
  modified_base 2: mod_base = OTHER; note = 2'-O-methylguanosine-3'- phosphorothioate
  modified_base 3: mod_base = OTHER; note = 2'-O-methyluridine-3'-phosphate
  modified_base 4: mod_base = OTHER; note = 2'-O-methyladenosine-3'-phosphate
  modified_base 5: mod_base = OTHER; note = 2'-O-methyluridine-3'-phosphate
  modified_base 6: mod_base = OTHER; note = 2'-O-methylguanosine-3'-phosphate
  modified_base 7: mod_base = OTHER; note = 2'-fluorouridine-3'-phosphate
  modified_base 8: mod_base = OTHER; note = 2'-O-methyluridine-3'-phosphate
  modified_base 9: mod_base = OTHER; note = 2'-fluoroadenosine-3'-phosphate
  modified_base 10: mod_base = OTHER; note = 2'-fluorocytidine-3'-phosphate
  modified_base 11: mod_base = OTHER; note = 2'-fluorouridine-3'-phosphate
  modified_base 12: mod_base = OTHER; note = 2'-O-methyluridine-3'-phosphate
  modified_base 13: mod_base = OTHER; note = 2'-O-methylcytidine-3'-phosphate
  modified_base 14: mod_base = OTHER; note = 2'-O-methyluridine-3'-phosphate
  modified_base 15: mod_base = OTHER; note = 2'-O-methyluridine-3'-phosphate
  modified_base 16: mod_base = OTHER; note = 2'-O-methyladenosine-3'-phosphate
  modified_base 17: mod_base = OTHER; note = 2'-O-methylguanosine-3'-phosphate
  modified_base 18: mod_base = OTHER; note = 2'-O-methyladenosine-3'-phosphate
  modified_base 19: mod_base = OTHER; note = 2'-O-methylguanosine-3'-phosphate
  modified_base 20: mod_base = OTHER; note = 2'-O-methyladenosine-3'-phosphate
  modified_base 21: mod_base = OTHER; note = 2'-O-methylguanosine-3'-phosphate attached to N-[tris(N-acetylgalactosamine-alkyl)-amidodecanoyl)]-4-hydr oxyprolinol Hyp-(N-acetylgalactosamine-alkyl)3
tgtatgttacttcttagagag

SEQ ID NO: 1893 - RNA, 23 nt, synthetic construct
  misc_feature 1..23: note = Description of Artificial Sequence: Synthetic oligonucleotide
  source 1..23: mol_type = other RNA
  modified_base 1: mod_base = OTHER; note = 2'-O-methylcytidine-3'- phosphorothioate
  modified_base 2: mod_base = OTHER; note = 2'-fluorouridine -3'-phosphorothioate
  modified_base 3: mod_base = OTHER; note = 2'-O-methylcytidine-3'-phosphate
  modified_base 4: mod_base = OTHER; note = 2'-O-methyluridine-3'-phosphate
  modified_base 5: mod_base = OTHER; note = 2'-O-methylcytidine-3'-phosphate
  modified_base 6: mod_base = OTHER; note = 2'-fluorouridine-3'-phosphate
  modified_base 7: mod_base = OTHER; note = 2'-O-methyladenosine-3'-phosphate
  modified_base 8: mod_base = OTHER; note = 2'-fluoroadenosine-3'-phosphate
  modified_base 9: mod_base = OTHER; note = 2'-fluoroguanosine-3'-phosphate
  modified_base 10: mod_base = OTHER; note = 2'-O-methyladenosine-3'-phosphate
  modified_base 11: mod_base = OTHER; note = 2'-O-methyladenosine-3'-phosphate
  modified_base 12: mod_base = OTHER; note = 2'-O-methylguanosine-3'-phosphate
  modified_base 13: mod_base = OTHER; note = 2'-O-methyluridine-3'-phosphate
  modified_base 14: mod_base = OTHER; note = 2'-fluoroadenosine-3'-phosphate
  modified_base 15: mod_base = OTHER; note = 2'-O-methyladenosine-3'-phosphate
  modified_base 16: mod_base = OTHER; note = 2'-fluorocytidine-3'-phosphate
  modified_base 17: mod_base = OTHER; note = 2'-O-methyladenosine-3'-phosphate
  modified_base 18: mod_base = OTHER; note = 2'-O-methyluridine-3'-phosphate
  modified_base 19: mod_base = OTHER; note = 2'-O-methyladenosine-3'-phosphate
  modified_base 20: mod_base = OTHER; note = 2'-O-methylcytidine-3'-phosphate
  modified_base 21: mod_base = OTHER; note = 2'-O-methyladenosine-3'- phosphorothioate
  modified_base 22: mod_base = OTHER; note = 2'-O-methyluridine-3'-phosphorothioate
  modified_base 23: mod_base = OTHER; note = 2'-O-methylcytidine-3'-phosphate
ctctctaagaagtaacatacatc

SEQ ID NO: 1894 - RNA, 21 nt, synthetic construct
  misc_feature 1..21: note = Description of Artificial Sequence: Synthetic oligonucleotide
  source 1..21: mol_type = other RNA
  modified_base 1: mod_base = OTHER; note = 2'-O-methyluridine-3'-phosphorothioate
  modified_base 2: mod_base = OTHER; note = 2'-O-methyladenosine-3'- phosphorothioate
  modified_base 3: mod_base = OTHER; note = 2'-O-methylguanosine-3'-phosphate
  modified_base 4: mod_base = OTHER; note = 2'-O-methylguanosine-3'-phosphate
  modified_base 5: mod_base = OTHER; note = 2'-O-methyladenosine-3'-phosphate
  modified_base 6: mod_base = OTHER; note = 2'-O-methyluridine-3'-phosphate
  modified_base 7: mod_base = OTHER; note = 2'-fluoroguanosine-3'-phosphate
  modified_base 8: mod_base = OTHER; note = 2'-O-methyluridine-3'-phosphate
  modified_base 9: mod_base = OTHER; note = 2'-fluoroadenosine-3'-phosphate
  modified_base 10: mod_base = OTHER; note = 2'-fluorouridine-3'-phosphate
  modified_base 11: mod_base = OTHER; note = 2'-fluoroguanosine-3'-phosphate
  modified_base 12: mod_base = OTHER; note = 2'-O-methyluridine-3'-phosphate
  modified_base 13: mod_base = OTHER; note = 2'-O-methyluridine-3'-phosphate
  modified_base 14: mod_base = OTHER; note = 2'-O-methyladenosine-3'-phosphate
  modified_base 15: mod_base = OTHER; note = 2'-O-methylcytidine-3'-phosphate
  modified_base 16: mod_base = OTHER; note = 2'-O-methyluridine-3'-phosphate
  modified_base 17: mod_base = OTHER; note = 2'-O-methyluridine-3'-phosphate
  modified_base 18: mod_base = OTHER; note = 2'-O-methylcytidine-3'-phosphate
  modified_base 19: mod_base = OTHER; note = 2'-O-methyluridine-3'-phosphate
  modified_base 20: mod_base = OTHER; note = 2'-O-methyluridine-3'-phosphate
  modified_base 21: mod_base = OTHER; note = 2'-O-methyladenosine-3'-phosphate attached to N-[tris(N-acetylgalactosamine-alkyl)-amidodecanoyl)]-4-hydr oxyprolinol Hyp-(N-acetylgalactosamine-alkyl)3
taggatgtatgttacttctta

SEQ ID NO: 1895 - RNA, 23 nt, synthetic construct
  misc_feature 1..23: note = Description of Artificial Sequence: Synthetic oligonucleotide
  source 1..23: mol_type = other RNA
  modified_base 1: mod_base = OTHER; note = 2'-O-methyluridine-3'-phosphorothioate
  modified_base 2: mod_base = OTHER; note = 2'-fluoroadenosine-3'-phosphorothioate
  modified_base 3: mod_base = OTHER; note = 2'-O-methyladenosine-3'-phosphate
  modified_base 4: mod_base = OTHER; note = 2'-O-methylguanosine-3'-phosphate
  modified_base 5: mod_base = OTHER; note = 2'-O-methyladenosine-3'-phosphate
  modified_base 6: mod_base = OTHER; note = 2'-fluoroadenosine-3'-phosphate
  modified_base 7: mod_base = OTHER; note = 2'-O-methylguanosine-3'-phosphate
  modified_base 8: mod_base = OTHER; note = 2'-fluorouridine-3'-phosphate
  modified_base 9: mod_base = OTHER; note = 2'-fluoroadenosine-3'-phosphate
  modified_base 10: mod_base = OTHER; note = 2'-O-methyladenosine-3'-phosphate
  modified_base 11: mod_base = OTHER; note = 2'-O-methylcytidine-3'-phosphate
  modified_base 12: mod_base = OTHER; note = 2'-O-methyladenosine-3'-phosphate
  modified_base 13: mod_base = OTHER; note = 2'-O-methyluridine-3'-phosphate
  modified_base 14: mod_base = OTHER; note = 2'-fluoroadenosine-3'-phosphate
  modified_base 15: mod_base = OTHER; note = 2'-O-methylcytidine-3'-phosphate
  modified_base 16: mod_base = OTHER; note = 2'-fluoroadenosine-3'-phosphate
  modified_base 17: mod_base = OTHER; note = 2'-O-methyluridine-3'-phosphate
  modified_base 18: mod_base = OTHER; note = 2'-O-methylcytidine-3'-phosphate
  modified_base 19: mod_base = OTHER; note = 2'-O-methylcytidine-3'-phosphate
  modified_base 20: mod_base = OTHER; note = 2'-O-methyluridine-3'-phosphate
  modified_base 21: mod_base = OTHER; note = 2'-O-methyladenosine-3'- phosphorothioate
  modified_base 22: mod_base = OTHER; note = 2'-O-methyladenosine-3'- phosphorothioate
  modified_base 23: mod_base = OTHER; note = 2'-O-methyladenosine-3'-phosphate
taagaagtaacatacatcctaaa

SEQ ID NO: 1896 - RNA, 21 nt, synthetic construct
  misc_feature 1..21: note = Description of Artificial Sequence: Synthetic oligonucleotide
  source 1..21: mol_type = other RNA
  modified_base 1: mod_base = OTHER; note = 2'-O-methyluridine-3'-phosphorothioate
  modified_base 2: mod_base = OTHER; note = 2'-O-methyluridine-3'-phosphorothioate
  modified_base 3: mod_base = OTHER; note = 2'-O-methyladenosine-3'-phosphate
  modified_base 4: mod_base = OTHER; note = 2'-O-methylguanosine-3'-phosphate
  modified_base 5: mod_base = OTHER; note = 2'-O-methylguanosine-3'-phosphate
  modified_base 6: mod_base = OTHER; note = 2'-O-methyladenosine-3'-phosphate
  modified_base 7: mod_base = OTHER; note = 2'-fluorouridine-3'-phosphate
  modified_base 8: mod_base = OTHER; note = 2'-O-methylguanosine-3'-phosphate
  modified_base 9: mod_base = OTHER; note = 2'-fluorouridine-3'-phosphate
  modified_base 10: mod_base = OTHER; note = 2'-fluoroadenosine-3'-phosphate
  modified_base 11: mod_base = OTHER; note = 2'-fluorouridine-3'-phosphate
  modified_base 12: mod_base = OTHER; note = 2'-O-methylguanosine-3'-phosphate
  modified_base 13: mod_base = OTHER; note = 2'-O-methyluridine-3'-phosphate
  modified_base 14: mod_base = OTHER; note = 2'-O-methyluridine-3'-phosphate
  modified_base 15: mod_base = OTHER; note = 2'-O-methyladenosine-3'-phosphate
  modified_base 16: mod_base = OTHER; note = 2'-O-methylcytidine-3'-phosphate
  modified_base 17: mod_base = OTHER; note = 2'-O-methyluridine-3'-phosphate
  modified_base 18: mod_base = OTHER; note = 2'-O-methyluridine-3'-phosphate
  modified_base 19: mod_base = OTHER; note = 2'-O-methylcytidine-3'-phosphate
  modified_base 20: mod_base = OTHER; note = 2'-O-methyluridine-3'-phosphate
  modified_base 21: mod_base = OTHER; note = 2'-O-methyluridine-3'-phosphate attached to N-[tris(N-acetylgalactosamine-alkyl)-amidodecanoyl)]-4-hydr oxyprolinol Hyp-(N-acetylgalactosamine-alkyl)3
ttaggatgtatgttacttctt

SEQ ID NO: 1897 - RNA, 23 nt, synthetic construct
  misc_feature 1..23: note = Description of Artificial Sequence: Synthetic oligonucleotide
  source 1..23: mol_type = other RNA
  modified_base 1: mod_base = OTHER; note = 2'-O-methyladenosine-3'- phosphorothioate
  modified_base 2: mod_base = OTHER; note = 2'-fluoroadenosine-3'-phosphorothioate
  modified_base 3: mod_base = OTHER; note = 2'-O-methylguanosine-3'-phosphate
  modified_base 4: mod_base = OTHER; note = 2'-O-methyladenosine-3'-phosphate
  modified_base 5: mod_base = OTHER; note = 2'-O-methyladenosine-3'-phosphate
  modified_base 6: mod_base = OTHER; note = 2'-fluoroguanosine-3'-phosphate
  modified_base 7: mod_base = OTHER; note = 2'-O-methyluridine-3'-phosphate
  modified_base 8: mod_base = OTHER; note = 2'-fluoroadenosine-3'-phosphate
  modified_base 9: mod_base = OTHER; note = 2'-fluoroadenosine-3'-phosphate
  modified_base 10: mod_base = OTHER; note = 2'-O-methylcytidine-3'-phosphate
  modified_base 11: mod_base = OTHER; note = 2'-O-methyladenosine-3'-phosphate
  modified_base 12: mod_base = OTHER; note = 2'-O-methyluridine-3'-phosphate
  modified_base 13: mod_base = OTHER; note = 2'-O-methyladenosine-3'-phosphate
  modified_base 14: mod_base = OTHER; note = 2'-fluorocytidine-3'-phosphate
  modified_base 15: mod_base = OTHER; note = 2'-O-methyladenosine-3'-phosphate
  modified_base 16: mod_base = OTHER; note = 2'-fluorouridine-3'-phosphate
  modified_base 17: mod_base = OTHER; note = 2'-O-methylcytidine-3'-phosphate
  modified_base 18: mod_base = OTHER; note = 2'-O-methylcytidine-3'-phosphate
  modified_base 19: mod_base = OTHER; note = 2'-O-methyluridine-3'-phosphate
  modified_base 20: mod_base = OTHER; note = 2'-O-methyladenosine-3'-phosphate
  modified_base 21: mod_base = OTHER; note = 2'-O-methyladenosine-3'- phosphorothioate
  modified_base 22: mod_base = OTHER; note = 2'-O-methyladenosine-3'- phosphorothioate
  modified_base 23: mod_base = OTHER; note = 2'-O-methyladenosine-3'-phosphate
aagaagtaacatacatcctaaaa

SEQ ID NO: 1898 - RNA, 21 nt, synthetic construct
  misc_feature 1..21: note = Description of Artificial Sequence: Synthetic oligonucleotide
  source 1..21: mol_type = other RNA
  modified_base 1: mod_base = OTHER; note = 2'-O-methyladenosine-3'- phosphorothioate
  modified_base 2: mod_base = OTHER; note = 2'-O-methylguanosine-3'- phosphorothioate
  modified_base 3: mod_base = OTHER; note = 2'-O-methyladenosine-3'-phosphate
  modified_base 4: mod_base = OTHER; note = 2'-O-methyladenosine-3'-phosphate
  modified_base 5: mod_base = OTHER; note = 2'-O-methyladenosine-3'-phosphate
  modified_base 6: mod_base = OTHER; note = 2'-O-methylguanosine-3'-phosphate
  modified_base 7: mod_base = OTHER; note = 2'-fluoroguanosine-3'-phosphate
  modified_base 8: mod_base = OTHER; note = 2'-O-methyluridine-3'-phosphate
  modified_base 9: mod_base = OTHER; note = 2'-fluoroguanosine-3'-phosphate
  modified_base 10: mod_base = OTHER; note = 2'-fluorouridine-3'-phosphate
  modified_base 11: mod_base = OTHER; note = 2'-fluorouridine-3'-phosphate
  modified_base 12: mod_base = OTHER; note = 2'-O-methylcytidine-3'-phosphate
  modified_base 13: mod_base = OTHER; note = 2'-O-methyladenosine-3'-phosphate
  modified_base 14: mod_base = OTHER; note = 2'-O-methyladenosine-3'-phosphate
  modified_base 15: mod_base = OTHER; note = 2'-O-methylguanosine-3'-phosphate
  modified_base 16: mod_base = OTHER; note = 2'-O-methyladenosine-3'-phosphate
  modified_base 17: mod_base = OTHER; note = 2'-O-methyluridine-3'-phosphate
  modified_base 18: mod_base = OTHER; note = 2'-O-methylguanosine-3'-phosphate
  modified_base 19: mod_base = OTHER; note = 2'-O-methyluridine-3'-phosphate
  modified_base 20: mod_base = OTHER; note = 2'-O-methylcytidine-3'-phosphate
  modified_base 21: mod_base = OTHER; note = 2'-O-methylcytidine-3'-phosphate attached to N-[tris(N-acetylgalactosamine-alkyl)-amidodecanoyl)]-4-hydr oxyprolinol Hyp-(N-acetylgalactosamine-alkyl)3
agaaaggtgttcaagatgtcc

SEQ ID NO: 1899 - RNA, 23 nt, synthetic construct
  misc_feature 1..23: note = Description of Artificial Sequence: Synthetic oligonucleotide
  source 1..23: mol_type = other RNA
  modified_base 1: mod_base = OTHER; note = 2'-O-methylguanosine-3'- phosphorothioate
  modified_base 2: mod_base = OTHER; note = 2'-fluoroguanosine-3'-phosphorothioate
  modified_base 3: mod_base = OTHER; note = 2'-O-methyladenosine-3'-phosphate
  modified_base 4: mod_base = OTHER; note = 2'-O-methylcytidine-3'-phosphate
  modified_base 5: mod_base = OTHER; note = 2'-O-methyladenosine-3'-phosphate
  modified_base 6: mod_base = OTHER; note = 2'-fluorouridine-3'-phosphate
  modified_base 7: mod_base = OTHER; note = 2'-O-methylcytidine-3'-phosphate
  modified_base 8: mod_base = OTHER; note = 2'-fluorouridine-3'-phosphate
  modified_base 9: mod_base = OTHER; note = 2'-fluorouridine-3'-phosphate
  modified_base 10: mod_base = OTHER; note = 2'-O-methylguanosine-3'-phosphate
  modified_base 11: mod_base = OTHER; note = 2'-O-methyladenosine-3'-phosphate
  modified_base 12: mod_base = OTHER; note = 2'-O-methyladenosine-3'-phosphate
  modified_base 13: mod_base = OTHER; note = 2'-O-methylcytidine-3'-phosphate
  modified_base 14: mod_base = OTHER; note = 2'-fluoroadenosine-3'-phosphate
  modified_base 15: mod_base = OTHER; note = 2'-O-methylcytidine-3'-phosphate
  modified_base 16: mod_base = OTHER; note = 2'-fluorocytidine-3'-phosphate
  modified_base 17: mod_base = OTHER; note = 2'-O-methyluridine-3'-phosphate
  modified_base 18: mod_base = OTHER; note = 2'-O-methyluridine-3'-phosphate
  modified_base 19: mod_base = OTHER; note = 2'-O-methyluridine-3'-phosphate
  modified_base 20: mod_base = OTHER; note = 2'-O-methylcytidine-3'-phosphate
  modified_base 21: mod_base = OTHER; note = 2'-O-methyluridine-3'-phosphorothioate
  modified_base 22: mod_base = OTHER; note = 2'-O-methylcytidine-3'- phosphorothioate
  modified_base 23: mod_base = OTHER; note = 2'-O-methylcytidine-3'-phosphate
ggacatcttgaacacctttctcc

SEQ ID NO: 1900 - RNA, 21 nt, synthetic construct
  misc_feature 1..21: note = Description of Artificial Sequence: Synthetic oligonucleotide
  source 1..21: mol_type = other RNA
  modified_base 1: mod_base = OTHER; note = 2'-O-methylguanosine-3'- phosphorothioate
  modified_base 2: mod_base = OTHER; note = 2'-O-methyladenosine-3'- phosphorothioate
  modified_base 3: mod_base = OTHER; note = 2'-O-methyladenosine-3'-phosphate
  modified_base 4: mod_base = OTHER; note = 2'-O-methyladenosine-3'-phosphate
  modified_base 5: mod_base = OTHER; note = 2'-O-methylguanosine-3'-phosphate
  modified_base 6: mod_base = OTHER; note = 2'-O-methylguanosine-3'-phosphate
  modified_base 7: mod_base = OTHER; note = 2'-fluorouridine-3'-phosphate
  modified_base 8: mod_base = OTHER; note = 2'-O-methylguanosine-3'-phosphate
  modified_base 9: mod_base = OTHER; note = 2'-fluorouridine-3'-phosphate
  modified_base 10: mod_base = OTHER; note = 2'-fluorouridine-3'-phosphate
  modified_base 11: mod_base = OTHER; note = 2'-fluorocytidine-3'-phosphate
  modified_base 12: mod_base = OTHER; note = 2'-O-methyladenosine-3'-phosphate
  modified_base 13: mod_base = OTHER; note = 2'-O-methyladenosine-3'-phosphate
  modified_base 14: mod_base = OTHER; note = 2'-O-methylguanosine-3'-phosphate
  modified_base 15: mod_base = OTHER; note = 2'-O-methyladenosine-3'-phosphate
  modified_base 16: mod_base = OTHER; note = 2'-O-methyluridine-3'-phosphate
  modified_base 17: mod_base = OTHER; note = 2'-O-methylguanosine-3'-phosphate
  modified_base 18: mod_base = OTHER; note = 2'-O-methyluridine-3'-phosphate
  modified_base 19: mod_base = OTHER; note = 2'-O-methylcytidine-3'-phosphate
  modified_base 20: mod_base = OTHER; note = 2'-O-methylcytidine-3'-phosphate
  modified_base 21: mod_base = OTHER; note = 2'-O-methyluridine-3'-phosphate attached to N-[tris(N-acetylgalactosamine-alkyl)-amidodecanoyl)]-4-hydr oxyprolinol Hyp-(N-acetylgalactosamine-alkyl)3
gaaaggtgttcaagatgtcct

SEQ ID NO: 1901 - RNA, 23 nt, synthetic construct
  misc_feature 1..23: note = Description of Artificial Sequence: Synthetic oligonucleotide
  source 1..23: mol_type = other RNA
  modified_base 1: mod_base = OTHER; note = 2'-O-methyladenosine-3'- phosphorothioate
  modified_base 2: mod_base = OTHER; note = 2'-fluoroguanosine-3'-phosphorothioate
  modified_base 3: mod_base = OTHER; note = 2'-O-methylguanosine-3'-phosphate
  modified_base 4: mod_base = OTHER; note = 2'-O-methyladenosine-3'-phosphate
  modified_base 5: mod_base = OTHER; note = 2'-O-methylcytidine-3'-phosphate
  modified_base 6: mod_base = OTHER; note = 2'-fluoroadenosine-3'-phosphate
  modified_base 7: mod_base = OTHER; note = 2'-O-methyluridine-3'-phosphate
  modified_base 8: mod_base = OTHER; note = 2'-fluorocytidine-3'-phosphate
  modified_base 9: mod_base = OTHER; note = 2'-fluorouridine-3'-phosphate
  modified_base 10: mod_base = OTHER; note = 2'-O-methyluridine-3'-phosphate
  modified_base 11: mod_base = OTHER; note = 2'-O-methylguanosine-3'-phosphate
  modified_base 12: mod_base = OTHER; note = 2'-O-methyladenosine-3'-phosphate
  modified_base 13: mod_base = OTHER; note = 2'-O-methyladenosine-3'-phosphate
  modified_base 14: mod_base = OTHER; note = 2'-fluorocytidine-3'-phosphate
  modified_base 15: mod_base = OTHER; note = 2'-O-methyladenosine-3'-phosphate
  modified_base 16: mod_base = OTHER; note = 2'-fluorocytidine-3'-phosphate
  modified_base 17: mod_base = OTHER; note = 2'-O-methylcytidine-3'-phosphate
  modified_base 18: mod_base = OTHER; note = 2'-O-methyluridine-3'-phosphate
  modified_base 19: mod_base = OTHER; note = 2'-O-methyluridine-3'-phosphate
  modified_base 20: mod_base = OTHER; note = 2'-O-methyluridine-3'-phosphate
  modified_base 21: mod_base = OTHER; note = 2'-O-methylcytidine-3'- phosphorothioate
  modified_base 22: mod_base = OTHER; note = 2'-O-methyluridine-3'-phosphorothioate
  modified_base 23: mod_base = OTHER; note = 2'-O-methylcytidine-3'-phosphate
aggacatcttgaacacctttctc

SEQ ID NO: 1902 - RNA, 21 nt, synthetic construct
  misc_feature 1..21: note = Description of Artificial Sequence: Synthetic oligonucleotide
  source 1..21: mol_type = other RNA
  modified_base 1: mod_base = OTHER; note = 2'-O-methylguanosine-3'- phosphorothioate
  modified_base 2: mod_base = OTHER; note = 2'-O-methylguanosine-3'- phosphorothioate
  modified_base 3: mod_base = OTHER; note = 2'-O-methylguanosine-3'-phosphate
  modified_base 4: mod_base = OTHER; note = 2'-O-methylguanosine-3'-phosphate
  modified_base 5: mod_base = OTHER; note = 2'-O-methyladenosine-3'-phosphate
  modified_base 6: mod_base = OTHER; note = 2'-O-methylguanosine-3'-phosphate
  modified_base 7: mod_base = OTHER; note = 2'-fluoroadenosine-3'-phosphate
  modified_base 8: mod_base = OTHER; note = 2'-O-methyladenosine-3'-phosphate
  modified_base 9: mod_base = OTHER; note = 2'-fluoroadenosine-3'-phosphate
  modified_base 10: mod_base = OTHER; note = 2'-fluoroguanosine-3'-phosphate
  modified_base 11: mod_base = OTHER; note = 2'-fluoroguanosine-3'-phosphate
  modified_base 12: mod_base = OTHER; note = 2'-O-methyluridine-3'-phosphate
  modified_base 13: mod_base = OTHER; note = 2'-O-methylguanosine-3'-phosphate
  modified_base 14: mod_base = OTHER; note = 2'-O-methyluridine-3'-phosphate
  modified_base 15: mod_base = OTHER; note = 2'-O-methyluridine-3'-phosphate
  modified_base 16: mod_base = OTHER; note = 2'-O-methylcytidine-3'-phosphate
  modified_base 17: mod_base = OTHER; note = 2'-O-methyladenosine-3'-phosphate
  modified_base 18: mod_base = OTHER; note = 2'-O-methyladenosine-3'-phosphate
  modified_base 19: mod_base = OTHER; note = 2'-O-methylguanosine-3'-phosphate
  modified_base 20: mod_base = OTHER; note = 2'-O-methyladenosine-3'-phosphate
  modified_base 21: mod_base = OTHER; note = 2'-O-methyluridine-3'-phosphate attached to N-[tris(N-acetylgalactosamine-alkyl)-amidodecanoyl)]-4-hydr oxyprolinol Hyp-(N-acetylgalactosamine-alkyl)3
ggggagaaaggtgttcaagat

SEQ ID NO: 1903 - RNA, 23 nt, synthetic construct
  misc_feature 1..23: note = Description of Artificial Sequence: Synthetic oligonucleotide
  source 1..23: mol_type = other RNA
  modified_base 1: mod_base = OTHER; note = 2'-O-methyladenosine-3'- phosphorothioate
  modified_base 2: mod_base = OTHER; note = 2'-fluorouridine -3'-phosphorothioate
  modified_base 3: mod_base = OTHER; note = 2'-O-methylcytidine-3'-phosphate
  modified_base 4: mod_base = OTHER; note = 2'-O-methyluridine-3'-phosphate
  modified_base 5: mod_base = OTHER; note = 2'-O-methyluridine-3'-phosphate
  modified_base 6: mod_base = OTHER; note = 2'-fluoroguanosine-3'-phosphate
  modified_base 7: mod_base = OTHER; note = 2'-O-methyladenosine-3'-phosphate
  modified_base 8: mod_base = OTHER; note = 2'-fluoroadenosine-3'-phosphate
  modified_base 9: mod_base = OTHER; note = 2'-fluorocytidine-3'-phosphate
  modified_base 10: mod_base = OTHER; note = 2'-O-methyladenosine-3'-phosphate
  modified_base 11: mod_base = OTHER; note = 2'-O-methylcytidine-3'-phosphate
  modified_base 12: mod_base = OTHER; note = 2'-O-methylcytidine-3'-phosphate
  modified_base 13: mod_base = OTHER; note = 2'-O-methyluridine-3'-phosphate
  modified_base 14: mod_base = OTHER; note = 2'-fluorouridine-3'-phosphate
  modified_base 15: mod_base = OTHER; note = 2'-O-methyluridine-3'-phosphate
  modified_base 16: mod_base = OTHER; note = 2'-fluorocytidine-3'-phosphate
  modified_base 17: mod_base = OTHER; note = 2'-O-methyluridine-3'-phosphate
  modified_base 18: mod_base = OTHER; note = 2'-O-methylcytidine-3'-phosphate
  modified_base 19: mod_base = OTHER; note = 2'-O-methylcytidine-3'-phosphate
  modified_base 20: mod_base = OTHER; note = 2'-O-methylcytidine-3'-phosphate
  modified_base 21: mod_base = OTHER; note = 2'-O-methylcytidine-3'- phosphorothioate
  modified_base 22: mod_base = OTHER; note = 2'-O-methylcytidine-3'- phosphorothioate
  modified_base 23: mod_base = OTHER; note = 2'-O-methyluridine-3'-phosphate
atcttgaacacctttctccccct

SEQ ID NO: 1904 - RNA, 21 nt, synthetic construct
  misc_feature 1..21: note = Description of Artificial Sequence: Synthetic oligonucleotide
  source 1..21: mol_type = other RNA
  modified_base 1: mod_base = OTHER; note = 2'-O-methylguanosine-3'- phosphorothioate
  modified_base 2: mod_base = OTHER; note = 2'-O-methylguanosine-3'- phosphorothioate
  modified_base 3: mod_base = OTHER; note = 2'-O-methylguanosine-3'-phosphate
  modified_base 4: mod_base = OTHER; note = 2'-O-methylguanosine-3'-phosphate
  modified_base 5: mod_base = OTHER; note = 2'-O-methylguanosine-3'-phosphate
  modified_base 6: mod_base = OTHER; note = 2'-O-methyladenosine-3'-phosphate
  modified_base 7: mod_base = OTHER; note = 2'-fluoroguanosine-3'-phosphate
  modified_base 8: mod_base = OTHER; note = 2'-O-methyladenosine-3'-phosphate
  modified_base 9: mod_base = OTHER; note = 2'-fluoroadenosine-3'-phosphate
  modified_base 10: mod_base = OTHER; note = 2'-fluoroadenosine-3'-phosphate
  modified_base 11: mod_base = OTHER; note = 2'-fluoroguanosine-3'-phosphate
  modified_base 12: mod_base = OTHER; note = 2'-O-methylguanosine-3'-phosphate
  modified_base 13: mod_base = OTHER; note = 2'-O-methyluridine-3'-phosphate
  modified_base 14: mod_base = OTHER; note = 2'-O-methylguanosine-3'-phosphate
  modified_base 15: mod_base = OTHER; note = 2'-O-methyluridine-3'-phosphate
  modified_base 16: mod_base = OTHER; note = 2'-O-methyluridine-3'-phosphate
  modified_base 17: mod_base = OTHER; note = 2'-O-methylcytidine-3'-phosphate
  modified_base 18: mod_base = OTHER; note = 2'-O-methyladenosine-3'-phosphate
  modified_base 19: mod_base = OTHER; note = 2'-O-methyladenosine-3'-phosphate
  modified_base 20: mod_base = OTHER; note = 2'-O-methylguanosine-3'-phosphate
  modified_base 21: mod_base = OTHER; note = 2'-O-methyladenosine-3'-phosphate attached to N-[tris(N-acetylgalactosamine-alkyl)-amidodecanoyl)]-4-hydr oxyprolinol Hyp-(N-acetylgalactosamine-alkyl)3
gggggagaaaggtgttcaaga

SEQ ID NO: 1905 - RNA, 23 nt, synthetic construct
  misc_feature 1..23: note = Description of Artificial Sequence: Synthetic oligonucleotide
  source 1..23: mol_type = other RNA
  modified_base 1: mod_base = OTHER; note = 2'-O-methyluridine-3'-phosphorothioate
  modified_base 2: mod_base = OTHER; note = 2'-fluorocytidine-3'-phosphorothioate
  modified_base 3: mod_base = OTHER; note = 2'-O-methyluridine-3'-phosphate
  modified_base 4: mod_base = OTHER; note = 2'-O-methyluridine-3'-phosphate
  modified_base 5: mod_base = OTHER; note = 2'-O-methylguanosine-3'-phosphate
  modified_base 6: mod_base = OTHER; note = 2'-fluoroadenosine-3'-phosphate
  modified_base 7: mod_base = OTHER; note = 2'-O-methyladenosine-3'-phosphate
  modified_base 8: mod_base = OTHER; note = 2'-fluorocytidine-3'-phosphate
  modified_base 9: mod_base = OTHER; note = 2'-fluoroadenosine-3'-phosphate
  modified_base 10: mod_base = OTHER; note = 2'-O-methylcytidine-3'-phosphate
  modified_base 11: mod_base = OTHER; note = 2'-O-methylcytidine-3'-phosphate
  modified_base 12: mod_base = OTHER; note = 2'-O-methyluridine-3'-phosphate
  modified_base 13: mod_base = OTHER; note = 2'-O-methyluridine-3'-phosphate
  modified_base 14: mod_base = OTHER; note = 2'-fluorouridine-3'-phosphate
  modified_base 15: mod_base = OTHER; note = 2'-O-methylcytidine-3'-phosphate
  modified_base 16: mod_base = OTHER; note = 2'-fluorouridine-3'-phosphate
  modified_base 17: mod_base = OTHER; note = 2'-O-methylcytidine-3'-phosphate
  modified_base 18: mod_base = OTHER; note = 2'-O-methylcytidine-3'-phosphate
  modified_base 19: mod_base = OTHER; note = 2'-O-methylcytidine-3'-phosphate
  modified_base 20: mod_base = OTHER; note = 2'-O-methylcytidine-3'-phosphate
  modified_base 21: mod_base = OTHER; note = 2'-O-methylcytidine-3'- phosphorothioate
  modified_base 22: mod_base = OTHER; note = 2'-O-methyluridine-3'-phosphorothioate
  modified_base 23: mod_base = OTHER; note = 2'-O-methylguanosine-3'-phosphate
tcttgaacacctttctccccctg

SEQ ID NO: 1906 - RNA, 21 nt, synthetic construct
  misc_feature 1..21: note = Description of Artificial Sequence: Synthetic oligonucleotide
  source 1..21: mol_type = other RNA
  modified_base 1: mod_base = OTHER; note = 2'-O-methyladenosine-3'- phosphorothioate
  modified_base 2: mod_base = OTHER; note = 2'-O-methylguanosine-3'- phosphorothioate
  modified_base 3: mod_base = OTHER; note = 2'-O-methyladenosine-3'-phosphate
  modified_base 4: mod_base = OTHER; note = 2'-O-methyladenosine-3'-phosphate
  modified_base 5: mod_base = OTHER; note = 2'-O-methyladenosine-3'-phosphate
  modified_base 6: mod_base = OTHER; note = 2'-O-methylcytidine-3'-phosphate
  modified_base 7: mod_base = OTHER; note = 2'-fluorouridine-3'-phosphate
  modified_base 8: mod_base = OTHER; note = 2'-O-methyluridine-3'-phosphate
  modified_base 9: mod_base = OTHER; note = 2'-fluorouridine-3'-phosphate
  modified_base 10: mod_base = OTHER; note = 2'-fluoroguanosine-3'-phosphate
  modified_base 11: mod_base = OTHER; note = 2'-fluoroguanosine-3'-phosphate
  modified_base 12: mod_base = OTHER; note = 2'-O-methylcytidine-3'-phosphate
  modified_base 13: mod_base = OTHER; note = 2'-O-methyluridine-3'-phosphate
  modified_base 14: mod_base = OTHER; note = 2'-O-methylguanosine-3'-phosphate
  modified_base 15: mod_base = OTHER; note = 2'-O-methyladenosine-3'-phosphate
  modified_base 16: mod_base = OTHER; note = 2'-O-methyluridine-3'-phosphate
  modified_base 17: mod_base = OTHER; note = 2'-O-methyladenosine-3'-phosphate
  modified_base 18: mod_base = OTHER; note = 2'-O-methyladenosine-3'-phosphate
  modified_base 19: mod_base = OTHER; note = 2'-O-methyluridine-3'-phosphate
  modified_base 20: mod_base = OTHER; note = 2'-O-methyladenosine-3'-phosphate
  modified_base 21: mod_base = OTHER; note = 2'-O-methyluridine-3'-phosphate attached to N-[tris(N-acetylgalactosamine-alkyl)-amidodecanoyl)]-4-hydr oxyprolinol Hyp-(N-acetylgalactosamine-alkyl)3
agaaactttggctgataatat

SEQ ID NO: 1907 - RNA, 23 nt, synthetic construct
  misc_feature 1..23: note = Description of Artificial Sequence: Synthetic oligonucleotide
  source 1..23: mol_type = other RNA
  modified_base 1: mod_base = OTHER; note = 2'-O-methyladenosine-3'- phosphorothioate
  modified_base 2: mod_base = OTHER; note = 2'-fluorouridine -3'-phosphorothioate
  modified_base 3: mod_base = OTHER; note = 2'-O-methyladenosine-3'-phosphate
  modified_base 4: mod_base = OTHER; note = 2'-O-methyluridine-3'-phosphate
  modified_base 5: mod_base = OTHER; note = 2'-O-methyluridine-3'-phosphate
  modified_base 6: mod_base = OTHER; note = 2'-fluoroadenosine-3'-phosphate
  modified_base 7: mod_base = OTHER; note = 2'-O-methyluridine-3'-phosphate
  modified_base 8: mod_base = OTHER; note = 2'-fluorocytidine-3'-phosphate
  modified_base 9: mod_base = OTHER; note = 2'-fluoroadenosine-3'-phosphate
  modified_base 10: mod_base = OTHER; note = 2'-O-methylguanosine-3'-phosphate
  modified_base 11: mod_base = OTHER; note = 2'-O-methylcytidine-3'-phosphate
  modified_base 12: mod_base = OTHER; note = 2'-O-methylcytidine-3'-phosphate
  modified_base 13: mod_base = OTHER; note = 2'-O-methyladenosine-3'-phosphate
  modified_base 14: mod_base = OTHER; note = 2'-fluoroadenosine-3'-phosphate
  modified_base 15: mod_base = OTHER; note = 2'-O-methyladenosine-3'-phosphate
  modified_base 16: mod_base = OTHER; note = 2'-fluoroguanosine-3'-phosphate
  modified_base 17: mod_base = OTHER; note = 2'-O-methyluridine-3'-phosphate
  modified_base 18: mod_base = OTHER; note = 2'-O-methyluridine-3'-phosphate
  modified_base 19: mod_base = OTHER; note = 2'-O-methyluridine-3'-phosphate
  modified_base 20: mod_base = OTHER; note = 2'-O-methylcytidine-3'-phosphate
  modified_base 21: mod_base = OTHER; note = 2'-O-methyluridine-3'-phosphorothioate
  modified_base 22: mod_base = OTHER; note = 2'-O-methyluridine-3'-phosphorothioate
  modified_base 23: mod_base = OTHER; note = 2'-O-methylcytidine-3'-phosphate
atattatcagccaaagtttcttc

SEQ ID NO: 1908 - RNA, 21 nt, synthetic construct
  misc_feature 1..21: note = Description of Artificial Sequence: Synthetic oligonucleotide
  source 1..21: mol_type = other RNA
  modified_base 1: mod_base = OTHER; note = 2'-O-methylguanosine-3'- phosphorothioate
  modified_base 2: mod_base = OTHER; note = 2'-O-methyladenosine-3'- phosphorothioate
  modified_base 3: mod_base = OTHER; note = 2'-O-methyladenosine-3'-phosphate
  modified_base 4: mod_base = OTHER; note = 2'-O-methyladenosine-3'-phosphate
  modified_base 5: mod_base = OTHER; note = 2'-O-methylcytidine-3'-phosphate
  modified_base 6: mod_base = OTHER; note = 2'-O-methyluridine-3'-phosphate
  modified_base 7: mod_base = OTHER; note = 2'-fluorouridine-3'-phosphate
  modified_base 8: mod_base = OTHER; note = 2'-O-methyluridine-3'-phosphate
  modified_base 9: mod_base = OTHER; note = 2'-fluoroguanosine-3'-phosphate
  modified_base 10: mod_base = OTHER; note = 2'-fluoroguanosine-3'-phosphate
  modified_base 11: mod_base = OTHER; note = 2'-fluorocytidine-3'-phosphate
  modified_base 12: mod_base = OTHER; note = 2'-O-methyluridine-3'-phosphate
  modified_base 13: mod_base = OTHER; note = 2'-O-methylguanosine-3'-phosphate
  modified_base 14: mod_base = OTHER; note = 2'-O-methyladenosine-3'-phosphate
  modified_base 15: mod_base = OTHER; note = 2'-O-methyluridine-3'-phosphate
  modified_base 16: mod_base = OTHER; note = 2'-O-methyladenosine-3'-phosphate
  modified_base 17: mod_base = OTHER; note = 2'-O-methyladenosine-3'-phosphate
  modified_base 18: mod_base = OTHER; note = 2'-O-methyluridine-3'-phosphate
  modified_base 19: mod_base = OTHER; note = 2'-O-methyladenosine-3'-phosphate
  modified_base 20: mod_base = OTHER; note = 2'-O-methyluridine-3'-phosphate
  modified_base 21: mod_base = OTHER; note = 2'-O-methyluridine-3'-phosphate attached to N-[tris(N-acetylgalactosamine-alkyl)-amidodecanoyl)]-4-hydr oxyprolinol Hyp-(N-acetylgalactosamine-alkyl)3
gaaactttggctgataatatt

SEQ ID NO: 1909 - RNA, 23 nt, synthetic construct
  misc_feature 1..23: note = Description of Artificial Sequence: Synthetic oligonucleotide
  source 1..23: mol_type = other RNA
  modified_base 1: mod_base = OTHER; note = 2'-O-methyladenosine-3'- phosphorothioate
  modified_base 2: mod_base = OTHER; note = 2'-fluoroadenosine-3'-phosphorothioate
  modified_base 3: mod_base = OTHER; note = 2'-O-methyluridine-3'-phosphate
  modified_base 4: mod_base = OTHER; note = 2'-O-methyladenosine-3'-phosphate
  modified_base 5: mod_base = OTHER; note = 2'-O-methyluridine-3'-phosphate
  modified_base 6: mod_base = OTHER; note = 2'-fluorouridine-3'-phosphate
  modified_base 7: mod_base = OTHER; note = 2'-O-methyladenosine-3'-phosphate
  modified_base 8: mod_base = OTHER; note = 2'-fluorouridine-3'-phosphate
  modified_base 9: mod_base = OTHER; note = 2'-fluorocytidine-3'-phosphate
  modified_base 10: mod_base = OTHER; note = 2'-O-methyladenosine-3'-phosphate
  modified_base 11: mod_base = OTHER; note = 2'-O-methylguanosine-3'-phosphate
  modified_base 12: mod_base = OTHER; note = 2'-O-methylcytidine-3'-phosphate
  modified_base 13: mod_base = OTHER; note = 2'-O-methylcytidine-3'-phosphate
  modified_base 14: mod_base = OTHER; note = 2'-fluoroadenosine-3'-phosphate
  modified_base 15: mod_base = OTHER; note = 2'-O-methyladenosine-3'-phosphate
  modified_base 16: mod_base = OTHER; note = 2'-fluoroadenosine-3'-phosphate
  modified_base 17: mod_base = OTHER; note = 2'-O-methylguanosine-3'-phosphate
  modified_base 18: mod_base = OTHER; note = 2'-O-methyluridine-3'-phosphate
  modified_base 19: mod_base = OTHER; note = 2'-O-methyluridine-3'-phosphate
  modified_base 20: mod_base = OTHER; note = 2'-O-methyluridine-3'-phosphate
  modified_base 21: mod_base = OTHER; note = 2'-O-methylcytidine-3'- phosphorothioate
  modified_base 22: mod_base = OTHER; note = 2'-O-methyluridine-3'-phosphorothioate
  modified_base 23: mod_base = OTHER; note = 2'-O-methyluridine-3'-phosphate
aatattatcagccaaagtttctt

SEQ ID NO: 1910 - RNA, 21 nt, synthetic construct
  misc_feature 1..21: note = Description of Artificial Sequence: Synthetic oligonucleotide
  source 1..21: mol_type = other RNA
  modified_base 1: mod_base = OTHER; note = 2'-O-methyladenosine-3'- phosphorothioate
  modified_base 2: mod_base = OTHER; note = 2'-O-methyluridine-3'-phosphorothioate
  modified_base 3: mod_base = OTHER; note = 2'-O-methylguanosine-3'-phosphate
  modified_base 4: mod_base = OTHER; note = 2'-O-methyladenosine-3'-phosphate
  modified_base 5: mod_base = OTHER; note = 2'-O-methyladenosine-3'-phosphate
  modified_base 6: mod_base = OTHER; note = 2'-O-methylguanosine-3'-phosphate
  modified_base 7: mod_base = OTHER; note = 2'-fluoroadenosine-3'-phosphate
  modified_base 8: mod_base = OTHER; note = 2'-O-methyladenosine-3'-phosphate
  modified_base 9: mod_base = OTHER; note = 2'-fluoroadenosine-3'-phosphate
  modified_base 10: mod_base = OTHER; note = 2'-fluorocytidine-3'-phosphate
  modified_base 11: mod_base = OTHER; note = 2'-fluorouridine-3'-phosphate
  modified_base 12: mod_base = OTHER; note = 2'-O-methyluridine-3'-phosphate
  modified_base 13: mod_base = OTHER; note = 2'-O-methyluridine-3'-phosphate
  modified_base 14: mod_base = OTHER; note = 2'-O-methylguanosine-3'-phosphate
  modified_base 15: mod_base = OTHER; note = 2'-O-methylguanosine-3'-phosphate
  modified_base 16: mod_base = OTHER; note = 2'-O-methylcytidine-3'-phosphate
  modified_base 17: mod_base = OTHER; note = 2'-O-methyluridine-3'-phosphate
  modified_base 18: mod_base = OTHER; note = 2'-O-methylguanosine-3'-phosphate
  modified_base 19: mod_base = OTHER; note = 2'-O-methyladenosine-3'-phosphate
  modified_base 20: mod_base = OTHER; note = 2'-O-methyluridine-3'-phosphate
  modified_base 21: mod_base = OTHER; note = 2'-O-methyladenosine-3'-phosphate attached to N-[tris(N-acetylgalactosamine-alkyl)-amidodecanoyl)]-4-hydr oxyprolinol Hyp-(N-acetylgalactosamine-alkyl)3
atgaagaaactttggctgata

SEQ ID NO: 1911 - RNA, 23 nt, synthetic construct
  misc_feature 1..23: note = Description of Artificial Sequence: Synthetic oligonucleotide
  source 1..23: mol_type = other RNA
  modified_base 1: mod_base = OTHER; note = 2'-O-methyluridine-3'-phosphorothioate
  modified_base 2: mod_base = OTHER; note = 2'-fluoroadenosine-3'-phosphorothioate
  modified_base 3: mod_base = OTHER; note = 2'-O-methyluridine-3'-phosphate
  modified_base 4: mod_base = OTHER; note = 2'-O-methylcytidine-3'-phosphate
  modified_base 5: mod_base = OTHER; note = 2'-O-methyladenosine-3'-phosphate
  modified_base 6: mod_base = OTHER; note = 2'-fluoroguanosine-3'-phosphate
  modified_base 7: mod_base = OTHER; note = 2'-O-methylcytidine-3'-phosphate
  modified_base 8: mod_base = OTHER; note = 2'-fluorocytidine-3'-phosphate
  modified_base 9: mod_base = OTHER; note = 2'-fluoroadenosine-3'-phosphate
  modified_base 10: mod_base = OTHER; note = 2'-O-methyladenosine-3'-phosphate
  modified_base 11: mod_base = OTHER; note = 2'-O-methyladenosine-3'-phosphate
  modified_base 12: mod_base = OTHER; note = 2'-O-methylguanosine-3'-phosphate
  modified_base 13: mod_base = OTHER; note = 2'-O-methyluridine-3'-phosphate
  modified_base 14: mod_base = OTHER; note = 2'-fluorouridine-3'-phosphate
  modified_base 15: mod_base = OTHER; note = 2'-O-methyluridine-3'-phosphate
  modified_base 16: mod_base = OTHER; note = 2'-fluorocytidine-3'-phosphate
  modified_base 17: mod_base = OTHER; note = 2'-O-methyluridine-3'-phosphate
  modified_base 18: mod_base = OTHER; note = 2'-O-methyluridine-3'-phosphate
  modified_base 19: mod_base = OTHER; note = 2'-O-methylcytidine-3'-phosphate
  modified_base 20: mod_base = OTHER; note = 2'-O-methyladenosine-3'-phosphate
  modified_base 21: mod_base = OTHER; note = 2'-O-methyluridine-3'-phosphorothioate
  modified_base 22: mod_base = OTHER; note = 2'-O-methylcytidine-3'- phosphorothioate
  modified_base 23: mod_base = OTHER; note = 2'-O-methyladenosine-3'-phosphate
tatcagccaaagtttcttcatca

SEQ ID NO: 1912 - RNA, 21 nt, synthetic construct
  misc_feature 1..21: note = Description of Artificial Sequence: Synthetic oligonucleotide
  source 1..21: mol_type = other RNA
  modified_base 1: mod_base = OTHER; note = 2'-O-methylguanosine-3'- phosphorothioate
  modified_base 2: mod_base = OTHER; note = 2'-O-methyladenosine-3'- phosphorothioate
  modified_base 3: mod_base = OTHER; note = 2'-O-methyluridine-3'-phosphate
  modified_base 4: mod_base = OTHER; note = 2'-O-methylguanosine-3'-phosphate
  modified_base 5: mod_base = OTHER; note = 2'-O-methyladenosine-3'-phosphate
  modified_base 6: mod_base = OTHER; note = 2'-O-methyladenosine-3'-phosphate
  modified_base 7: mod_base = OTHER; note = 2'-fluoroguanosine-3'-phosphate
  modified_base 8: mod_base = OTHER; note = 2'-O-methyladenosine-3'-phosphate
  modified_base 9: mod_base = OTHER; note = 2'-fluoroadenosine-3'-phosphate
  modified_base 10: mod_base = OTHER; note = 2'-fluoroadenosine-3'-phosphate
  modified_base 11: mod_base = OTHER; note = 2'-fluorocytidine-3'-phosphate
  modified_base 12: mod_base = OTHER; note = 2'-O-methyluridine-3'-phosphate
  modified_base 13: mod_base = OTHER; note = 2'-O-methyluridine-3'-phosphate
  modified_base 14: mod_base = OTHER; note = 2'-O-methyluridine-3'-phosphate
  modified_base 15: mod_base = OTHER; note = 2'-O-methylguanosine-3'-phosphate
  modified_base 16: mod_base = OTHER; note = 2'-O-methylguanosine-3'-phosphate
  modified_base 17: mod_base = OTHER; note = 2'-O-methylcytidine-3'-phosphate
  modified_base 18: mod_base = OTHER; note = 2'-O-methyluridine-3'-phosphate
  modified_base 19: mod_base = OTHER; note = 2'-O-methylguanosine-3'-phosphate
  modified_base 20: mod_base = OTHER; note = 2'-O-methyladenosine-3'-phosphate
  modified_base 21: mod_base = OTHER; note = 2'-O-methyluridine-3'-phosphate attached to N-[tris(N-acetylgalactosamine-alkyl)-amidodecanoyl)]-4-hydr oxyprolinol Hyp-(N-acetylgalactosamine-alkyl)3
gatgaagaaactttggctgat

SEQ ID NO: 1913 - RNA, 23 nt, synthetic construct
  misc_feature 1..23: note = Description of Artificial Sequence: Synthetic oligonucleotide
  source 1..23: mol_type = other RNA
  modified_base 1: mod_base = OTHER; note = 2'-O-methyladenosine-3'- phosphorothioate
  modified_base 2: mod_base = OTHER; note = 2'-fluorouridine -3'-phosphorothioate
  modified_base 3: mod_base = OTHER; note = 2'-O-methylcytidine-3'-phosphate
  modified_base 4: mod_base = OTHER; note = 2'-O-methyladenosine-3'-phosphate
  modified_base 5: mod_base = OTHER; note = 2'-O-methylguanosine-3'-phosphate
  modified_base 6: mod_base = OTHER; note = 2'-fluorocytidine-3'-phosphate
  modified_base 7: mod_base = OTHER; note = 2'-O-methylcytidine-3'-phosphate
  modified_base 8: mod_base = OTHER; note = 2'-fluoroadenosine-3'-phosphate
  modified_base 9: mod_base = OTHER; note = 2'-fluoroadenosine-3'-phosphate
  modified_base 10: mod_base = OTHER; note = 2'-O-methyladenosine-3'-phosphate
  modified_base 11: mod_base = OTHER; note = 2'-O-methylguanosine-3'-phosphate
  modified_base 12: mod_base = OTHER; note = 2'-O-methyluridine-3'-phosphate
  modified_base 13: mod_base = OTHER; note = 2'-O-methyluridine-3'-phosphate
  modified_base 14: mod_base = OTHER; note = 2'-fluorouridine-3'-phosphate
  modified_base 15: mod_base = OTHER; note = 2'-O-methylcytidine-3'-phosphate
  modified_base 16: mod_base = OTHER; note = 2'-fluorouridine-3'-phosphate
  modified_base 17: mod_base = OTHER; note = 2'-O-methyluridine-3'-phosphate
  modified_base 18: mod_base = OTHER; note = 2'-O-methylcytidine-3'-phosphate
  modified_base 19: mod_base = OTHER; note = 2'-O-methyladenosine-3'-phosphate
  modified_base 20: mod_base = OTHER; note = 2'-O-methyluridine-3'-phosphate
  modified_base 21: mod_base = OTHER; note = 2'-O-methylcytidine-3'- phosphorothioate
  modified_base 22: mod_base = OTHER; note = 2'-O-methyladenosine-3'- phosphorothioate
  modified_base 23: mod_base = OTHER; note = 2'-O-methyluridine-3'-phosphate
atcagccaaagtttcttcatcat

SEQ ID NO: 1914 - RNA, 21 nt, synthetic construct
  misc_feature 1..21: note = Description of Artificial Sequence: Synthetic oligonucleotide
  source 1..21: mol_type = other RNA
  modified_base 1: mod_base = OTHER; note = 2'-O-methyladenosine-3'- phosphorothioate
  modified_base 2: mod_base = OTHER; note = 2'-O-methyladenosine-3'- phosphorothioate
  modified_base 3: mod_base = OTHER; note = 2'-O-methylguanosine-3'-phosphate
  modified_base 4: mod_base = OTHER; note = 2'-O-methylguanosine-3'-phosphate
  modified_base 5: mod_base = OTHER; note = 2'-O-methylcytidine-3'-phosphate
  modified_base 6: mod_base = OTHER; note = 2'-O-methyladenosine-3'-phosphate
  modified_base 7: mod_base = OTHER; note = 2'-fluorocytidine-3'-phosphate
  modified_base 8: mod_base = OTHER; note = 2'-O-methyluridine-3'-phosphate
  modified_base 9: mod_base = OTHER; note = 2'-fluoroguanosine-3'-phosphate
  modified_base 10: mod_base = OTHER; note = 2'-fluoroadenosine-3'-phosphate
  modified_base 11: mod_base = OTHER; note = 2'-fluorouridine-3'-phosphate
  modified_base 12: mod_base = OTHER; note = 2'-O-methylguanosine-3'-phosphate
  modified_base 13: mod_base = OTHER; note = 2'-O-methyluridine-3'-phosphate
  modified_base 14: mod_base = OTHER; note = 2'-O-methyluridine-3'-phosphate
  modified_base 15: mod_base = OTHER; note = 2'-O-methylcytidine-3'-phosphate
  modified_base 16: mod_base = OTHER; note = 2'-O-methyluridine-3'-phosphate
  modified_base 17: mod_base = OTHER; note = 2'-O-methylguanosine-3'-phosphate
  modified_base 18: mod_base = OTHER; note = 2'-O-methyladenosine-3'-phosphate
  modified_base 19: mod_base = OTHER; note = 2'-O-methyladenosine-3'-phosphate
  modified_base 20: mod_base = OTHER; note = 2'-O-methyladenosine-3'-phosphate
  modified_base 21: mod_base = OTHER; note = 2'-O-methylguanosine-3'-phosphate attached to N-[tris(N-acetylgalactosamine-alkyl)-amidodecanoyl)]-4-hydr oxyprolinol Hyp-(N-acetylgalactosamine-alkyl)3
aaggcactgatgttctgaaag

SEQ ID NO: 1915 - RNA, 23 nt, synthetic construct
  misc_feature 1..23: note = Description of Artificial Sequence: Synthetic oligonucleotide
  source 1..23: mol_type = other RNA
  modified_base 1: mod_base = OTHER; note = 2'-O-methylcytidine-3'- phosphorothioate
  modified_base 2: mod_base = OTHER; note = 2'-fluorouridine -3'-phosphorothioate
  modified_base 3: mod_base = OTHER; note = 2'-O-methyluridine-3'-phosphate
  modified_base 4: mod_base = OTHER; note = 2'-O-methyluridine-3'-phosphate
  modified_base 5: mod_base = OTHER; note = 2'-O-methylcytidine-3'-phosphate
  modified_base 6: mod_base = OTHER; note = 2'-fluoroadenosine-3'-phosphate
  modified_base 7: mod_base = OTHER; note = 2'-O-methylguanosine-3'-phosphate
  modified_base 8: mod_base = OTHER; note = 2'-fluoroadenosine-3'-phosphate
  modified_base 9: mod_base = OTHER; note = 2'-fluoroadenosine-3'-phosphate
  modified_base 10: mod_base = OTHER; note = 2'-O-methylcytidine-3'-phosphate
  modified_base 11: mod_base = OTHER; note = 2'-O-methyladenosine-3'-phosphate
  modified_base 12: mod_base = OTHER; note = 2'-O-methyluridine-3'-phosphate
  modified_base 13: mod_base = OTHER; note = 2'-O-methylcytidine-3'-phosphate
  modified_base 14: mod_base = OTHER; note = 2'-fluoroadenosine-3'-phosphate
  modified_base 15: mod_base = OTHER; note = 2'-O-methylguanosine-3'-phosphate
  modified_base 16: mod_base = OTHER; note = 2'-fluorouridine-3'-phosphate
  modified_base 17: mod_base = OTHER; note = 2'-O-methylguanosine-3'-phosphate
  modified_base 18: mod_base = OTHER; note = 2'-O-methylcytidine-3'-phosphate
  modified_base 19: mod_base = OTHER; note = 2'-O-methylcytidine-3'-phosphate
  modified_base 20: mod_base = OTHER; note = 2'-O-methyluridine-3'-phosphate
  modified_base 21: mod_base = OTHER; note = 2'-O-methyluridine-3'-phosphorothioate
  modified_base 22: mod_base = OTHER; note = 2'-O-methyluridine-3'-phosphorothioate
  modified_base 23: mod_base = OTHER; note = 2'-O-methylcytidine-3'-phosphate
ctttcagaacatcagtgcctttc

SEQ ID NO: 1916 - RNA, 21 nt, synthetic construct
  misc_feature 1..21: note = Description of Artificial Sequence: Synthetic oligonucleotide
  source 1..21: mol_type = other RNA
  modified_base 1: mod_base = OTHER; note = 2'-O-methyladenosine-3'- phosphorothioate
  modified_base 2: mod_base = OTHER; note = 2'-O-methylguanosine-3'- phosphorothioate
  modified_base 3: mod_base = OTHER; note = 2'-O-methylguanosine-3'-phosphate
  modified_base 4: mod_base = OTHER; note = 2'-O-methylcytidine-3'-phosphate
  modified_base 5: mod_base = OTHER; note = 2'-O-methyladenosine-3'-phosphate
  modified_base 6: mod_base = OTHER; note = 2'-O-methylcytidine-3'-phosphate
  modified_base 7: mod_base = OTHER; note = 2'-fluorouridine-3'-phosphate
  modified_base 8: mod_base = OTHER; note = 2'-O-methylguanosine-3'-phosphate
  modified_base 9: mod_base = OTHER; note = 2'-fluoroadenosine-3'-phosphate
  modified_base 10: mod_base = OTHER; note = 2'-fluorouridine-3'-phosphate
  modified_base 11: mod_base = OTHER; note = 2'-fluoroguanosine-3'-phosphate
  modified_base 12: mod_base = OTHER; note = 2'-O-methyluridine-3'-phosphate
  modified_base 13: mod_base = OTHER; note = 2'-O-methyluridine-3'-phosphate
  modified_base 14: mod_base = OTHER; note = 2'-O-methylcytidine-3'-phosphate
  modified_base 15: mod_base = OTHER; note = 2'-O-methyluridine-3'-phosphate
  modified_base 16: mod_base = OTHER; note = 2'-O-methylguanosine-3'-phosphate
  modified_base 17: mod_base = OTHER; note = 2'-O-methyladenosine-3'-phosphate
  modified_base 18: mod_base = OTHER; note = 2'-O-methyladenosine-3'-phosphate
  modified_base 19: mod_base = OTHER; note = 2'-O-methyladenosine-3'-phosphate
  modified_base 20: mod_base = OTHER; note = 2'-O-methylguanosine-3'-phosphate
  modified_base 21: mod_base = OTHER; note = 2'-O-methylcytidine-3'-phosphate attached to N-[tris(N-acetylgalactosamine-alkyl)-amidodecanoyl)]-4-hydr oxyprolinol Hyp-(N-acetylgalactosamine-alkyl)3
aggcactgatgttctgaaagc

SEQ ID NO: 1917 - RNA, 23 nt, synthetic construct
  misc_feature 1..23: note = Description of Artificial Sequence: Synthetic oligonucleotide
  source 1..23: mol_type = other RNA
  modified_base 1: mod_base = OTHER; note = 2'-O-methylguanosine-3'- phosphorothioate
  modified_base 2: mod_base = OTHER; note = 2'-fluorocytidine-3'-phosphorothioate
  modified_base 3: mod_base = OTHER; note = 2'-O-methyluridine-3'-phosphate
  modified_base 4: mod_base = OTHER; note = 2'-O-methyluridine-3'-phosphate
  modified_base 5: mod_base = OTHER; note = 2'-O-methyluridine-3'-phosphate
  modified_base 6: mod_base = OTHER; note = 2'-fluorocytidine-3'-phosphate
  modified_base 7: mod_base = OTHER; note = 2'-O-methyladenosine-3'-phosphate
  modified_base 8: mod_base = OTHER; note = 2'-fluoroguanosine-3'-phosphate
  modified_base 9: mod_base = OTHER; note = 2'-fluoroadenosine-3'-phosphate
  modified_base 10: mod_base = OTHER; note = 2'-O-methyladenosine-3'-phosphate
  modified_base 11: mod_base = OTHER; note = 2'-O-methylcytidine-3'-phosphate
  modified_base 12: mod_base = OTHER; note = 2'-O-methyladenosine-3'-phosphate
  modified_base 13: mod_base = OTHER; note = 2'-O-methyluridine-3'-phosphate
  modified_base 14: mod_base = OTHER; note = 2'-fluorocytidine-3'-phosphate
  modified_base 15: mod_base = OTHER; note = 2'-O-methyladenosine-3'-phosphate
  modified_base 16: mod_base = OTHER; note = 2'-fluoroguanosine-3'-phosphate
  modified_base 17: mod_base = OTHER; note = 2'-O-methyluridine-3'-phosphate
  modified_base 18: mod_base = OTHER; note = 2'-O-methylguanosine-3'-phosphate
  modified_base 19: mod_base = OTHER; note = 2'-O-methylcytidine-3'-phosphate
  modified_base 20: mod_base = OTHER; note = 2'-O-methylcytidine-3'-phosphate
  modified_base 21: mod_base = OTHER; note = 2'-O-methyluridine-3'-phosphorothioate
  modified_base 22: mod_base = OTHER; note = 2'-O-methyluridine-3'-phosphorothioate
  modified_base 23: mod_base = OTHER; note = 2'-O-methyluridine-3'-phosphate
gctttcagaacatcagtgccttt

SEQ ID NO: 1918 - RNA, 21 nt, synthetic construct
  misc_feature 1..21: note = Description of Artificial Sequence: Synthetic oligonucleotide
  source 1..21: mol_type = other RNA
  modified_base 1: mod_base = OTHER; note = 2'-O-methylcytidine-3'- phosphorothioate
  modified_base 2: mod_base = OTHER; note = 2'-O-methylguanosine-3'- phosphorothioate
  modified_base 3: mod_base = OTHER; note = 2'-O-methylguanosine-3'-phosphate
  modified_base 4: mod_base = OTHER; note = 2'-O-methyladenosine-3'-phosphate
  modified_base 5: mod_base = OTHER; note = 2'-O-methyladenosine-3'-phosphate
  modified_base 6: mod_base = OTHER; note = 2'-O-methyladenosine-3'-phosphate
  modified_base 7: mod_base = OTHER; note = 2'-fluoroguanosine-3'-phosphate
  modified_base 8: mod_base = OTHER; note = 2'-O-methylguanosine-3'-phosphate
  modified_base 9: mod_base = OTHER; note = 2'-fluorocytidine-3'-phosphate
  modified_base 10: mod_base = OTHER; note = 2'-fluoroadenosine-3'-phosphate
  modified_base 11: mod_base = OTHER; note = 2'-fluorocytidine-3'-phosphate
  modified_base 12: mod_base = OTHER; note = 2'-O-methyluridine-3'-phosphate
  modified_base 13: mod_base = OTHER; note = 2'-O-methylguanosine-3'-phosphate
  modified_base 14: mod_base = OTHER; note = 2'-O-methyladenosine-3'-phosphate
  modified_base 15: mod_base = OTHER; note = 2'-O-methyluridine-3'-phosphate
  modified_base 16: mod_base = OTHER; note = 2'-O-methylguanosine-3'-phosphate
  modified_base 17: mod_base = OTHER; note = 2'-O-methyluridine-3'-phosphate
  modified_base 18: mod_base = OTHER; note = 2'-O-methyluridine-3'-phosphate
  modified_base 19: mod_base = OTHER; note = 2'-O-methylcytidine-3'-phosphate
  modified_base 20: mod_base = OTHER; note = 2'-O-methyluridine-3'-phosphate
  modified_base 21: mod_base = OTHER; note = 2'-O-methylguanosine-3'-phosphate attached to N-[tris(N-acetylgalactosamine-alkyl)-amidodecanoyl)]-4-hydr oxyprolinol Hyp-(N-acetylgalactosamine-alkyl)3
cggaaaggcactgatgttctg

SEQ ID NO: 1919 - RNA, 23 nt, synthetic construct
  misc_feature 1..23: note = Description of Artificial Sequence: Synthetic oligonucleotide
  source 1..23: mol_type = other RNA
  modified_base 1: mod_base = OTHER; note = 2'-O-methylcytidine-3'- phosphorothioate
  modified_base 2: mod_base = OTHER; note = 2'-fluoroadenosine-3'-phosphorothioate
  modified_base 3: mod_base = OTHER; note = 2'-O-methylguanosine-3'-phosphate
  modified_base 4: mod_base = OTHER; note = 2'-O-methyladenosine-3'-phosphate
  modified_base 5: mod_base = OTHER; note = 2'-O-methyladenosine-3'-phosphate
  modified_base 6: mod_base = OTHER; note = 2'-fluorocytidine-3'-phosphate
  modified_base 7: mod_base = OTHER; note = 2'-O-methyladenosine-3'-phosphate
  modified_base 8: mod_base = OTHER; note = 2'-fluorouridine-3'-phosphate
  modified_base 9: mod_base = OTHER; note = 2'-fluorocytidine-3'-phosphate
  modified_base 10: mod_base = OTHER; note = 2'-O-methyladenosine-3'-phosphate
  modified_base 11: mod_base = OTHER; note = 2'-O-methylguanosine-3'-phosphate
  modified_base 12: mod_base = OTHER; note = 2'-O-methyluridine-3'-phosphate
  modified_base 13: mod_base = OTHER; note = 2'-O-methylguanosine-3'-phosphate
  modified_base 14: mod_base = OTHER; note = 2'-fluorocytidine-3'-phosphate
  modified_base 15: mod_base = OTHER; note = 2'-O-methylcytidine-3'-phosphate
  modified_base 16: mod_base = OTHER; note = 2'-fluorouridine-3'-phosphate
  modified_base 17: mod_base = OTHER; note = 2'-O-methyluridine-3'-phosphate
  modified_base 18: mod_base = OTHER; note = 2'-O-methyluridine-3'-phosphate
  modified_base 19: mod_base = OTHER; note = 2'-O-methylcytidine-3'-phosphate
  modified_base 20: mod_base = OTHER; note = 2'-O-methylcytidine-3'-phosphate
  modified_base 21: mod_base = OTHER; note = 2'-O-methylguanosine-3'- phosphorothioate
  modified_base 22: mod_base = OTHER; note = 2'-O-methylcytidine-3'- phosphorothioate
  modified_base 23: mod_base = OTHER; note = 2'-O-methyladenosine-3'-phosphate
cagaacatcagtgcctttccgca

SEQ ID NO: 1920 - RNA, 21 nt, synthetic construct
  misc_feature 1..21: note = Description of Artificial Sequence: Synthetic oligonucleotide
  source 1..21: mol_type = other RNA
  modified_base 1: mod_base = OTHER; note = 2'-O-methylguanosine-3'- phosphorothioate
  modified_base 2: mod_base = OTHER; note = 2'-O-methylcytidine-3'- phosphorothioate
  modified_base 3: mod_base = OTHER; note = 2'-O-methylguanosine-3'-phosphate
  modified_base 4: mod_base = OTHER; note = 2'-O-methylguanosine-3'-phosphate
  modified_base 5: mod_base = OTHER; note = 2'-O-methyladenosine-3'-phosphate
  modified_base 6: mod_base = OTHER; note = 2'-O-methyladenosine-3'-phosphate
  modified_base 7: mod_base = OTHER; note = 2'-fluoroadenosine-3'-phosphate
  modified_base 8: mod_base = OTHER; note = 2'-O-methylguanosine-3'-phosphate
  modified_base 9: mod_base = OTHER; note = 2'-fluoroguanosine-3'-phosphate
  modified_base 10: mod_base = OTHER; note = 2'-fluorocytidine-3'-phosphate
  modified_base 11: mod_base = OTHER; note = 2'-fluoroadenosine-3'-phosphate
  modified_base 12: mod_base = OTHER; note = 2'-O-methylcytidine-3'-phosphate
  modified_base 13: mod_base = OTHER; note = 2'-O-methyluridine-3'-phosphate
  modified_base 14: mod_base = OTHER; note = 2'-O-methylguanosine-3'-phosphate
  modified_base 15: mod_base = OTHER; note = 2'-O-methyladenosine-3'-phosphate
  modified_base 16: mod_base = OTHER; note = 2'-O-methyluridine-3'-phosphate
  modified_base 17: mod_base = OTHER; note = 2'-O-methylguanosine-3'-phosphate
  modified_base 18: mod_base = OTHER; note = 2'-O-methyluridine-3'-phosphate
  modified_base 19: mod_base = OTHER; note = 2'-O-methyluridine-3'-phosphate
  modified_base 20: mod_base = OTHER; note = 2'-O-methylcytidine-3'-phosphate
  modified_base 21: mod_base = OTHER; note = 2'-O-methyluridine-3'-phosphate attached to N-[tris(N-acetylgalactosamine-alkyl)-amidodecanoyl)]-4-hydr oxyprolinol Hyp-(N-acetylgalactosamine-alkyl)3
gcggaaaggcactgatgttct

SEQ ID NO: 1921 - RNA, 23 nt, synthetic construct
  misc_feature 1..23: note = Description of Artificial Sequence: Synthetic oligonucleotide
  source 1..23: mol_type = other RNA
  modified_base 1: mod_base = OTHER; note = 2'-O-methyladenosine-3'- phosphorothioate
  modified_base 2: mod_base = OTHER; note = 2'-fluoroguanosine-3'-phosphorothioate
  modified_base 3: mod_base = OTHER; note = 2'-O-methyladenosine-3'-phosphate
  modified_base 4: mod_base = OTHER; note = 2'-O-methyladenosine-3'-phosphate
  modified_base 5: mod_base = OTHER; note = 2'-O-methylcytidine-3'-phosphate
  modified_base 6: mod_base = OTHER; note = 2'-fluoroadenosine-3'-phosphate
  modified_base 7: mod_base = OTHER; note = 2'-O-methyluridine-3'-phosphate
  modified_base 8: mod_base = OTHER; note = 2'-fluorocytidine-3'-phosphate
  modified_base 9: mod_base = OTHER; note = 2'-fluoroadenosine-3'-phosphate
  modified_base 10: mod_base = OTHER; note = 2'-O-methylguanosine-3'-phosphate
  modified_base 11: mod_base = OTHER; note = 2'-O-methyluridine-3'-phosphate
  modified_base 12: mod_base = OTHER; note = 2'-O-methylguanosine-3'-phosphate
  modified_base 13: mod_base = OTHER; note = 2'-O-methylcytidine-3'-phosphate
  modified_base 14: mod_base = OTHER; note = 2'-fluorocytidine-3'-phosphate
  modified_base 15: mod_base = OTHER; note = 2'-O-methyluridine-3'-phosphate
  modified_base 16: mod_base = OTHER; note = 2'-fluorouridine-3'-phosphate
  modified_base 17: mod_base = OTHER; note = 2'-O-methyluridine-3'-phosphate
  modified_base 18: mod_base = OTHER; note = 2'-O-methylcytidine-3'-phosphate
  modified_base 19: mod_base = OTHER; note = 2'-O-methylcytidine-3'-phosphate
  modified_base 20: mod_base = OTHER; note = 2'-O-methylguanosine-3'-phosphate
  modified_base 21: mod_base = OTHER; note = 2'-O-methylcytidine-3'- phosphorothioate
  modified_base 22: mod_base = OTHER; note = 2'-O-methyladenosine-3'- phosphorothioate
  modified_base 23: mod_base = OTHER; note = 2'-O-methylcytidine-3'-phosphate
agaacatcagtgcctttccgcac

SEQ ID NO: 1922 - RNA, 21 nt, synthetic construct
  misc_feature 1..21: note = Description of Artificial Sequence: Synthetic oligonucleotide
  source 1..21: mol_type = other RNA
  modified_base 1: mod_base = OTHER; note = 2'-O-methyladenosine-3'- phosphorothioate
  modified_base 2: mod_base = OTHER; note = 2'-O-methylguanosine-3'- phosphorothioate
  modified_base 3: mod_base = OTHER; note = 2'-O-methyladenosine-3'-phosphate
  modified_base 4: mod_base = OTHER; note = 2'-O-methyladenosine-3'-phosphate
  modified_base 5: mod_base = OTHER; note = 2'-O-methylguanosine-3'-phosphate
  modified_base 6: mod_base = OTHER; note = 2'-O-methyladenosine-3'-phosphate
  modified_base 7: mod_base = OTHER; note = 2'-fluorocytidine-3'-phosphate
  modified_base 8: mod_base = OTHER; note = 2'-O-methyluridine-3'-phosphate
  modified_base 9: mod_base = OTHER; note = 2'-fluoroguanosine-3'-phosphate
  modified_base 10: mod_base = OTHER; note = 2'-fluoroadenosine-3'-phosphate
  modified_base 11: mod_base = OTHER; note = 2'-fluorocytidine-3'-phosphate
  modified_base 12: mod_base = OTHER; note = 2'-O-methyladenosine-3'-phosphate
  modified_base 13: mod_base = OTHER; note = 2'-O-methyluridine-3'-phosphate
  modified_base 14: mod_base = OTHER; note = 2'-O-methylcytidine-3'-phosphate
  modified_base 15: mod_base = OTHER; note = 2'-O-methyladenosine-3'-phosphate
  modified_base 16: mod_base = OTHER; note = 2'-O-methyluridine-3'-phosphate
  modified_base 17: mod_base = OTHER; note = 2'-O-methyluridine-3'-phosphate
  modified_base 18: mod_base = OTHER; note = 2'-O-methylguanosine-3'-phosphate
  modified_base 19: mod_base = OTHER; note = 2'-O-methylcytidine-3'-phosphate
  modified_base 20: mod_base = OTHER; note = 2'-O-methylcytidine-3'-phosphate
  modified_base 21: mod_base = OTHER; note = 2'-O-methyladenosine-3'-phosphate attached to N-[tris(N-acetylgalactosamine-alkyl)-amidodecanoyl)]-4-hydr oxyprolinol Hyp-(N-acetylgalactosamine-alkyl)3
agaagactgacatcattgcca

SEQ ID NO: 1923 - RNA, 23 nt, synthetic construct
  misc_feature 1..23: note = Description of Artificial Sequence: Synthetic oligonucleotide
  source 1..23: mol_type = other RNA
  modified_base 1: mod_base = OTHER; note = 2'-O-methyluridine-3'-phosphorothioate
  modified_base 2: mod_base = OTHER; note = 2'-fluoroguanosine-3'-phosphorothioate
  modified_base 3: mod_base = OTHER; note = 2'-O-methylguanosine-3'-phosphate
  modified_base 4: mod_base = OTHER; note = 2'-O-methylcytidine-3'-phosphate
  modified_base 5: mod_base = OTHER; note = 2'-O-methyladenosine-3'-phosphate
  modified_base 6: mod_base = OTHER; note = 2'-fluoroadenosine-3'-phosphate
  modified_base 7: mod_base = OTHER; note = 2'-O-methyluridine-3'-phosphate
  modified_base 8: mod_base = OTHER; note = 2'-fluoroguanosine-3'-phosphate
  modified_base 9: mod_base = OTHER; note = 2'-fluoroadenosine-3'-phosphate
  modified_base 10: mod_base = OTHER; note = 2'-O-methyluridine-3'-phosphate
  modified_base 11: mod_base = OTHER; note = 2'-O-methylguanosine-3'-phosphate
  modified_base 12: mod_base = OTHER; note = 2'-O-methyluridine-3'-phosphate
  modified_base 13: mod_base = OTHER; note = 2'-O-methylcytidine-3'-phosphate
  modified_base 14: mod_base = OTHER; note = 2'-fluoroadenosine-3'-phosphate
  modified_base 15: mod_base = OTHER; note = 2'-O-methylguanosine-3'-phosphate
  modified_base 16: mod_base = OTHER; note = 2'-fluorouridine-3'-phosphate
  modified_base 17: mod_base = OTHER; note = 2'-O-methylcytidine-3'-phosphate
  modified_base 18: mod_base = OTHER; note = 2'-O-methyluridine-3'-phosphate
  modified_base 19: mod_base = OTHER; note = 2'-O-methyluridine-3'-phosphate
  modified_base 20: mod_base = OTHER; note = 2'-O-methylcytidine-3'-phosphate
  modified_base 21: mod_base = OTHER; note = 2'-O-methyluridine-3'-phosphorothioate
  modified_base 22: mod_base = OTHER; note = 2'-O-methylcytidine-3'- phosphorothioate
  modified_base 23: mod_base = OTHER; note = 2'-O-methyladenosine-3'-phosphate
tggcaatgatgtcagtcttctca

SEQ ID NO: 1924 - RNA, 21 nt, synthetic construct
  misc_feature 1..21: note = Description of Artificial Sequence: Synthetic oligonucleotide
  source 1..21: mol_type = other RNA
  modified_base 1: mod_base = OTHER; note = 2'-O-methylguanosine-3'- phosphorothioate
  modified_base 2: mod_base = OTHER; note = 2'-O-methyladenosine-3'- phosphorothioate
  modified_base 3: mod_base = OTHER; note = 2'-O-methyladenosine-3'-phosphate
  modified_base 4: mod_base = OTHER; note = 2'-O-methylguanosine-3'-phosphate
  modified_base 5: mod_base = OTHER; note = 2'-O-methyladenosine-3'-phosphate
  modified_base 6: mod_base = OTHER; note = 2'-O-methylcytidine-3'-phosphate
  modified_base 7: mod_base = OTHER; note = 2'-fluorouridine-3'-phosphate
  modified_base 8: mod_base = OTHER; note = 2'-O-methylguanosine-3'-phosphate
  modified_base 9: mod_base = OTHER; note = 2'-fluoroadenosine-3'-phosphate
  modified_base 10: mod_base = OTHER; note = 2'-fluorocytidine-3'-phosphate
  modified_base 11: mod_base = OTHER; note = 2'-fluoroadenosine-3'-phosphate
  modified_base 12: mod_base = OTHER; note = 2'-O-methyluridine-3'-phosphate
  modified_base 13: mod_base = OTHER; note = 2'-O-methylcytidine-3'-phosphate
  modified_base 14: mod_base = OTHER; note = 2'-O-methyladenosine-3'-phosphate
  modified_base 15: mod_base = OTHER; note = 2'-O-methyluridine-3'-phosphate
  modified_base 16: mod_base = OTHER; note = 2'-O-methyluridine-3'-phosphate
  modified_base 17: mod_base = OTHER; note = 2'-O-methylguanosine-3'-phosphate
  modified_base 18: mod_base = OTHER; note = 2'-O-methylcytidine-3'-phosphate
  modified_base 19: mod_base = OTHER; note = 2'-O-methylcytidine-3'-phosphate
  modified_base 20: mod_base = OTHER; note = 2'-O-methyladenosine-3'-phosphate
  modified_base 21: mod_base = OTHER; note = 2'-O-methyladenosine-3'-phosphate attached to N-[tris(N-acetylgalactosamine-alkyl)-amidodecanoyl)]-4-hydr oxyprolinol Hyp-(N-acetylgalactosamine-alkyl)3
gaagactgacatcattgccaa

SEQ ID NO: 1925 - RNA, 23 nt, synthetic construct
  misc_feature 1..23: note = Description of Artificial Sequence: Synthetic oligonucleotide
  source 1..23: mol_type = other RNA
  modified_base 1: mod_base = OTHER; note = 2'-O-methyluridine-3'-phosphorothioate
  modified_base 2: mod_base = OTHER; note = 2'-fluorouridine -3'-phosphorothioate
  modified_base 3: mod_base = OTHER; note = 2'-O-methylguanosine-3'-phosphate
  modified_base 4: mod_base = OTHER; note = 2'-O-methylguanosine-3'-phosphate
  modified_base 5: mod_base = OTHER; note = 2'-O-methylcytidine-3'-phosphate
  modified_base 6: mod_base = OTHER; note = 2'-fluoroadenosine-3'-phosphate
  modified_base 7: mod_base = OTHER; note = 2'-O-methyladenosine-3'-phosphate
  modified_base 8: mod_base = OTHER; note = 2'-fluorouridine-3'-phosphate
  modified_base 9: mod_base = OTHER; note = 2'-fluoroguanosine-3'-phosphate
  modified_base 10: mod_base = OTHER; note = 2'-O-methyladenosine-3'-phosphate
  modified_base 11: mod_base = OTHER; note = 2'-O-methyluridine-3'-phosphate
  modified_base 12: mod_base = OTHER; note = 2'-O-methylguanosine-3'-phosphate
  modified_base 13: mod_base = OTHER; note = 2'-O-methyluridine-3'-phosphate
  modified_base 14: mod_base = OTHER; note = 2'-fluorocytidine-3'-phosphate
  modified_base 15: mod_base = OTHER; note = 2'-O-methyladenosine-3'-phosphate
  modified_base 16: mod_base = OTHER; note = 2'-fluoroguanosine-3'-phosphate
  modified_base 17: mod_base = OTHER; note = 2'-O-methyluridine-3'-phosphate
  modified_base 18: mod_base = OTHER; note = 2'-O-methylcytidine-3'-phosphate
  modified_base 19: mod_base = OTHER; note = 2'-O-methyluridine-3'-phosphate
  modified_base 20: mod_base = OTHER; note = 2'-O-methyluridine-3'-phosphate
  modified_base 21: mod_base = OTHER; note = 2'-O-methylcytidine-3'- phosphorothioate
  modified_base 22: mod_base = OTHER; note = 2'-O-methyluridine-3'-phosphorothioate
  modified_base 23: mod_base = OTHER; note = 2'-O-methylcytidine-3'-phosphate
ttggcaatgatgtcagtcttctc

SEQ ID NO: 1926 - RNA, 21 nt, synthetic construct
  misc_feature 1..21: note = Description of Artificial Sequence: Synthetic oligonucleotide
  source 1..21: mol_type = other RNA
  modified_base 1: mod_base = OTHER; note = 2'-O-methylguanosine-3'- phosphorothioate
  modified_base 2: mod_base = OTHER; note = 2'-O-methylcytidine-3'- phosphorothioate
  modified_base 3: mod_base = OTHER; note = 2'-O-methyluridine-3'-phosphate
  modified_base 4: mod_base = OTHER; note = 2'-O-methylguanosine-3'-phosphate
  modified_base 5: mod_base = OTHER; note = 2'-O-methyladenosine-3'-phosphate
  modified_base 6: mod_base = OTHER; note = 2'-O-methylguanosine-3'-phosphate
  modified_base 7: mod_base = OTHER; note = 2'-fluoroadenosine-3'-phosphate
  modified_base 8: mod_base = OTHER; note = 2'-O-methyladenosine-3'-phosphate
  modified_base 9: mod_base = OTHER; note = 2'-fluoroguanosine-3'-phosphate
  modified_base 10: mod_base = OTHER; note = 2'-fluoroadenosine-3'-phosphate
  modified_base 11: mod_base = OTHER; note = 2'-fluorocytidine-3'-phosphate
  modified_base 12: mod_base = OTHER; note = 2'-O-methyluridine-3'-phosphate
  modified_base 13: mod_base = OTHER; note = 2'-O-methylguanosine-3'-phosphate
  modified_base 14: mod_base = OTHER; note = 2'-O-methyladenosine-3'-phosphate
  modified_base 15: mod_base = OTHER; note = 2'-O-methylcytidine-3'-phosphate
  modified_base 16: mod_base = OTHER; note = 2'-O-methyladenosine-3'-phosphate
  modified_base 17: mod_base = OTHER; note = 2'-O-methyluridine-3'-phosphate
  modified_base 18: mod_base = OTHER; note = 2'-O-methylcytidine-3'-phosphate
  modified_base 19: mod_base = OTHER; note = 2'-O-methyladenosine-3'-phosphate
  modified_base 20: mod_base = OTHER; note = 2'-O-methyluridine-3'-phosphate
  modified_base 21: mod_base = OTHER; note = 2'-O-methyluridine-3'-phosphate attached to N-[tris(N-acetylgalactosamine-alkyl)-amidodecanoyl)]-4-hydr oxyprolinol Hyp-(N-acetylgalactosamine-alkyl)3
gctgagaagactgacatcatt

SEQ ID NO: 1927 - RNA, 23 nt, synthetic construct
  misc_feature 1..23: note = Description of Artificial Sequence: Synthetic oligonucleotide
  source 1..23: mol_type = other RNA
  modified_base 1: mod_base = OTHER; note = 2'-O-methyladenosine-3'- phosphorothioate
  modified_base 2: mod_base = OTHER; note = 2'-fluoroadenosine-3'-phosphorothioate
  modified_base 3: mod_base = OTHER; note = 2'-O-methyluridine-3'-phosphate
  modified_base 4: mod_base = OTHER; note = 2'-O-methylguanosine-3'-phosphate
  modified_base 5: mod_base = OTHER; note = 2'-O-methyladenosine-3'-phosphate
  modified_base 6: mod_base = OTHER; note = 2'-fluorouridine-3'-phosphate
  modified_base 7: mod_base = OTHER; note = 2'-O-methylguanosine-3'-phosphate
  modified_base 8: mod_base = OTHER; note = 2'-fluorouridine-3'-phosphate
  modified_base 9: mod_base = OTHER; note = 2'-fluorocytidine-3'-phosphate
  modified_base 10: mod_base = OTHER; note = 2'-O-methyladenosine-3'-phosphate
  modified_base 11: mod_base = OTHER; note = 2'-O-methylguanosine-3'-phosphate
  modified_base 12: mod_base = OTHER; note = 2'-O-methyluridine-3'-phosphate
  modified_base 13: mod_base = OTHER; note = 2'-O-methylcytidine-3'-phosphate
  modified_base 14: mod_base = OTHER; note = 2'-fluorouridine-3'-phosphate
  modified_base 15: mod_base = OTHER; note = 2'-O-methyluridine-3'-phosphate
  modified_base 16: mod_base = OTHER; note = 2'-fluorocytidine-3'-phosphate
  modified_base 17: mod_base = OTHER; note = 2'-O-methyluridine-3'-phosphate
  modified_base 18: mod_base = OTHER; note = 2'-O-methylcytidine-3'-phosphate
  modified_base 19: mod_base = OTHER; note = 2'-O-methyladenosine-3'-phosphate
  modified_base 20: mod_base = OTHER; note = 2'-O-methylguanosine-3'-phosphate
  modified_base 21: mod_base = OTHER; note = 2'-O-methylcytidine-3'- phosphorothioate
  modified_base 22: mod_base = OTHER; note = 2'-O-methylcytidine-3'- phosphorothioate
  modified_base 23: mod_base = OTHER; note = 2'-O-methyladenosine-3'-phosphate
aatgatgtcagtcttctcagcca

SEQ ID NO: 1928 - RNA, 21 nt, synthetic construct
  misc_feature 1..21: note = Description of Artificial Sequence: Synthetic oligonucleotide
  source 1..21: mol_type = other RNA
  modified_base 1: mod_base = OTHER; note = 2'-O-methylguanosine-3'- phosphorothioate
  modified_base 2: mod_base = OTHER; note = 2'-O-methylguanosine-3'- phosphorothioate
  modified_base 3: mod_base = OTHER; note = 2'-O-methylcytidine-3'-phosphate
  modified_base 4: mod_base = OTHER; note = 2'-O-methyluridine-3'-phosphate
  modified_base 5: mod_base = OTHER; note = 2'-O-methylguanosine-3'-phosphate
  modified_base 6: mod_base = OTHER; note = 2'-O-methyladenosine-3'-phosphate
  modified_base 7: mod_base = OTHER; note = 2'-fluoroguanosine-3'-phosphate
  modified_base 8: mod_base = OTHER; note = 2'-O-methyladenosine-3'-phosphate
  modified_base 9: mod_base = OTHER; note = 2'-fluoroadenosine-3'-phosphate
  modified_base 10: mod_base = OTHER; note = 2'-fluoroguanosine-3'-phosphate
  modified_base 11: mod_base = OTHER; note = 2'-fluoroadenosine-3'-phosphate
  modified_base 12: mod_base = OTHER; note = 2'-O-methylcytidine-3'-phosphate
  modified_base 13: mod_base = OTHER; note = 2'-O-methyluridine-3'-phosphate
  modified_base 14: mod_base = OTHER; note = 2'-O-methylguanosine-3'-phosphate
  modified_base 15: mod_base = OTHER; note = 2'-O-methyladenosine-3'-phosphate
  modified_base 16: mod_base = OTHER; note = 2'-O-methylcytidine-3'-phosphate
  modified_base 17: mod_base = OTHER; note = 2'-O-methyladenosine-3'-phosphate
  modified_base 18: mod_base = OTHER; note = 2'-O-methyluridine-3'-phosphate
  modified_base 19: mod_base = OTHER; note = 2'-O-methylcytidine-3'-phosphate
  modified_base 20: mod_base = OTHER; note = 2'-O-methyladenosine-3'-phosphate
  modified_base 21: mod_base = OTHER; note = 2'-O-methyluridine-3'-phosphate attached to N-[tris(N-acetylgalactosamine-alkyl)-amidodecanoyl)]-4-hydr oxyprolinol Hyp-(N-acetylgalactosamine-alkyl)3
ggctgagaagactgacatcat

SEQ ID NO: 1929 - RNA, 23 nt, synthetic construct
  misc_feature 1..23: note = Description of Artificial Sequence: Synthetic oligonucleotide
  source 1..23: mol_type = other RNA
  modified_base 1: mod_base = OTHER; note = 2'-O-methyladenosine-3'- phosphorothioate
  modified_base 2: mod_base = OTHER; note = 2'-fluorouridine -3'-phosphorothioate
  modified_base 3: mod_base = OTHER; note = 2'-O-methylguanosine-3'-phosphate
  modified_base 4: mod_base = OTHER; note = 2'-O-methyladenosine-3'-phosphate
  modified_base 5: mod_base = OTHER; note = 2'-O-methyluridine-3'-phosphate
  modified_base 6: mod_base = OTHER; note = 2'-fluoroguanosine-3'-phosphate
  modified_base 7: mod_base = OTHER; note = 2'-O-methyluridine-3'-phosphate
  modified_base 8: mod_base = OTHER; note = 2'-fluorocytidine-3'-phosphate
  modified_base 9: mod_base = OTHER; note = 2'-fluoroadenosine-3'-phosphate
  modified_base 10: mod_base = OTHER; note = 2'-O-methylguanosine-3'-phosphate
  modified_base 11: mod_base = OTHER; note = 2'-O-methyluridine-3'-phosphate
  modified_base 12: mod_base = OTHER; note = 2'-O-methylcytidine-3'-phosphate
  modified_base 13: mod_base = OTHER; note = 2'-O-methyluridine-3'-phosphate
  modified_base 14: mod_base = OTHER; note = 2'-fluorouridine-3'-phosphate
  modified_base 15: mod_base = OTHER; note = 2'-O-methylcytidine-3'-phosphate
  modified_base 16: mod_base = OTHER; note = 2'-fluorouridine-3'-phosphate
  modified_base 17: mod_base = OTHER; note = 2'-O-methylcytidine-3'-phosphate
  modified_base 18: mod_base = OTHER; note = 2'-O-methyladenosine-3'-phosphate
  modified_base 19: mod_base = OTHER; note = 2'-O-methylguanosine-3'-phosphate
  modified_base 20: mod_base = OTHER; note = 2'-O-methylcytidine-3'-phosphate
  modified_base 21: mod_base = OTHER; note = 2'-O-methylcytidine-3'- phosphorothioate
  modified_base 22: mod_base = OTHER; note = 2'-O-methyladenosine-3'- phosphorothioate
  modified_base 23: mod_base = OTHER; note = 2'-O-methyluridine-3'-phosphate
atgatgtcagtcttctcagccat

SEQ ID NO: 1930 - RNA, 21 nt, synthetic construct
  misc_feature 1..21: note = Description of Artificial Sequence: Synthetic oligonucleotide
  source 1..21: mol_type = other RNA
  modified_base 1: mod_base = OTHER; note = 2'-O-methyluridine-3'-phosphorothioate
  modified_base 2: mod_base = OTHER; note = 2'-O-methyladenosine-3'- phosphorothioate
  modified_base 3: mod_base = OTHER; note = 2'-O-methyladenosine-3'-phosphate
  modified_base 4: mod_base = OTHER; note = 2'-O-methyluridine-3'-phosphate
  modified_base 5: mod_base = OTHER; note = 2'-O-methylguanosine-3'-phosphate
  modified_base 6: mod_base = OTHER; note = 2'-O-methylcytidine-3'-phosphate
  modified_base 7: mod_base = OTHER; note = 2'-fluorocytidine-3'-phosphate
  modified_base 8: mod_base = OTHER; note = 2'-O-methyluridine-3'-phosphate
  modified_base 9: mod_base = OTHER; note = 2'-fluoroguanosine-3'-phosphate
  modified_base 10: mod_base = OTHER; note = 2'-fluoroadenosine-3'-phosphate
  modified_base 11: mod_base = OTHER; note = 2'-fluorouridine-3'-phosphate
  modified_base 12: mod_base = OTHER; note = 2'-O-methyluridine-3'-phosphate
  modified_base 13: mod_base = OTHER; note = 2'-O-methylcytidine-3'-phosphate
  modified_base 14: mod_base = OTHER; note = 2'-O-methyladenosine-3'-phosphate
  modified_base 15: mod_base = OTHER; note = 2'-O-methylcytidine-3'-phosphate
  modified_base 16: mod_base = OTHER; note = 2'-O-methyladenosine-3'-phosphate
  modified_base 17: mod_base = OTHER; note = 2'-O-methyladenosine-3'-phosphate
  modified_base 18: mod_base = OTHER; note = 2'-O-methylcytidine-3'-phosphate
  modified_base 19: mod_base = OTHER; note = 2'-O-methyluridine-3'-phosphate
  modified_base 20: mod_base = OTHER; note = 2'-O-methyluridine-3'-phosphate
  modified_base 21: mod_base = OTHER; note = 2'-O-methyluridine-3'-phosphate attached to N-[tris(N-acetylgalactosamine-alkyl)-amidodecanoyl)]-4-hydr oxyprolinol Hyp-(N-acetylgalactosamine-alkyl)3
taatgcctgattcacaacttt

SEQ ID NO: 1931 - RNA, 23 nt, synthetic construct
  misc_feature 1..23: note = Description of Artificial Sequence: Synthetic oligonucleotide
  source 1..23: mol_type = other RNA
  modified_base 1: mod_base = OTHER; note = 2'-O-methyladenosine-3'- phosphorothioate
  modified_base 2: mod_base = OTHER; note = 2'-fluoroadenosine-3'-phosphorothioate
  modified_base 3: mod_base = OTHER; note = 2'-O-methyladenosine-3'-phosphate
  modified_base 4: mod_base = OTHER; note = 2'-O-methylguanosine-3'-phosphate
  modified_base 5: mod_base = OTHER; note = 2'-O-methyluridine-3'-phosphate
  modified_base 6: mod_base = OTHER; note = 2'-fluorouridine-3'-phosphate
  modified_base 7: mod_base = OTHER; note = 2'-O-methylguanosine-3'-phosphate
  modified_base 8: mod_base = OTHER; note = 2'-fluorouridine-3'-phosphate
  modified_base 9: mod_base = OTHER; note = 2'-fluoroguanosine-3'-phosphate
  modified_base 10: mod_base = OTHER; note = 2'-O-methyladenosine-3'-phosphate
  modified_base 11: mod_base = OTHER; note = 2'-O-methyladenosine-3'-phosphate
  modified_base 12: mod_base = OTHER; note = 2'-O-methyluridine-3'-phosphate
  modified_base 13: mod_base = OTHER; note = 2'-O-methylcytidine-3'-phosphate
  modified_base 14: mod_base = OTHER; note = 2'-fluoroadenosine-3'-phosphate
  modified_base 15: mod_base = OTHER; note = 2'-O-methylguanosine-3'-phosphate
  modified_base 16: mod_base = OTHER; note = 2'-fluoroguanosine-3'-phosphate
  modified_base 17: mod_base = OTHER; note = 2'-O-methylcytidine-3'-phosphate
  modified_base 18: mod_base = OTHER; note = 2'-O-methyladenosine-3'-phosphate
  modified_base 19: mod_base = OTHER; note = 2'-O-methyluridine-3'-phosphate
  modified_base 20: mod_base = OTHER; note = 2'-O-methyluridine-3'-phosphate
  modified_base 21: mod_base = OTHER; note = 2'-O-methyladenosine-3'- phosphorothioate
  modified_base 22: mod_base = OTHER; note = 2'-O-methylcytidine-3'- phosphorothioate
  modified_base 23: mod_base = OTHER; note = 2'-O-methylcytidine-3'-phosphate
aaagttgtgaatcaggcattacc

SEQ ID NO: 1932 - RNA, 21 nt, synthetic construct
  misc_feature 1..21: note = Description of Artificial Sequence: Synthetic oligonucleotide
  source 1..21: mol_type = other RNA
  modified_base 1: mod_base = OTHER; note = 2'-O-methyladenosine-3'- phosphorothioate
  modified_base 2: mod_base = OTHER; note = 2'-O-methyladenosine-3'- phosphorothioate
  modified_base 3: mod_base = OTHER; note = 2'-O-methyluridine-3'-phosphate
  modified_base 4: mod_base = OTHER; note = 2'-O-methylguanosine-3'-phosphate
  modified_base 5: mod_base = OTHER; note = 2'-O-methylcytidine-3'-phosphate
  modified_base 6: mod_base = OTHER; note = 2'-O-methylcytidine-3'-phosphate
  modified_base 7: mod_base = OTHER; note = 2'-fluorouridine-3'-phosphate
  modified_base 8: mod_base = OTHER; note = 2'-O-methylguanosine-3'-phosphate
  modified_base 9: mod_base = OTHER; note = 2'-fluoroadenosine-3'-phosphate
  modified_base 10: mod_base = OTHER; note = 2'-fluorouridine-3'-phosphate
  modified_base 11: mod_base = OTHER; note = 2'-fluorouridine-3'-phosphate
  modified_base 12: mod_base = OTHER; note = 2'-O-methylcytidine-3'-phosphate
  modified_base 13: mod_base = OTHER; note = 2'-O-methyladenosine-3'-phosphate
  modified_base 14: mod_base = OTHER; note = 2'-O-methylcytidine-3'-phosphate
  modified_base 15: mod_base = OTHER; note = 2'-O-methyladenosine-3'-phosphate
  modified_base 16: mod_base = OTHER; note = 2'-O-methyladenosine-3'-phosphate
  modified_base 17: mod_base = OTHER; note = 2'-O-methylcytidine-3'-phosphate
  modified_base 18: mod_base = OTHER; note = 2'-O-methyluridine-3'-phosphate
  modified_base 19: mod_base = OTHER; note = 2'-O-methyluridine-3'-phosphate
  modified_base 20: mod_base = OTHER; note = 2'-O-methyluridine-3'-phosphate
  modified_base 21: mod_base = OTHER; note = 2'-O-methylguanosine-3'-phosphate attached to N-[tris(N-acetylgalactosamine-alkyl)-amidodecanoyl)]-4-hydr oxyprolinol Hyp-(N-acetylgalactosamine-alkyl)3
aatgcctgattcacaactttg

SEQ ID NO: 1933 - RNA, 23 nt, synthetic construct
  misc_feature 1..23: note = Description of Artificial Sequence: Synthetic oligonucleotide
  source 1..23: mol_type = other RNA
  modified_base 1: mod_base = OTHER; note = 2'-O-methylcytidine-3'- phosphorothioate
  modified_base 2: mod_base = OTHER; note = 2'-fluoroadenosine-3'-phosphorothioate
  modified_base 3: mod_base = OTHER; note = 2'-O-methyladenosine-3'-phosphate
  modified_base 4: mod_base = OTHER; note = 2'-O-methyladenosine-3'-phosphate
  modified_base 5: mod_base = OTHER; note = 2'-O-methylguanosine-3'-phosphate
  modified_base 6: mod_base = OTHER; note = 2'-fluorouridine-3'-phosphate
  modified_base 7: mod_base = OTHER; note = 2'-O-methyluridine-3'-phosphate
  modified_base 8: mod_base = OTHER; note = 2'-fluoroguanosine-3'-phosphate
  modified_base 9: mod_base = OTHER; note = 2'-fluorouridine-3'-phosphate
  modified_base 10: mod_base = OTHER; note = 2'-O-methylguanosine-3'-phosphate
  modified_base 11: mod_base = OTHER; note = 2'-O-methyladenosine-3'-phosphate
  modified_base 12: mod_base = OTHER; note = 2'-O-methyladenosine-3'-phosphate
  modified_base 13: mod_base = OTHER; note = 2'-O-methyluridine-3'-phosphate
  modified_base 14: mod_base = OTHER; note = 2'-fluorocytidine-3'-phosphate
  modified_base 15: mod_base = OTHER; note = 2'-O-methyladenosine-3'-phosphate
  modified_base 16: mod_base = OTHER; note = 2'-fluoroguanosine-3'-phosphate
  modified_base 17: mod_base = OTHER; note = 2'-O-methylguanosine-3'-phosphate
  modified_base 18: mod_base = OTHER; note = 2'-O-methylcytidine-3'-phosphate
  modified_base 19: mod_base = OTHER; note = 2'-O-methyladenosine-3'-phosphate
  modified_base 20: mod_base = OTHER; note = 2'-O-methyluridine-3'-phosphate
  modified_base 21: mod_base = OTHER; note = 2'-O-methyluridine-3'-phosphorothioate
  modified_base 22: mod_base = OTHER; note = 2'-O-methyladenosine-3'- phosphorothioate
  modified_base 23: mod_base = OTHER; note = 2'-O-methylcytidine-3'-phosphate
caaagttgtgaatcaggcattac

SEQ ID NO: 1934 - RNA, 21 nt, synthetic construct
  misc_feature 1..21: note = Description of Artificial Sequence: Synthetic oligonucleotide
  source 1..21: mol_type = other RNA
  modified_base 1: mod_base = OTHER; note = 2'-O-methyluridine-3'-phosphorothioate
  modified_base 2: mod_base = OTHER; note = 2'-O-methyluridine-3'-phosphorothioate
  modified_base 3: mod_base = OTHER; note = 2'-O-methylguanosine-3'-phosphate
  modified_base 4: mod_base = OTHER; note = 2'-O-methylguanosine-3'-phosphate
  modified_base 5: mod_base = OTHER; note = 2'-O-methyluridine-3'-phosphate
  modified_base 6: mod_base = OTHER; note = 2'-O-methyladenosine-3'-phosphate
  modified_base 7: mod_base = OTHER; note = 2'-fluoroadenosine-3'-phosphate
  modified_base 8: mod_base = OTHER; note = 2'-O-methyluridine-3'-phosphate
  modified_base 9: mod_base = OTHER; note = 2'-fluoroguanosine-3'-phosphate
  modified_base 10: mod_base = OTHER; note = 2'-fluorocytidine-3'-phosphate
  modified_base 11: mod_base = OTHER; note = 2'-fluorocytidine-3'-phosphate
  modified_base 12: mod_base = OTHER; note = 2'-O-methyluridine-3'-phosphate
  modified_base 13: mod_base = OTHER; note = 2'-O-methylguanosine-3'-phosphate
  modified_base 14: mod_base = OTHER; note = 2'-O-methyladenosine-3'-phosphate
  modified_base 15: mod_base = OTHER; note = 2'-O-methyluridine-3'-phosphate
  modified_base 16: mod_base = OTHER; note = 2'-O-methyluridine-3'-phosphate
  modified_base 17: mod_base = OTHER; note = 2'-O-methylcytidine-3'-phosphate
  modified_base 18: mod_base = OTHER; note = 2'-O-methyladenosine-3'-phosphate
  modified_base 19: mod_base = OTHER; note = 2'-O-methylcytidine-3'-phosphate
  modified_base 20: mod_base = OTHER; note = 2'-O-methyladenosine-3'-phosphate
  modified_base 21: mod_base = OTHER; note = 2'-O-methyladenosine-3'-phosphate attached to N-[tris(N-acetylgalactosamine-alkyl)-amidodecanoyl)]-4-hydr oxyprolinol Hyp-(N-acetylgalactosamine-alkyl)3
ttggtaatgcctgattcacaa

SEQ ID NO: 1935 - RNA, 23 nt, synthetic construct
  misc_feature 1..23: note = Description of Artificial Sequence: Synthetic oligonucleotide
  source 1..23: mol_type = other RNA
  modified_base 1: mod_base = OTHER; note = 2'-O-methyluridine-3'-phosphorothioate
  modified_base 2: mod_base = OTHER; note = 2'-fluorouridine -3'-phosphorothioate
  modified_base 3: mod_base = OTHER; note = 2'-O-methylguanosine-3'-phosphate
  modified_base 4: mod_base = OTHER; note = 2'-O-methyluridine-3'-phosphate
  modified_base 5: mod_base = OTHER; note = 2'-O-methylguanosine-3'-phosphate
  modified_base 6: mod_base = OTHER; note = 2'-fluoroadenosine-3'-phosphate
  modified_base 7: mod_base = OTHER; note = 2'-O-methyladenosine-3'-phosphate
  modified_base 8: mod_base = OTHER; note = 2'-fluorouridine-3'-phosphate
  modified_base 9: mod_base = OTHER; note = 2'-fluorocytidine-3'-phosphate
  modified_base 10: mod_base = OTHER; note = 2'-O-methyladenosine-3'-phosphate
  modified_base 11: mod_base = OTHER; note = 2'-O-methylguanosine-3'-phosphate
  modified_base 12: mod_base = OTHER; note = 2'-O-methylguanosine-3'-phosphate
  modified_base 13: mod_base = OTHER; note = 2'-O-methylcytidine-3'-phosphate
  modified_base 14: mod_base = OTHER; note = 2'-fluoroadenosine-3'-phosphate
  modified_base 15: mod_base = OTHER; note = 2'-O-methyluridine-3'-phosphate
  modified_base 16: mod_base = OTHER; note = 2'-fluorouridine-3'-phosphate
  modified_base 17: mod_base = OTHER; note = 2'-O-methyladenosine-3'-phosphate
  modified_base 18: mod_base = OTHER; note = 2'-O-methylcytidine-3'-phosphate
  modified_base 19: mod_base = OTHER; note = 2'-O-methylcytidine-3'-phosphate
  modified_base 20: mod_base = OTHER; note = 2'-O-methyladenosine-3'-phosphate
  modified_base 21: mod_base = OTHER; note = 2'-O-methyladenosine-3'- phosphorothioate
  modified_base 22: mod_base = OTHER; note = 2'-O-methylcytidine-3'- phosphorothioate
  modified_base 23: mod_base = OTHER; note = 2'-O-methyladenosine-3'-phosphate
ttgtgaatcaggcattaccaaca

SEQ ID NO: 1936 - RNA, 21 nt, synthetic construct
  misc_feature 1..21: note = Description of Artificial Sequence: Synthetic oligonucleotide
  source 1..21: mol_type = other RNA
  modified_base 1: mod_base = OTHER; note = 2'-O-methylguanosine-3'- phosphorothioate
  modified_base 2: mod_base = OTHER; note = 2'-O-methyluridine-3'-phosphorothioate
  modified_base 3: mod_base = OTHER; note = 2'-O-methyluridine-3'-phosphate
  modified_base 4: mod_base = OTHER; note = 2'-O-methylguanosine-3'-phosphate
  modified_base 5: mod_base = OTHER; note = 2'-O-methylguanosine-3'-phosphate
  modified_base 6: mod_base = OTHER; note = 2'-O-methyluridine-3'-phosphate
  modified_base 7: mod_base = OTHER; note = 2'-fluoroadenosine-3'-phosphate
  modified_base 8: mod_base = OTHER; note = 2'-O-methyladenosine-3'-phosphate
  modified_base 9: mod_base = OTHER; note = 2'-fluorouridine-3'-phosphate
  modified_base 10: mod_base = OTHER; note = 2'-fluoroguanosine-3'-phosphate
  modified_base 11: mod_base = OTHER; note = 2'-fluorocytidine-3'-phosphate
  modified_base 12: mod_base = OTHER; note = 2'-O-methylcytidine-3'-phosphate
  modified_base 13: mod_base = OTHER; note = 2'-O-methyluridine-3'-phosphate
  modified_base 14: mod_base = OTHER; note = 2'-O-methylguanosine-3'-phosphate
  modified_base 15: mod_base = OTHER; note = 2'-O-methyladenosine-3'-phosphate
  modified_base 16: mod_base = OTHER; note = 2'-O-methyluridine-3'-phosphate
  modified_base 17: mod_base = OTHER; note = 2'-O-methyluridine-3'-phosphate
  modified_base 18: mod_base = OTHER; note = 2'-O-methylcytidine-3'-phosphate
  modified_base 19: mod_base = OTHER; note = 2'-O-methyladenosine-3'-phosphate
  modified_base 20: mod_base = OTHER; note = 2'-O-methylcytidine-3'-phosphate
  modified_base 21: mod_base = OTHER; note = 2'-O-methyladenosine-3'-phosphate attached to N-[tris(N-acetylgalactosamine-alkyl)-amidodecanoyl)]-4-hydr oxyprolinol Hyp-(N-acetylgalactosamine-alkyl)3
gttggtaatgcctgattcaca

SEQ ID NO: 1937 - RNA, 23 nt, synthetic construct
  misc_feature 1..23: note = Description of Artificial Sequence: Synthetic oligonucleotide
  source 1..23: mol_type = other RNA
  modified_base 1: mod_base = OTHER; note = 2'-O-methyluridine-3'-phosphorothioate
  modified_base 2: mod_base = OTHER; note = 2'-fluoroguanosine-3'-phosphorothioate
  modified_base 3: mod_base = OTHER; note = 2'-O-methyluridine-3'-phosphate
  modified_base 4: mod_base = OTHER; note = 2'-O-methylguanosine-3'-phosphate
  modified_base 5: mod_base = OTHER; note = 2'-O-methyladenosine-3'-phosphate
  modified_base 6: mod_base = OTHER; note = 2'-fluoroadenosine-3'-phosphate
  modified_base 7: mod_base = OTHER; note = 2'-O-methyluridine-3'-phosphate
  modified_base 8: mod_base = OTHER; note = 2'-fluorocytidine-3'-phosphate
  modified_base 9: mod_base = OTHER; note = 2'-fluoroadenosine-3'-phosphate
  modified_base 10: mod_base = OTHER; note = 2'-O-methylguanosine-3'-phosphate
  modified_base 11: mod_base = OTHER; note = 2'-O-methylguanosine-3'-phosphate
  modified_base 12: mod_base = OTHER; note = 2'-O-methylcytidine-3'-phosphate
  modified_base 13: mod_base = OTHER; note = 2'-O-methyladenosine-3'-phosphate
  modified_base 14: mod_base = OTHER; note = 2'-fluorouridine-3'-phosphate
  modified_base 15: mod_base = OTHER; note = 2'-O-methyluridine-3'-phosphate
  modified_base 16: mod_base = OTHER; note = 2'-fluoroadenosine-3'-phosphate
  modified_base 17: mod_base = OTHER; note = 2'-O-methylcytidine-3'-phosphate
  modified_base 18: mod_base = OTHER; note = 2'-O-methylcytidine-3'-phosphate
  modified_base 19: mod_base = OTHER; note = 2'-O-methyladenosine-3'-phosphate
  modified_base 20: mod_base = OTHER; note = 2'-O-methyladenosine-3'-phosphate
  modified_base 21: mod_base = OTHER; note = 2'-O-methylcytidine-3'- phosphorothioate
  modified_base 22: mod_base = OTHER; note = 2'-O-methyladenosine-3'- phosphorothioate
  modified_base 23: mod_base = OTHER; note = 2'-O-methylcytidine-3'-phosphate
tgtgaatcaggcattaccaacac

SEQ ID NO: 1938 - RNA, 21 nt, synthetic construct
  misc_feature 1..21: note = Description of Artificial Sequence: Synthetic oligonucleotide
  source 1..21: mol_type = other RNA
  modified_base 1: mod_base = OTHER; note = 2'-O-methyluridine-3'-phosphorothioate
  modified_base 2: mod_base = OTHER; note = 2'-O-methyladenosine-3'- phosphorothioate
  modified_base 3: mod_base = OTHER; note = 2'-O-methyluridine-3'-phosphate
  modified_base 4: mod_base = OTHER; note = 2'-O-methylcytidine-3'-phosphate
  modified_base 5: mod_base = OTHER; note = 2'-O-methyladenosine-3'-phosphate
  modified_base 6: mod_base = OTHER; note = 2'-O-methyladenosine-3'-phosphate
  modified_base 7: mod_base = OTHER; note = 2'-fluoroadenosine-3'-phosphate
  modified_base 8: mod_base = OTHER; note = 2'-O-methyluridine-3'-phosphate
  modified_base 9: mod_base = OTHER; note = 2'-fluoroguanosine-3'-phosphate
  modified_base 10: mod_base = OTHER; note = 2'-fluoroguanosine-3'-phosphate
  modified_base 11: mod_base = OTHER; note = 2'-fluorocytidine-3'-phosphate
  modified_base 12: mod_base = OTHER; note = 2'-O-methyluridine-3'-phosphate
  modified_base 13: mod_base = OTHER; note = 2'-O-methylguanosine-3'-phosphate
  modified_base 14: mod_base = OTHER; note = 2'-O-methyladenosine-3'-phosphate
  modified_base 15: mod_base = OTHER; note = 2'-O-methylguanosine-3'-phosphate
  modified_base 16: mod_base = OTHER; note = 2'-O-methyladenosine-3'-phosphate
  modified_base 17: mod_base = OTHER; note = 2'-O-methyladenosine-3'-phosphate
  modified_base 18: mod_base = OTHER; note = 2'-O-methylguanosine-3'-phosphate
  modified_base 19: mod_base = OTHER; note = 2'-O-methyladenosine-3'-phosphate
  modified_base 20: mod_base = OTHER; note = 2'-O-methylcytidine-3'-phosphate
  modified_base 21: mod_base = OTHER; note = 2'-O-methyluridine-3'-phosphate attached to N-[tris(N-acetylgalactosamine-alkyl)-amidodecanoyl)]-4-hydr oxyprolinol Hyp-(N-acetylgalactosamine-alkyl)3
tatcaaatggctgagaagact

SEQ ID NO: 1939 - RNA, 23 nt, synthetic construct
  misc_feature 1..23: note = Description of Artificial Sequence: Synthetic oligonucleotide
  source 1..23: mol_type = other RNA
  modified_base 1: mod_base = OTHER; note = 2'-O-methyladenosine-3'- phosphorothioate
  modified_base 2: mod_base = OTHER; note = 2'-fluoroguanosine-3'-phosphorothioate
  modified_base 3: mod_base = OTHER; note = 2'-O-methyluridine-3'-phosphate
  modified_base 4: mod_base = OTHER; note = 2'-O-methylcytidine-3'-phosphate
  modified_base 5: mod_base = OTHER; note = 2'-O-methyluridine-3'-phosphate
  modified_base 6: mod_base = OTHER; note = 2'-fluorouridine-3'-phosphate
  modified_base 7: mod_base = OTHER; note = 2'-O-methylcytidine-3'-phosphate
  modified_base 8: mod_base = OTHER; note = 2'-fluorouridine-3'-phosphate
  modified_base 9: mod_base = OTHER; note = 2'-fluorocytidine-3'-phosphate
  modified_base 10: mod_base = OTHER; note = 2'-O-methyladenosine-3'-phosphate
  modified_base 11: mod_base = OTHER; note = 2'-O-methylguanosine-3'-phosphate
  modified_base 12: mod_base = OTHER; note = 2'-O-methylcytidine-3'-phosphate
  modified_base 13: mod_base = OTHER; note = 2'-O-methylcytidine-3'-phosphate
  modified_base 14: mod_base = OTHER; note = 2'-fluoroadenosine-3'-phosphate
  modified_base 15: mod_base = OTHER; note = 2'-O-methyluridine-3'-phosphate
  modified_base 16: mod_base = OTHER; note = 2'-fluorouridine-3'-phosphate
  modified_base 17: mod_base = OTHER; note = 2'-O-methyluridine-3'-phosphate
  modified_base 18: mod_base = OTHER; note = 2'-O-methylguanosine-3'-phosphate
  modified_base 19: mod_base = OTHER; note = 2'-O-methyladenosine-3'-phosphate
  modified_base 20: mod_base = OTHER; note = 2'-O-methyluridine-3'-phosphate
  modified_base 21: mod_base = OTHER; note = 2'-O-methyladenosine-3'- phosphorothioate
  modified_base 22: mod_base = OTHER; note = 2'-O-methyluridine-3'-phosphorothioate
  modified_base 23: mod_base = OTHER; note = 2'-O-methylcytidine-3'-phosphate
agtcttctcagccatttgatatc

SEQ ID NO: 1940 - RNA, 21 nt, synthetic construct
  misc_feature 1..21: note = Description of Artificial Sequence: Synthetic oligonucleotide
  source 1..21: mol_type = other RNA
  modified_base 1: mod_base = OTHER; note = 2'-O-methyladenosine-3'- phosphorothioate
  modified_base 2: mod_base = OTHER; note = 2'-O-methyluridine-3'-phosphorothioate
  modified_base 3: mod_base = OTHER; note = 2'-O-methylcytidine-3'-phosphate
  modified_base 4: mod_base = OTHER; note = 2'-O-methyladenosine-3'-phosphate
  modified_base 5: mod_base = OTHER; note = 2'-O-methyladenosine-3'-phosphate
  modified_base 6: mod_base = OTHER; note = 2'-O-methyladenosine-3'-phosphate
  modified_base 7: mod_base = OTHER; note = 2'-fluorouridine-3'-phosphate
  modified_base 8: mod_base = OTHER; note = 2'-O-methylguanosine-3'-phosphate
  modified_base 9: mod_base = OTHER; note = 2'-fluoroguanosine-3'-phosphate
  modified_base 10: mod_base = OTHER; note = 2'-fluorocytidine-3'-phosphate
  modified_base 11: mod_base = OTHER; note = 2'-fluorouridine-3'-phosphate
  modified_base 12: mod_base = OTHER; note = 2'-O-methylguanosine-3'-phosphate
  modified_base 13: mod_base = OTHER; note = 2'-O-methyladenosine-3'-phosphate
  modified_base 14: mod_base = OTHER; note = 2'-O-methylguanosine-3'-phosphate
  modified_base 15: mod_base = OTHER; note = 2'-O-methyladenosine-3'-phosphate
  modified_base 16: mod_base = OTHER; note = 2'-O-methyladenosine-3'-phosphate
  modified_base 17: mod_base = OTHER; note = 2'-O-methylguanosine-3'-phosphate
  modified_base 18: mod_base = OTHER; note = 2'-O-methyladenosine-3'-phosphate
  modified_base 19: mod_base = OTHER; note = 2'-O-methylcytidine-3'-phosphate
  modified_base 20: mod_base = OTHER; note = 2'-O-methyluridine-3'-phosphate
  modified_base 21: mod_base = OTHER; note = 2'-O-methylguanosine-3'-phosphate attached to N-[tris(N-acetylgalactosamine-alkyl)-amidodecanoyl)]-4-hydr oxyprolinol Hyp-(N-acetylgalactosamine-alkyl)3
atcaaatggctgagaagactg

SEQ ID NO: 1941 - RNA, 23 nt, synthetic construct
  misc_feature 1..23: note = Description of Artificial Sequence: Synthetic oligonucleotide
  source 1..23: mol_type = other RNA
  modified_base 1: mod_base = OTHER; note = 2'-O-methylcytidine-3'- phosphorothioate
  modified_base 2: mod_base = OTHER; note = 2'-fluoroadenosine-3'-phosphorothioate
  modified_base 3: mod_base = OTHER; note = 2'-O-methylguanosine-3'-phosphate
  modified_base 4: mod_base = OTHER; note = 2'-O-methyluridine-3'-phosphate
  modified_base 5: mod_base = OTHER; note = 2'-O-methylcytidine-3'-phosphate
  modified_base 6: mod_base = OTHER; note = 2'-fluorouridine-3'-phosphate
  modified_base 7: mod_base = OTHER; note = 2'-O-methyluridine-3'-phosphate
  modified_base 8: mod_base = OTHER; note = 2'-fluorocytidine-3'-phosphate
  modified_base 9: mod_base = OTHER; note = 2'-fluorouridine-3'-phosphate
  modified_base 10: mod_base = OTHER; note = 2'-O-methylcytidine-3'-phosphate
  modified_base 11: mod_base = OTHER; note = 2'-O-methyladenosine-3'-phosphate
  modified_base 12: mod_base = OTHER; note = 2'-O-methylguanosine-3'-phosphate
  modified_base 13: mod_base = OTHER; note = 2'-O-methylcytidine-3'-phosphate
  modified_base 14: mod_base = OTHER; note = 2'-fluorocytidine-3'-phosphate
  modified_base 15: mod_base = OTHER; note = 2'-O-methyladenosine-3'-phosphate
  modified_base 16: mod_base = OTHER; note = 2'-fluorouridine-3'-phosphate
  modified_base 17: mod_base = OTHER; note = 2'-O-methyluridine-3'-phosphate
  modified_base 18: mod_base = OTHER; note = 2'-O-methyluridine-3'-phosphate
  modified_base 19: mod_base = OTHER; note = 2'-O-methylguanosine-3'-phosphate
  modified_base 20: mod_base = OTHER; note = 2'-O-methyladenosine-3'-phosphate
  modified_base 21: mod_base = OTHER; note = 2'-O-methyluridine-3'-phosphorothioate
  modified_base 22: mod_base = OTHER; note = 2'-O-methyladenosine-3'- phosphorothioate
  modified_base 23: mod_base = OTHER; note = 2'-O-methyluridine-3'-phosphate
cagtcttctcagccatttgatat

SEQ ID NO: 1942 - RNA, 21 nt, synthetic construct
  misc_feature 1..21: note = Description of Artificial Sequence: Synthetic oligonucleotide
  source 1..21: mol_type = other RNA
  modified_base 1: mod_base = OTHER; note = 2'-O-methyladenosine-3'- phosphorothioate
  modified_base 2: mod_base = OTHER; note = 2'-O-methyladenosine-3'- phosphorothioate
  modified_base 3: mod_base = OTHER; note = 2'-O-methylguanosine-3'-phosphate
  modified_base 4: mod_base = OTHER; note = 2'-O-methyladenosine-3'-phosphate
  modified_base 5: mod_base = OTHER; note = 2'-O-methyluridine-3'-phosphate
  modified_base 6: mod_base = OTHER; note = 2'-O-methyladenosine-3'-phosphate
  modified_base 7: mod_base = OTHER; note = 2'-fluorouridine-3'-phosphate
  modified_base 8: mod_base = OTHER; note = 2'-O-methylcytidine-3'-phosphate
  modified_base 9: mod_base = OTHER; note = 2'-fluoroadenosine-3'-phosphate
  modified_base 10: mod_base = OTHER; note = 2'-fluoroadenosine-3'-phosphate
  modified_base 11: mod_base = OTHER; note = 2'-fluoroadenosine-3'-phosphate
  modified_base 12: mod_base = OTHER; note = 2'-O-methyluridine-3'-phosphate
  modified_base 13: mod_base = OTHER; note = 2'-O-methylguanosine-3'-phosphate
  modified_base 14: mod_base = OTHER; note = 2'-O-methylguanosine-3'-phosphate
  modified_base 15: mod_base = OTHER; note = 2'-O-methylcytidine-3'-phosphate
  modified_base 16: mod_base = OTHER; note = 2'-O-methyluridine-3'-phosphate
  modified_base 17: mod_base = OTHER; note = 2'-O-methylguanosine-3'-phosphate
  modified_base 18: mod_base = OTHER; note = 2'-O-methyladenosine-3'-phosphate
  modified_base 19: mod_base = OTHER; note = 2'-O-methylguanosine-3'-phosphate
  modified_base 20: mod_base = OTHER; note = 2'-O-methyladenosine-3'-phosphate
  modified_base 21: mod_base = OTHER; note = 2'-O-methyladenosine-3'-phosphate attached to N-[tris(N-acetylgalactosamine-alkyl)-amidodecanoyl)]-4-hydr oxyprolinol Hyp-(N-acetylgalactosamine-alkyl)3
aagatatcaaatggctgagaa

SEQ ID NO: 1943 - RNA, 23 nt, synthetic construct
  misc_feature 1..23: note = Description of Artificial Sequence: Synthetic oligonucleotide
  source 1..23: mol_type = other RNA
  modified_base 1: mod_base = OTHER; note = 2'-O-methyluridine-3'-phosphorothioate
  modified_base 2: mod_base = OTHER; note = 2'-fluorouridine -3'-phosphorothioate
  modified_base 3: mod_base = OTHER; note = 2'-O-methylcytidine-3'-phosphate
  modified_base 4: mod_base = OTHER; note = 2'-O-methyluridine-3'-phosphate
  modified_base 5: mod_base = OTHER; note = 2'-O-methylcytidine-3'-phosphate
  modified_base 6: mod_base = OTHER; note = 2'-fluoroadenosine-3'-phosphate
  modified_base 7: mod_base = OTHER; note = 2'-O-methylguanosine-3'-phosphate
  modified_base 8: mod_base = OTHER; note = 2'-fluorocytidine-3'-phosphate
  modified_base 9: mod_base = OTHER; note = 2'-fluorocytidine-3'-phosphate
  modified_base 10: mod_base = OTHER; note = 2'-O-methyladenosine-3'-phosphate
  modified_base 11: mod_base = OTHER; note = 2'-O-methyluridine-3'-phosphate
  modified_base 12: mod_base = OTHER; note = 2'-O-methyluridine-3'-phosphate
  modified_base 13: mod_base = OTHER; note = 2'-O-methyluridine-3'-phosphate
  modified_base 14: mod_base = OTHER; note = 2'-fluoroguanosine-3'-phosphate
  modified_base 15: mod_base = OTHER; note = 2'-O-methyladenosine-3'-phosphate
  modified_base 16: mod_base = OTHER; note = 2'-fluorouridine-3'-phosphate
  modified_base 17: mod_base = OTHER; note = 2'-O-methyladenosine-3'-phosphate
  modified_base 18: mod_base = OTHER; note = 2'-O-methyluridine-3'-phosphate
  modified_base 19: mod_base = OTHER; note = 2'-O-methylcytidine-3'-phosphate
  modified_base 20: mod_base = OTHER; note = 2'-O-methyluridine-3'-phosphate
  modified_base 21: mod_base = OTHER; note = 2'-O-methyluridine-3'-phosphorothioate
  modified_base 22: mod_base = OTHER; note = 2'-O-methylcytidine-3'- phosphorothioate
  modified_base 23: mod_base = OTHER; note = 2'-O-methylcytidine-3'-phosphate
ttctcagccatttgatatcttcc

SEQ ID NO: 1944 - RNA, 21 nt, synthetic construct
  misc_feature 1..21: note = Description of Artificial Sequence: Synthetic oligonucleotide
  source 1..21: mol_type = other RNA
  modified_base 1: mod_base = OTHER; note = 2'-O-methylguanosine-3'- phosphorothioate
  modified_base 2: mod_base = OTHER; note = 2'-O-methyladenosine-3'- phosphorothioate
  modified_base 3: mod_base = OTHER; note = 2'-O-methyladenosine-3'-phosphate
  modified_base 4: mod_base = OTHER; note = 2'-O-methylguanosine-3'-phosphate
  modified_base 5: mod_base = OTHER; note = 2'-O-methyladenosine-3'-phosphate
  modified_base 6: mod_base = OTHER; note = 2'-O-methyluridine-3'-phosphate
  modified_base 7: mod_base = OTHER; note = 2'-fluoroadenosine-3'-phosphate
  modified_base 8: mod_base = OTHER; note = 2'-O-methyluridine-3'-phosphate
  modified_base 9: mod_base = OTHER; note = 2'-fluorocytidine-3'-phosphate
  modified_base 10: mod_base = OTHER; note = 2'-fluoroadenosine-3'-phosphate
  modified_base 11: mod_base = OTHER; note = 2'-fluoroadenosine-3'-phosphate
  modified_base 12: mod_base = OTHER; note = 2'-O-methyladenosine-3'-phosphate
  modified_base 13: mod_base = OTHER; note = 2'-O-methyluridine-3'-phosphate
  modified_base 14: mod_base = OTHER; note = 2'-O-methylguanosine-3'-phosphate
  modified_base 15: mod_base = OTHER; note = 2'-O-methylguanosine-3'-phosphate
  modified_base 16: mod_base = OTHER; note = 2'-O-methylcytidine-3'-phosphate
  modified_base 17: mod_base = OTHER; note = 2'-O-methyluridine-3'-phosphate
  modified_base 18: mod_base = OTHER; note = 2'-O-methylguanosine-3'-phosphate
  modified_base 19: mod_base = OTHER; note = 2'-O-methyladenosine-3'-phosphate
  modified_base 20: mod_base = OTHER; note = 2'-O-methylguanosine-3'-phosphate
  modified_base 21: mod_base = OTHER; note = 2'-O-methyladenosine-3'-phosphate attached to N-[tris(N-acetylgalactosamine-alkyl)-amidodecanoyl)]-4-hydr oxyprolinol Hyp-(N-acetylgalactosamine-alkyl)3
gaagatatcaaatggctgaga

SEQ ID NO: 1945 - RNA, 23 nt, synthetic construct
  misc_feature 1..23: note = Description of Artificial Sequence: Synthetic oligonucleotide
  source 1..23: mol_type = other RNA
  modified_base 1: mod_base = OTHER; note = 2'-O-methyluridine-3'-phosphorothioate
  modified_base 2: mod_base = OTHER; note = 2'-fluorocytidine-3'-phosphorothioate
  modified_base 3: mod_base = OTHER; note = 2'-O-methyluridine-3'-phosphate
  modified_base 4: mod_base = OTHER; note = 2'-O-methylcytidine-3'-phosphate
  modified_base 5: mod_base = OTHER; note = 2'-O-methyladenosine-3'-phosphate
  modified_base 6: mod_base = OTHER; note = 2'-fluoroguanosine-3'-phosphate
  modified_base 7: mod_base = OTHER; note = 2'-O-methylcytidine-3'-phosphate
  modified_base 8: mod_base = OTHER; note = 2'-fluorocytidine-3'-phosphate
  modified_base 9: mod_base = OTHER; note = 2'-fluoroadenosine-3'-phosphate
  modified_base 10: mod_base = OTHER; note = 2'-O-methyluridine-3'-phosphate
  modified_base 11: mod_base = OTHER; note = 2'-O-methyluridine-3'-phosphate
  modified_base 12: mod_base = OTHER; note = 2'-O-methyluridine-3'-phosphate
  modified_base 13: mod_base = OTHER; note = 2'-O-methylguanosine-3'-phosphate
  modified_base 14: mod_base = OTHER; note = 2'-fluoroadenosine-3'-phosphate
  modified_base 15: mod_base = OTHER; note = 2'-O-methyluridine-3'-phosphate
  modified_base 16: mod_base = OTHER; note = 2'-fluoroadenosine-3'-phosphate
  modified_base 17: mod_base = OTHER; note = 2'-O-methyluridine-3'-phosphate
  modified_base 18: mod_base = OTHER; note = 2'-O-methylcytidine-3'-phosphate
  modified_base 19: mod_base = OTHER; note = 2'-O-methyluridine-3'-phosphate
  modified_base 20: mod_base = OTHER; note = 2'-O-methyluridine-3'-phosphate
  modified_base 21: mod_base = OTHER; note = 2'-O-methylcytidine-3'- phosphorothioate
  modified_base 22: mod_base = OTHER; note = 2'-O-methylcytidine-3'- phosphorothioate
  modified_base 23: mod_base = OTHER; note = 2'-O-methylcytidine-3'-phosphate
tctcagccatttgatatcttccc

SEQ ID NO: 1946 - RNA, 21 nt, synthetic construct
  misc_feature 1..21: note = Description of Artificial Sequence: Synthetic oligonucleotide
  source 1..21: mol_type = other RNA
  modified_base 1: mod_base = OTHER; note = 2'-O-methyluridine-3'-phosphorothioate
  modified_base 2: mod_base = OTHER; note = 2'-O-methylcytidine-3'- phosphorothioate
  modified_base 3: mod_base = OTHER; note = 2'-O-methyluridine-3'-phosphate
  modified_base 4: mod_base = OTHER; note = 2'-O-methylguanosine-3'-phosphate
  modified_base 5: mod_base = OTHER; note = 2'-O-methyladenosine-3'-phosphate
  modified_base 6: mod_base = OTHER; note = 2'-O-methylcytidine-3'-phosphate
  modified_base 7: mod_base = OTHER; note = 2'-fluoroadenosine-3'-phosphate
  modified_base 8: mod_base = OTHER; note = 2'-O-methylguanosine-3'-phosphate
  modified_base 9: mod_base = OTHER; note = 2'-fluorouridine-3'-phosphate
  modified_base 10: mod_base = OTHER; note = 2'-fluoroguanosine-3'-phosphate
  modified_base 11: mod_base = OTHER; note = 2'-fluorocytidine-3'-phosphate
  modified_base 12: mod_base = OTHER; note = 2'-O-methyladenosine-3'-phosphate
  modified_base 13: mod_base = OTHER; note = 2'-O-methylcytidine-3'-phosphate
  modified_base 14: mod_base = OTHER; note = 2'-O-methyladenosine-3'-phosphate
  modified_base 15: mod_base = OTHER; note = 2'-O-methyladenosine-3'-phosphate
  modified_base 16: mod_base = OTHER; note = 2'-O-methyluridine-3'-phosphate
  modified_base 17: mod_base = OTHER; note = 2'-O-methyladenosine-3'-phosphate
  modified_base 18: mod_base = OTHER; note = 2'-O-methyluridine-3'-phosphate
  modified_base 19: mod_base = OTHER; note = 2'-O-methyluridine-3'-phosphate
  modified_base 20: mod_base = OTHER; note = 2'-O-methyluridine-3'-phosphate
  modified_base 21: mod_base = OTHER; note = 2'-O-methyluridine-3'-phosphate attached to N-[tris(N-acetylgalactosamine-alkyl)-amidodecanoyl)]-4-hydr oxyprolinol Hyp-(N-acetylgalactosamine-alkyl)3
tctgacagtgcacaatatttt

SEQ ID NO: 1947 - RNA, 23 nt, synthetic construct
  misc_feature 1..23: note = Description of Artificial Sequence: Synthetic oligonucleotide
  source 1..23: mol_type = other RNA
  modified_base 1: mod_base = OTHER; note = 2'-O-methyladenosine-3'- phosphorothioate
  modified_base 2: mod_base = OTHER; note = 2'-fluoroadenosine-3'-phosphorothioate
  modified_base 3: mod_base = OTHER; note = 2'-O-methyladenosine-3'-phosphate
  modified_base 4: mod_base = OTHER; note = 2'-O-methyladenosine-3'-phosphate
  modified_base 5: mod_base = OTHER; note = 2'-O-methyluridine-3'-phosphate
  modified_base 6: mod_base = OTHER; note = 2'-fluoroadenosine-3'-phosphate
  modified_base 7: mod_base = OTHER; note = 2'-O-methyluridine-3'-phosphate
  modified_base 8: mod_base = OTHER; note = 2'-fluorouridine-3'-phosphate
  modified_base 9: mod_base = OTHER; note = 2'-fluoroguanosine-3'-phosphate
  modified_base 10: mod_base = OTHER; note = 2'-O-methyluridine-3'-phosphate
  modified_base 11: mod_base = OTHER; note = 2'-O-methylguanosine-3'-phosphate
  modified_base 12: mod_base = OTHER; note = 2'-O-methylcytidine-3'-phosphate
  modified_base 13: mod_base = OTHER; note = 2'-O-methyladenosine-3'-phosphate
  modified_base 14: mod_base = OTHER; note = 2'-fluorocytidine-3'-phosphate
  modified_base 15: mod_base = OTHER; note = 2'-O-methyluridine-3'-phosphate
  modified_base 16: mod_base = OTHER; note = 2'-fluoroguanosine-3'-phosphate
  modified_base 17: mod_base = OTHER; note = 2'-O-methyluridine-3'-phosphate
  modified_base 18: mod_base = OTHER; note = 2'-O-methylcytidine-3'-phosphate
  modified_base 19: mod_base = OTHER; note = 2'-O-methyladenosine-3'-phosphate
  modified_base 20: mod_base = OTHER; note = 2'-O-methylguanosine-3'-phosphate
  modified_base 21: mod_base = OTHER; note = 2'-O-methyladenosine-3'- phosphorothioate
  modified_base 22: mod_base = OTHER; note = 2'-O-methyluridine-3'-phosphorothioate
  modified_base 23: mod_base = OTHER; note = 2'-O-methylcytidine-3'-phosphate
aaaatattgtgcactgtcagatc

SEQ ID NO: 1948 - RNA, 21 nt, synthetic construct
  misc_feature 1..21: note = Description of Artificial Sequence: Synthetic oligonucleotide
  source 1..21: mol_type = other RNA
  modified_base 1: mod_base = OTHER; note = 2'-O-methylcytidine-3'- phosphorothioate
  modified_base 2: mod_base = OTHER; note = 2'-O-methyluridine-3'-phosphorothioate
  modified_base 3: mod_base = OTHER; note = 2'-O-methylguanosine-3'-phosphate
  modified_base 4: mod_base = OTHER; note = 2'-O-methyladenosine-3'-phosphate
  modified_base 5: mod_base = OTHER; note = 2'-O-methylcytidine-3'-phosphate
  modified_base 6: mod_base = OTHER; note = 2'-O-methyladenosine-3'-phosphate
  modified_base 7: mod_base = OTHER; note = 2'-fluoroguanosine-3'-phosphate
  modified_base 8: mod_base = OTHER; note = 2'-O-methyluridine-3'-phosphate
  modified_base 9: mod_base = OTHER; note = 2'-fluoroguanosine-3'-phosphate
  modified_base 10: mod_base = OTHER; note = 2'-fluorocytidine-3'-phosphate
  modified_base 11: mod_base = OTHER; note = 2'-fluoroadenosine-3'-phosphate
  modified_base 12: mod_base = OTHER; note = 2'-O-methylcytidine-3'-phosphate
  modified_base 13: mod_base = OTHER; note = 2'-O-methyladenosine-3'-phosphate
  modified_base 14: mod_base = OTHER; note = 2'-O-methyladenosine-3'-phosphate
  modified_base 15: mod_base = OTHER; note = 2'-O-methyluridine-3'-phosphate
  modified_base 16: mod_base = OTHER; note = 2'-O-methyladenosine-3'-phosphate
  modified_base 17: mod_base = OTHER; note = 2'-O-methyluridine-3'-phosphate
  modified_base 18: mod_base = OTHER; note = 2'-O-methyluridine-3'-phosphate
  modified_base 19: mod_base = OTHER; note = 2'-O-methyluridine-3'-phosphate
  modified_base 20: mod_base = OTHER; note = 2'-O-methyluridine-3'-phosphate
  modified_base 21: mod_base = OTHER; note = 2'-O-methylcytidine-3'-phosphate attached to N-[tris(N-acetylgalactosamine-alkyl)-amidodecanoyl)]-4-hydr oxyprolinol Hyp-(N-acetylgalactosamine-alkyl)3
ctgacagtgcacaatattttc

SEQ ID NO: 1949 - RNA, 23 nt, synthetic construct
  misc_feature 1..23: note = Description of Artificial Sequence: Synthetic oligonucleotide
  source 1..23: mol_type = other RNA
  modified_base 1: mod_base = OTHER; note = 2'-O-methylguanosine-3'- phosphorothioate
  modified_base 2: mod_base = OTHER; note = 2'-fluoroadenosine-3'-phosphorothioate
  modified_base 3: mod_base = OTHER; note = 2'-O-methyladenosine-3'-phosphate
  modified_base 4: mod_base = OTHER; note = 2'-O-methyladenosine-3'-phosphate
  modified_base 5: mod_base = OTHER; note = 2'-O-methyladenosine-3'-phosphate
  modified_base 6: mod_base = OTHER; note = 2'-fluorouridine-3'-phosphate
  modified_base 7: mod_base = OTHER; note = 2'-O-methyladenosine-3'-phosphate
  modified_base 8: mod_base = OTHER; note = 2'-fluorouridine-3'-phosphate
  modified_base 9: mod_base = OTHER; note = 2'-fluorouridine-3'-phosphate
  modified_base 10: mod_base = OTHER; note = 2'-O-methylguanosine-3'-phosphate
  modified_base 11: mod_base = OTHER; note = 2'-O-methyluridine-3'-phosphate
  modified_base 12: mod_base = OTHER; note = 2'-O-methylguanosine-3'-phosphate
  modified_base 13: mod_base = OTHER; note = 2'-O-methylcytidine-3'-phosphate
  modified_base 14: mod_base = OTHER; note = 2'-fluoroadenosine-3'-phosphate
  modified_base 15: mod_base = OTHER; note = 2'-O-methylcytidine-3'-phosphate
  modified_base 16: mod_base = OTHER; note = 2'-fluorouridine-3'-phosphate
  modified_base 17: mod_base = OTHER; note = 2'-O-methylguanosine-3'-phosphate
  modified_base 18: mod_base = OTHER; note = 2'-O-methyluridine-3'-phosphate
  modified_base 19: mod_base = OTHER; note = 2'-O-methylcytidine-3'-phosphate
  modified_base 20: mod_base = OTHER; note = 2'-O-methyladenosine-3'-phosphate
  modified_base 21: mod_base = OTHER; note = 2'-O-methylguanosine-3'- phosphorothioate
  modified_base 22: mod_base = OTHER; note = 2'-O-methyladenosine-3'- phosphorothioate
  modified_base 23: mod_base = OTHER; note = 2'-O-methyluridine-3'-phosphate
gaaaatattgtgcactgtcagat

SEQ ID NO: 1950 - RNA, 21 nt, synthetic construct
  misc_feature 1..21: note = Description of Artificial Sequence: Synthetic oligonucleotide
  source 1..21: mol_type = other RNA
  modified_base 1: mod_base = OTHER; note = 2'-O-methyladenosine-3'- phosphorothioate
  modified_base 2: mod_base = OTHER; note = 2'-O-methyladenosine-3'- phosphorothioate
  modified_base 3: mod_base = OTHER; note = 2'-O-methylguanosine-3'-phosphate
  modified_base 4: mod_base = OTHER; note = 2'-O-methyladenosine-3'-phosphate
  modified_base 5: mod_base = OTHER; note = 2'-O-methyluridine-3'-phosphate
  modified_base 6: mod_base = OTHER; note = 2'-O-methylcytidine-3'-phosphate
  modified_base 7: mod_base = OTHER; note = 2'-fluorouridine-3'-phosphate
  modified_base 8: mod_base = OTHER; note = 2'-O-methylguanosine-3'-phosphate
  modified_base 9: mod_base = OTHER; note = 2'-fluoroadenosine-3'-phosphate
  modified_base 10: mod_base = OTHER; note = 2'-fluorocytidine-3'-phosphate
  modified_base 11: mod_base = OTHER; note = 2'-fluoroadenosine-3'-phosphate
  modified_base 12: mod_base = OTHER; note = 2'-O-methylguanosine-3'-phosphate
  modified_base 13: mod_base = OTHER; note = 2'-O-methyluridine-3'-phosphate
  modified_base 14: mod_base = OTHER; note = 2'-O-methylguanosine-3'-phosphate
  modified_base 15: mod_base = OTHER; note = 2'-O-methylcytidine-3'-phosphate
  modified_base 16: mod_base = OTHER; note = 2'-O-methyladenosine-3'-phosphate
  modified_base 17: mod_base = OTHER; note = 2'-O-methylcytidine-3'-phosphate
  modified_base 18: mod_base = OTHER; note = 2'-O-methyladenosine-3'-phosphate
  modified_base 19: mod_base = OTHER; note = 2'-O-methyladenosine-3'-phosphate
  modified_base 20: mod_base = OTHER; note = 2'-O-methyluridine-3'-phosphate
  modified_base 21: mod_base = OTHER; note = 2'-O-methyladenosine-3'-phosphate attached to N-[tris(N-acetylgalactosamine-alkyl)-amidodecanoyl)]-4-hydr oxyprolinol Hyp-(N-acetylgalactosamine-alkyl)3
aagatctgacagtgcacaata

SEQ ID NO: 1951 - RNA, 23 nt, synthetic construct
  misc_feature 1..23: note = Description of Artificial Sequence: Synthetic oligonucleotide
  source 1..23: mol_type = other RNA
  modified_base 1: mod_base = OTHER; note = 2'-O-methyluridine-3'-phosphorothioate
  modified_base 2: mod_base = OTHER; note = 2'-fluoroadenosine-3'-phosphorothioate
  modified_base 3: mod_base = OTHER; note = 2'-O-methyluridine-3'-phosphate
  modified_base 4: mod_base = OTHER; note = 2'-O-methyluridine-3'-phosphate
  modified_base 5: mod_base = OTHER; note = 2'-O-methylguanosine-3'-phosphate
  modified_base 6: mod_base = OTHER; note = 2'-fluorouridine-3'-phosphate
  modified_base 7: mod_base = OTHER; note = 2'-O-methylguanosine-3'-phosphate
  modified_base 8: mod_base = OTHER; note = 2'-fluorocytidine-3'-phosphate
  modified_base 9: mod_base = OTHER; note = 2'-fluoroadenosine-3'-phosphate
  modified_base 10: mod_base = OTHER; note = 2'-O-methylcytidine-3'-phosphate
  modified_base 11: mod_base = OTHER; note = 2'-O-methyluridine-3'-phosphate
  modified_base 12: mod_base = OTHER; note = 2'-O-methylguanosine-3'-phosphate
  modified_base 13: mod_base = OTHER; note = 2'-O-methyluridine-3'-phosphate
  modified_base 14: mod_base = OTHER; note = 2'-fluorocytidine-3'-phosphate
  modified_base 15: mod_base = OTHER; note = 2'-O-methyladenosine-3'-phosphate
  modified_base 16: mod_base = OTHER; note = 2'-fluoroguanosine-3'-phosphate
  modified_base 17: mod_base = OTHER; note = 2'-O-methyladenosine-3'-phosphate
  modified_base 18: mod_base = OTHER; note = 2'-O-methyluridine-3'-phosphate
  modified_base 19: mod_base = OTHER; note = 2'-O-methylcytidine-3'-phosphate
  modified_base 20: mod_base = OTHER; note = 2'-O-methyluridine-3'-phosphate
  modified_base 21: mod_base = OTHER; note = 2'-O-methyluridine-3'-phosphorothioate
  modified_base 22: mod_base = OTHER; note = 2'-O-methylguanosine-3'- phosphorothioate
  modified_base 23: mod_base = OTHER; note = 2'-O-methylguanosine-3'-phosphate
tattgtgcactgtcagatcttgg

SEQ ID NO: 1952 - RNA, 21 nt, synthetic construct
  misc_feature 1..21: note = Description of Artificial Sequence: Synthetic oligonucleotide
  source 1..21: mol_type = other RNA
  modified_base 1: mod_base = OTHER; note = 2'-O-methylcytidine-3'- phosphorothioate
  modified_base 2: mod_base = OTHER; note = 2'-O-methyladenosine-3'- phosphorothioate
  modified_base 3: mod_base = OTHER; note = 2'-O-methyladenosine-3'-phosphate
  modified_base 4: mod_base = OTHER; note = 2'-O-methylguanosine-3'-phosphate
  modified_base 5: mod_base = OTHER; note = 2'-O-methyladenosine-3'-phosphate
  modified_base 6: mod_base = OTHER; note = 2'-O-methyluridine-3'-phosphate
  modified_base 7: mod_base = OTHER; note = 2'-fluorocytidine-3'-phosphate
  modified_base 8: mod_base = OTHER; note = 2'-O-methyluridine-3'-phosphate
  modified_base 9: mod_base = OTHER; note = 2'-fluoroguanosine-3'-phosphate
  modified_base 10: mod_base = OTHER; note = 2'-fluoroadenosine-3'-phosphate
  modified_base 11: mod_base = OTHER; note = 2'-fluorocytidine-3'-phosphate
  modified_base 12: mod_base = OTHER; note = 2'-O-methyladenosine-3'-phosphate
  modified_base 13: mod_base = OTHER; note = 2'-O-methylguanosine-3'-phosphate
  modified_base 14: mod_base = OTHER; note = 2'-O-methyluridine-3'-phosphate
  modified_base 15: mod_base = OTHER; note = 2'-O-methylguanosine-3'-phosphate
  modified_base 16: mod_base = OTHER; note = 2'-O-methylcytidine-3'-phosphate
  modified_base 17: mod_base = OTHER; note = 2'-O-methyladenosine-3'-phosphate
  modified_base 18: mod_base = OTHER; note = 2'-O-methylcytidine-3'-phosphate
  modified_base 19: mod_base = OTHER; note = 2'-O-methyladenosine-3'-phosphate
  modified_base 20: mod_base = OTHER; note = 2'-O-methyladenosine-3'-phosphate
  modified_base 21: mod_base = OTHER; note = 2'-O-methyluridine-3'-phosphate attached to N-[tris(N-acetylgalactosamine-alkyl)-amidodecanoyl)]-4-hydr oxyprolinol Hyp-(N-acetylgalactosamine-alkyl)3
caagatctgacagtgcacaat

SEQ ID NO: 1953 - RNA, 23 nt, synthetic construct
  misc_feature 1..23: note = Description of Artificial Sequence: Synthetic oligonucleotide
  source 1..23: mol_type = other RNA
  modified_base 1: mod_base = OTHER; note = 2'-O-methyladenosine-3'- phosphorothioate
  modified_base 2: mod_base = OTHER; note = 2'-fluorouridine -3'-phosphorothioate
  modified_base 3: mod_base = OTHER; note = 2'-O-methyluridine-3'-phosphate
  modified_base 4: mod_base = OTHER; note = 2'-O-methylguanosine-3'-phosphate
  modified_base 5: mod_base = OTHER; note = 2'-O-methyluridine-3'-phosphate
  modified_base 6: mod_base = OTHER; note = 2'-fluoroguanosine-3'-phosphate
  modified_base 7: mod_base = OTHER; note = 2'-O-methylcytidine-3'-phosphate
  modified_base 8: mod_base = OTHER; note = 2'-fluoroadenosine-3'-phosphate
  modified_base 9: mod_base = OTHER; note = 2'-fluorocytidine-3'-phosphate
  modified_base 10: mod_base = OTHER; note = 2'-O-methyluridine-3'-phosphate
  modified_base 11: mod_base = OTHER; note = 2'-O-methylguanosine-3'-phosphate
  modified_base 12: mod_base = OTHER; note = 2'-O-methyluridine-3'-phosphate
  modified_base 13: mod_base = OTHER; note = 2'-O-methylcytidine-3'-phosphate
  modified_base 14: mod_base = OTHER; note = 2'-fluoroadenosine-3'-phosphate
  modified_base 15: mod_base = OTHER; note = 2'-O-methylguanosine-3'-phosphate
  modified_base 16: mod_base = OTHER; note = 2'-fluoroadenosine-3'-phosphate
  modified_base 17: mod_base = OTHER; note = 2'-O-methyluridine-3'-phosphate
  modified_base 18: mod_base = OTHER; note = 2'-O-methylcytidine-3'-phosphate
  modified_base 19: mod_base = OTHER; note = 2'-O-methyluridine-3'-phosphate
  modified_base 20: mod_base = OTHER; note = 2'-O-methyluridine-3'-phosphate
  modified_base 21: mod_base = OTHER; note = 2'-O-methylguanosine-3'- phosphorothioate
  modified_base 22: mod_base = OTHER; note = 2'-O-methylguanosine-3'- phosphorothioate
  modified_base 23: mod_base = OTHER; note = 2'-O-methyladenosine-3'-phosphate
attgtgcactgtcagatcttgga

SEQ ID NO: 1954 - RNA, 21 nt, synthetic construct
  misc_feature 1..21: note = Description of Artificial Sequence: Synthetic oligonucleotide
  source 1..21: mol_type = other RNA
  modified_base 1: mod_base = OTHER; note = 2'-O-methyladenosine-3'- phosphorothioate
  modified_base 2: mod_base = OTHER; note = 2'-O-methylcytidine-3'- phosphorothioate
  modified_base 3: mod_base = OTHER; note = 2'-O-methyluridine-3'-phosphate
  modified_base 4: mod_base = OTHER; note = 2'-O-methylguanosine-3'-phosphate
  modified_base 5: mod_base = OTHER; note = 2'-O-methyladenosine-3'-phosphate
  modified_base 6: mod_base = OTHER; note = 2'-O-methyluridine-3'-phosphate
  modified_base 7: mod_base = OTHER; note = 2'-fluoroguanosine-3'-phosphate
  modified_base 8: mod_base = OTHER; note = 2'-O-methyluridine-3'-phosphate
  modified_base 9: mod_base = OTHER; note = 2'-fluorouridine-3'-phosphate
  modified_base 10: mod_base = OTHER; note = 2'-fluorocytidine-3'-phosphate
  modified_base 11: mod_base = OTHER; note = 2'-fluorouridine-3'-phosphate
  modified_base 12: mod_base = OTHER; note = 2'-O-methylguanosine-3'-phosphate
  modified_base 13: mod_base = OTHER; note = 2'-O-methyladenosine-3'-phosphate
  modified_base 14: mod_base = OTHER; note = 2'-O-methyladenosine-3'-phosphate
  modified_base 15: mod_base = OTHER; note = 2'-O-methyladenosine-3'-phosphate
  modified_base 16: mod_base = OTHER; note = 2'-O-methylguanosine-3'-phosphate
  modified_base 17: mod_base = OTHER; note = 2'-O-methylcytidine-3'-phosphate
  modified_base 18: mod_base = OTHER; note = 2'-O-methyluridine-3'-phosphate
  modified_base 19: mod_base = OTHER; note = 2'-O-methylcytidine-3'-phosphate
  modified_base 20: mod_base = OTHER; note = 2'-O-methyluridine-3'-phosphate
  modified_base 21: mod_base = OTHER; note = 2'-O-methylguanosine-3'-phosphate attached to N-[tris(N-acetylgalactosamine-alkyl)-amidodecanoyl)]-4-hydr oxyprolinol Hyp-(N-acetylgalactosamine-alkyl)3
actgatgttctgaaagctctg

SEQ ID NO: 1955 - RNA, 23 nt, synthetic construct
  misc_feature 1..23: note = Description of Artificial Sequence: Synthetic oligonucleotide
  source 1..23: mol_type = other RNA
  modified_base 1: mod_base = OTHER; note = 2'-O-methylcytidine-3'- phosphorothioate
  modified_base 2: mod_base = OTHER; note = 2'-fluoroadenosine-3'-phosphorothioate
  modified_base 3: mod_base = OTHER; note = 2'-O-methylguanosine-3'-phosphate
  modified_base 4: mod_base = OTHER; note = 2'-O-methyladenosine-3'-phosphate
  modified_base 5: mod_base = OTHER; note = 2'-O-methylguanosine-3'-phosphate
  modified_base 6: mod_base = OTHER; note = 2'-fluorocytidine-3'-phosphate
  modified_base 7: mod_base = OTHER; note = 2'-O-methyluridine-3'-phosphate
  modified_base 8: mod_base = OTHER; note = 2'-fluorouridine-3'-phosphate
  modified_base 9: mod_base = OTHER; note = 2'-fluorouridine-3'-phosphate
  modified_base 10: mod_base = OTHER; note = 2'-O-methylcytidine-3'-phosphate
  modified_base 11: mod_base = OTHER; note = 2'-O-methyladenosine-3'-phosphate
  modified_base 12: mod_base = OTHER; note = 2'-O-methylguanosine-3'-phosphate
  modified_base 13: mod_base = OTHER; note = 2'-O-methyladenosine-3'-phosphate
  modified_base 14: mod_base = OTHER; note = 2'-fluoroadenosine-3'-phosphate
  modified_base 15: mod_base = OTHER; note = 2'-O-methylcytidine-3'-phosphate
  modified_base 16: mod_base = OTHER; note = 2'-fluoroadenosine-3'-phosphate
  modified_base 17: mod_base = OTHER; note = 2'-O-methyluridine-3'-phosphate
  modified_base 18: mod_base = OTHER; note = 2'-O-methylcytidine-3'-phosphate
  modified_base 19: mod_base = OTHER; note = 2'-O-methyladenosine-3'-phosphate
  modified_base 20: mod_base = OTHER; note = 2'-O-methylguanosine-3'-phosphate
  modified_base 21: mod_base = OTHER; note = 2'-O-methyluridine-3'-phosphorothioate
  modified_base 22: mod_base = OTHER; note = 2'-O-methylguanosine-3'- phosphorothioate
  modified_base 23: mod_base = OTHER; note = 2'-O-methylcytidine-3'-phosphate
cagagctttcagaacatcagtgc

SEQ ID NO: 1956 - RNA, 21 nt, synthetic construct
  misc_feature 1..21: note = Description of Artificial Sequence: Synthetic oligonucleotide
  source 1..21: mol_type = other RNA
  modified_base 1: mod_base = OTHER; note = 2'-O-methylcytidine-3'- phosphorothioate
  modified_base 2: mod_base = OTHER; note = 2'-O-methyluridine-3'-phosphorothioate
  modified_base 3: mod_base = OTHER; note = 2'-O-methylguanosine-3'-phosphate
  modified_base 4: mod_base = OTHER; note = 2'-O-methyladenosine-3'-phosphate
  modified_base 5: mod_base = OTHER; note = 2'-O-methyluridine-3'-phosphate
  modified_base 6: mod_base = OTHER; note = 2'-O-methylguanosine-3'-phosphate
  modified_base 7: mod_base = OTHER; note = 2'-fluorouridine-3'-phosphate
  modified_base 8: mod_base = OTHER; note = 2'-O-methyluridine-3'-phosphate
  modified_base 9: mod_base = OTHER; note = 2'-fluorocytidine-3'-phosphate
  modified_base 10: mod_base = OTHER; note = 2'-fluorouridine-3'-phosphate
  modified_base 11: mod_base = OTHER; note = 2'-fluoroguanosine-3'-phosphate
  modified_base 12: mod_base = OTHER; note = 2'-O-methyladenosine-3'-phosphate
  modified_base 13: mod_base = OTHER; note = 2'-O-methyladenosine-3'-phosphate
  modified_base 14: mod_base = OTHER; note = 2'-O-methyladenosine-3'-phosphate
  modified_base 15: mod_base = OTHER; note = 2'-O-methylguanosine-3'-phosphate
  modified_base 16: mod_base = OTHER; note = 2'-O-methylcytidine-3'-phosphate
  modified_base 17: mod_base = OTHER; note = 2'-O-methyluridine-3'-phosphate
  modified_base 18: mod_base = OTHER; note = 2'-O-methylcytidine-3'-phosphate
  modified_base 19: mod_base = OTHER; note = 2'-O-methyluridine-3'-phosphate
  modified_base 20: mod_base = OTHER; note = 2'-O-methylguanosine-3'-phosphate
  modified_base 21: mod_base = OTHER; note = 2'-O-methylguanosine-3'-phosphate attached to N-[tris(N-acetylgalactosamine-alkyl)-amidodecanoyl)]-4-hydr oxyprolinol Hyp-(N-acetylgalactosamine-alkyl)3
ctgatgttctgaaagctctgg

SEQ ID NO: 1957 - RNA, 23 nt, synthetic construct
  misc_feature 1..23: note = Description of Artificial Sequence: Synthetic oligonucleotide
  source 1..23: mol_type = other RNA
  modified_base 1: mod_base = OTHER; note = 2'-O-methylcytidine-3'- phosphorothioate
  modified_base 2: mod_base = OTHER; note = 2'-fluorocytidine-3'-phosphorothioate
  modified_base 3: mod_base = OTHER; note = 2'-O-methyladenosine-3'-phosphate
  modified_base 4: mod_base = OTHER; note = 2'-O-methylguanosine-3'-phosphate
  modified_base 5: mod_base = OTHER; note = 2'-O-methyladenosine-3'-phosphate
  modified_base 6: mod_base = OTHER; note = 2'-fluoroguanosine-3'-phosphate
  modified_base 7: mod_base = OTHER; note = 2'-O-methylcytidine-3'-phosphate
  modified_base 8: mod_base = OTHER; note = 2'-fluorouridine-3'-phosphate
  modified_base 9: mod_base = OTHER; note = 2'-fluorouridine-3'-phosphate
  modified_base 10: mod_base = OTHER; note = 2'-O-methyluridine-3'-phosphate
  modified_base 11: mod_base = OTHER; note = 2'-O-methylcytidine-3'-phosphate
  modified_base 12: mod_base = OTHER; note = 2'-O-methyladenosine-3'-phosphate
  modified_base 13: mod_base = OTHER; note = 2'-O-methylguanosine-3'-phosphate
  modified_base 14: mod_base = OTHER; note = 2'-fluoroadenosine-3'-phosphate
  modified_base 15: mod_base = OTHER; note = 2'-O-methyladenosine-3'-phosphate
  modified_base 16: mod_base = OTHER; note = 2'-fluorocytidine-3'-phosphate
  modified_base 17: mod_base = OTHER; note = 2'-O-methyladenosine-3'-phosphate
  modified_base 18: mod_base = OTHER; note = 2'-O-methyluridine-3'-phosphate
  modified_base 19: mod_base = OTHER; note = 2'-O-methylcytidine-3'-phosphate
  modified_base 20: mod_base = OTHER; note = 2'-O-methyladenosine-3'-phosphate
  modified_base 21: mod_base = OTHER; note = 2'-O-methylguanosine-3'- phosphorothioate
  modified_base 22: mod_base = OTHER; note = 2'-O-methyluridine-3'-phosphorothioate
  modified_base 23: mod_base = OTHER; note = 2'-O-methylguanosine-3'-phosphate
ccagagctttcagaacatcagtg

SEQ ID NO: 1958 - RNA, 21 nt, synthetic construct
  misc_feature 1..21: note = Description of Artificial Sequence: Synthetic oligonucleotide
  source 1..21: mol_type = other RNA
  modified_base 1: mod_base = OTHER; note = 2'-O-methyladenosine-3'- phosphorothioate
  modified_base 2: mod_base = OTHER; note = 2'-O-methylguanosine-3'- phosphorothioate
  modified_base 3: mod_base = OTHER; note = 2'-O-methylguanosine-3'-phosphate
  modified_base 4: mod_base = OTHER; note = 2'-O-methylcytidine-3'-phosphate
  modified_base 5: mod_base = OTHER; note = 2'-O-methyladenosine-3'-phosphate
  modified_base 6: mod_base = OTHER; note = 2'-O-methylcytidine-3'-phosphate
  modified_base 7: mod_base = OTHER; note = 2'-fluorouridine-3'-phosphate
  modified_base 8: mod_base = OTHER; note = 2'-O-methylguanosine-3'-phosphate
  modified_base 9: mod_base = OTHER; note = 2'-fluoroadenosine-3'-phosphate
  modified_base 10: mod_base = OTHER; note = 2'-fluorouridine-3'-phosphate
  modified_base 11: mod_base = OTHER; note = 2'-fluoroguanosine-3'-phosphate
  modified_base 12: mod_base = OTHER; note = 2'-O-methyluridine-3'-phosphate
  modified_base 13: mod_base = OTHER; note = 2'-O-methyluridine-3'-phosphate
  modified_base 14: mod_base = OTHER; note = 2'-O-methylcytidine-3'-phosphate
  modified_base 15: mod_base = OTHER; note = 2'-O-methyluridine-3'-phosphate
  modified_base 16: mod_base = OTHER; note = 2'-O-methylguanosine-3'-phosphate
  modified_base 17: mod_base = OTHER; note = 2'-O-methyladenosine-3'-phosphate
  modified_base 18: mod_base = OTHER; note = 2'-O-methyladenosine-3'-phosphate
  modified_base 19: mod_base = OTHER; note = 2'-O-methyladenosine-3'-phosphate
  modified_base 20: mod_base = OTHER; note = 2'-O-methylguanosine-3'-phosphate
  modified_base 21: mod_base = OTHER; note = 2'-O-methylcytidine-3'-phosphate attached to N-[tris(N-acetylgalactosamine-alkyl)-amidodecanoyl)]-4-hydr oxyprolinol Hyp-(N-acetylgalactosamine-alkyl)3
aggcactgatgttctgaaagc

SEQ ID NO: 1959 - RNA, 23 nt, synthetic construct
  misc_feature 1..23: note = Description of Artificial Sequence: Synthetic oligonucleotide
  source 1..23: mol_type = other RNA
  modified_base 1: mod_base = OTHER; note = 2'-O-methylguanosine-3'- phosphorothioate
  modified_base 2: mod_base = OTHER; note = 2'-fluorocytidine-3'-phosphorothioate
  modified_base 3: mod_base = OTHER; note = 2'-O-methyluridine-3'-phosphate
  modified_base 4: mod_base = OTHER; note = 2'-O-methyluridine-3'-phosphate
  modified_base 5: mod_base = OTHER; note = 2'-O-methyluridine-3'-phosphate
  modified_base 6: mod_base = OTHER; note = 2'-fluorocytidine-3'-phosphate
  modified_base 7: mod_base = OTHER; note = 2'-O-methyladenosine-3'-phosphate
  modified_base 8: mod_base = OTHER; note = 2'-fluoroguanosine-3'-phosphate
  modified_base 9: mod_base = OTHER; note = 2'-fluoroadenosine-3'-phosphate
  modified_base 10: mod_base = OTHER; note = 2'-O-methyladenosine-3'-phosphate
  modified_base 11: mod_base = OTHER; note = 2'-O-methylcytidine-3'-phosphate
  modified_base 12: mod_base = OTHER; note = 2'-O-methyladenosine-3'-phosphate
  modified_base 13: mod_base = OTHER; note = 2'-O-methyluridine-3'-phosphate
  modified_base 14: mod_base = OTHER; note = 2'-fluorocytidine-3'-phosphate
  modified_base 15: mod_base = OTHER; note = 2'-O-methyladenosine-3'-phosphate
  modified_base 16: mod_base = OTHER; note = 2'-fluoroguanosine-3'-phosphate
  modified_base 17: mod_base = OTHER; note = 2'-O-methyluridine-3'-phosphate
  modified_base 18: mod_base = OTHER; note = 2'-O-methylguanosine-3'-phosphate
  modified_base 19: mod_base = OTHER; note = 2'-O-methylcytidine-3'-phosphate
  modified_base 20: mod_base = OTHER; note = 2'-O-methylcytidine-3'-phosphate
  modified_base 21: mod_base = OTHER; note = 2'-O-methyluridine-3'-phosphorothioate
  modified_base 22: mod_base = OTHER; note = 2'-O-methyluridine-3'-phosphorothioate
  modified_base 23: mod_base = OTHER; note = 2'-O-methyluridine-3'-phosphate
gctttcagaacatcagtgccttt

SEQ ID NO: 1960 - RNA, 21 nt, synthetic construct
  misc_feature 1..21: note = Description of Artificial Sequence: Synthetic oligonucleotide
  source 1..21: mol_type = other RNA
  modified_base 1: mod_base = OTHER; note = 2'-O-methyladenosine-3'- phosphorothioate
  modified_base 2: mod_base = OTHER; note = 2'-O-methyladenosine-3'- phosphorothioate
  modified_base 3: mod_base = OTHER; note = 2'-O-methylguanosine-3'-phosphate
  modified_base 4: mod_base = OTHER; note = 2'-O-methylguanosine-3'-phosphate
  modified_base 5: mod_base = OTHER; note = 2'-O-methylcytidine-3'-phosphate
  modified_base 6: mod_base = OTHER; note = 2'-O-methyladenosine-3'-phosphate
  modified_base 7: mod_base = OTHER; note = 2'-fluorocytidine-3'-phosphate
  modified_base 8: mod_base = OTHER; note = 2'-O-methyluridine-3'-phosphate
  modified_base 9: mod_base = OTHER; note = 2'-fluoroguanosine-3'-phosphate
  modified_base 10: mod_base = OTHER; note = 2'-fluoroadenosine-3'-phosphate
  modified_base 11: mod_base = OTHER; note = 2'-fluorouridine-3'-phosphate
  modified_base 12: mod_base = OTHER; note = 2'-O-methylguanosine-3'-phosphate
  modified_base 13: mod_base = OTHER; note = 2'-O-methyluridine-3'-phosphate
  modified_base 14: mod_base = OTHER; note = 2'-O-methyluridine-3'-phosphate
  modified_base 15: mod_base = OTHER; note = 2'-O-methylcytidine-3'-phosphate
  modified_base 16: mod_base = OTHER; note = 2'-O-methyluridine-3'-phosphate
  modified_base 17: mod_base = OTHER; note = 2'-O-methylguanosine-3'-phosphate
  modified_base 18: mod_base = OTHER; note = 2'-O-methyladenosine-3'-phosphate
  modified_base 19: mod_base = OTHER; note = 2'-O-methyladenosine-3'-phosphate
  modified_base 20: mod_base = OTHER; note = 2'-O-methyladenosine-3'-phosphate
  modified_base 21: mod_base = OTHER; note = 2'-O-methylguanosine-3'-phosphate attached to N-[tris(N-acetylgalactosamine-alkyl)-amidodecanoyl)]-4-hydr oxyprolinol Hyp-(N-acetylgalactosamine-alkyl)3
aaggcactgatgttctgaaag

SEQ ID NO: 1961 - RNA, 23 nt, synthetic construct
  misc_feature 1..23: note = Description of Artificial Sequence: Synthetic oligonucleotide
  source 1..23: mol_type = other RNA
  modified_base 1: mod_base = OTHER; note = 2'-O-methylcytidine-3'- phosphorothioate
  modified_base 2: mod_base = OTHER; note = 2'-fluorouridine -3'-phosphorothioate
  modified_base 3: mod_base = OTHER; note = 2'-O-methyluridine-3'-phosphate
  modified_base 4: mod_base = OTHER; note = 2'-O-methyluridine-3'-phosphate
  modified_base 5: mod_base = OTHER; note = 2'-O-methylcytidine-3'-phosphate
  modified_base 6: mod_base = OTHER; note = 2'-fluoroadenosine-3'-phosphate
  modified_base 7: mod_base = OTHER; note = 2'-O-methylguanosine-3'-phosphate
  modified_base 8: mod_base = OTHER; note = 2'-fluoroadenosine-3'-phosphate
  modified_base 9: mod_base = OTHER; note = 2'-fluoroadenosine-3'-phosphate
  modified_base 10: mod_base = OTHER; note = 2'-O-methylcytidine-3'-phosphate
  modified_base 11: mod_base = OTHER; note = 2'-O-methyladenosine-3'-phosphate
  modified_base 12: mod_base = OTHER; note = 2'-O-methyluridine-3'-phosphate
  modified_base 13: mod_base = OTHER; note = 2'-O-methylcytidine-3'-phosphate
  modified_base 14: mod_base = OTHER; note = 2'-fluoroadenosine-3'-phosphate
  modified_base 15: mod_base = OTHER; note = 2'-O-methylguanosine-3'-phosphate
  modified_base 16: mod_base = OTHER; note = 2'-fluorouridine-3'-phosphate
  modified_base 17: mod_base = OTHER; note = 2'-O-methylguanosine-3'-phosphate
  modified_base 18: mod_base = OTHER; note = 2'-O-methylcytidine-3'-phosphate
  modified_base 19: mod_base = OTHER; note = 2'-O-methylcytidine-3'-phosphate
  modified_base 20: mod_base = OTHER; note = 2'-O-methyluridine-3'-phosphate
  modified_base 21: mod_base = OTHER; note = 2'-O-methyluridine-3'-phosphorothioate
  modified_base 22: mod_base = OTHER; note = 2'-O-methyluridine-3'-phosphorothioate
  modified_base 23: mod_base = OTHER; note = 2'-O-methylcytidine-3'-phosphate
ctttcagaacatcagtgcctttc

SEQ ID NO: 1962 - RNA, 21 nt, synthetic construct
  misc_feature 1..21: note = Description of Artificial Sequence: Synthetic oligonucleotide
  source 1..21: mol_type = other RNA
  modified_base 1: mod_base = OTHER; note = 2'-O-methyladenosine-3'- phosphorothioate
  modified_base 2: mod_base = OTHER; note = 2'-O-methyladenosine-3'- phosphorothioate
  modified_base 3: mod_base = OTHER; note = 2'-O-methylcytidine-3'-phosphate
  modified_base 4: mod_base = OTHER; note = 2'-O-methyladenosine-3'-phosphate
  modified_base 5: mod_base = OTHER; note = 2'-O-methyladenosine-3'-phosphate
  modified_base 6: mod_base = OTHER; note = 2'-O-methylcytidine-3'-phosphate
  modified_base 7: mod_base = OTHER; note = 2'-fluoroadenosine-3'-phosphate
  modified_base 8: mod_base = OTHER; note = 2'-O-methyluridine-3'-phosphate
  modified_base 9: mod_base = OTHER; note = 2'-fluoroguanosine-3'-phosphate
  modified_base 10: mod_base = OTHER; note = 2'-fluorocytidine-3'-phosphate
  modified_base 11: mod_base = OTHER; note = 2'-fluorouridine-3'-phosphate
  modified_base 12: mod_base = OTHER; note = 2'-O-methyladenosine-3'-phosphate
  modified_base 13: mod_base = OTHER; note = 2'-O-methyladenosine-3'-phosphate
  modified_base 14: mod_base = OTHER; note = 2'-O-methyladenosine-3'-phosphate
  modified_base 15: mod_base = OTHER; note = 2'-O-methyluridine-3'-phosphate
  modified_base 16: mod_base = OTHER; note = 2'-O-methylcytidine-3'-phosphate
  modified_base 17: mod_base = OTHER; note = 2'-O-methyladenosine-3'-phosphate
  modified_base 18: mod_base = OTHER; note = 2'-O-methylguanosine-3'-phosphate
  modified_base 19: mod_base = OTHER; note = 2'-O-methyluridine-3'-phosphate
  modified_base 20: mod_base = OTHER; note = 2'-O-methyladenosine-3'-phosphate
  modified_base 21: mod_base = OTHER; note = 2'-O-methylcytidine-3'-phosphate attached to N-[tris(N-acetylgalactosamine-alkyl)-amidodecanoyl)]-4-hydr oxyprolinol Hyp-(N-acetylgalactosamine-alkyl)3
aacaacatgctaaatcagtac

SEQ ID NO: 1963 - RNA, 23 nt, synthetic construct
  misc_feature 1..23: note = Description of Artificial Sequence: Synthetic oligonucleotide
  source 1..23: mol_type = other RNA
  modified_base 1: mod_base = OTHER; note = 2'-O-methylguanosine-3'- phosphorothioate
  modified_base 2: mod_base = OTHER; note = 2'-fluorouridine -3'-phosphorothioate
  modified_base 3: mod_base = OTHER; note = 2'-O-methyladenosine-3'-phosphate
  modified_base 4: mod_base = OTHER; note = 2'-O-methylcytidine-3'-phosphate
  modified_base 5: mod_base = OTHER; note = 2'-O-methyluridine-3'-phosphate
  modified_base 6: mod_base = OTHER; note = 2'-fluoroguanosine-3'-phosphate
  modified_base 7: mod_base = OTHER; note = 2'-O-methyladenosine-3'-phosphate
  modified_base 8: mod_base = OTHER; note = 2'-fluorouridine-3'-phosphate
  modified_base 9: mod_base = OTHER; note = 2'-fluorouridine-3'-phosphate
  modified_base 10: mod_base = OTHER; note = 2'-O-methyluridine-3'-phosphate
  modified_base 11: mod_base = OTHER; note = 2'-O-methyladenosine-3'-phosphate
  modified_base 12: mod_base = OTHER; note = 2'-O-methylguanosine-3'-phosphate
  modified_base 13: mod_base = OTHER; note = 2'-O-methylcytidine-3'-phosphate
  modified_base 14: mod_base = OTHER; note = 2'-fluoroadenosine-3'-phosphate
  modified_base 15: mod_base = OTHER; note = 2'-O-methyluridine-3'-phosphate
  modified_base 16: mod_base = OTHER; note = 2'-fluoroguanosine-3'-phosphate
  modified_base 17: mod_base = OTHER; note = 2'-O-methyluridine-3'-phosphate
  modified_base 18: mod_base = OTHER; note = 2'-O-methyluridine-3'-phosphate
  modified_base 19: mod_base = OTHER; note = 2'-O-methylguanosine-3'-phosphate
  modified_base 20: mod_base = OTHER; note = 2'-O-methyluridine-3'-phosphate
  modified_base 21: mod_base = OTHER; note = 2'-O-methyluridine-3'-phosphorothioate
  modified_base 22: mod_base = OTHER; note = 2'-O-methylcytidine-3'- phosphorothioate
  modified_base 23: mod_base = OTHER; note = 2'-O-methyladenosine-3'-phosphate
gtactgatttagcatgttgttca

SEQ ID NO: 1964 - RNA, 21 nt, synthetic construct
  misc_feature 1..21: note = Description of Artificial Sequence: Synthetic oligonucleotide
  source 1..21: mol_type = other RNA
  modified_base 1: mod_base = OTHER; note = 2'-O-methyladenosine-3'- phosphorothioate
  modified_base 2: mod_base = OTHER; note = 2'-O-methylcytidine-3'- phosphorothioate
  modified_base 3: mod_base = OTHER; note = 2'-O-methyladenosine-3'-phosphate
  modified_base 4: mod_base = OTHER; note = 2'-O-methyladenosine-3'-phosphate
  modified_base 5: mod_base = OTHER; note = 2'-O-methylcytidine-3'-phosphate
  modified_base 6: mod_base = OTHER; note = 2'-O-methyladenosine-3'-phosphate
  modified_base 7: mod_base = OTHER; note = 2'-fluorouridine-3'-phosphate
  modified_base 8: mod_base = OTHER; note = 2'-O-methylguanosine-3'-phosphate
  modified_base 9: mod_base = OTHER; note = 2'-fluorocytidine-3'-phosphate
  modified_base 10: mod_base = OTHER; note = 2'-fluorouridine-3'-phosphate
  modified_base 11: mod_base = OTHER; note = 2'-fluoroadenosine-3'-phosphate
  modified_base 12: mod_base = OTHER; note = 2'-O-methyladenosine-3'-phosphate
  modified_base 13: mod_base = OTHER; note = 2'-O-methyladenosine-3'-phosphate
  modified_base 14: mod_base = OTHER; note = 2'-O-methyluridine-3'-phosphate
  modified_base 15: mod_base = OTHER; note = 2'-O-methylcytidine-3'-phosphate
  modified_base 16: mod_base = OTHER; note = 2'-O-methyladenosine-3'-phosphate
  modified_base 17: mod_base = OTHER; note = 2'-O-methylguanosine-3'-phosphate
  modified_base 18: mod_base = OTHER; note = 2'-O-methyluridine-3'-phosphate
  modified_base 19: mod_base = OTHER; note = 2'-O-methyladenosine-3'-phosphate
  modified_base 20: mod_base = OTHER; note = 2'-O-methylcytidine-3'-phosphate
  modified_base 21: mod_base = OTHER; note = 2'-O-methyluridine-3'-phosphate attached to N-[tris(N-acetylgalactosamine-alkyl)-amidodecanoyl)]-4-hydr oxyprolinol Hyp-(N-acetylgalactosamine-alkyl)3
acaacatgctaaatcagtact

SEQ ID NO: 1965 - RNA, 23 nt, synthetic construct
  misc_feature 1..23: note = Description of Artificial Sequence: Synthetic oligonucleotide
  source 1..23: mol_type = other RNA
  modified_base 1: mod_base = OTHER; note = 2'-O-methyladenosine-3'- phosphorothioate
  modified_base 2: mod_base = OTHER; note = 2'-fluoroguanosine-3'-phosphorothioate
  modified_base 3: mod_base = OTHER; note = 2'-O-methyluridine-3'-phosphate
  modified_base 4: mod_base = OTHER; note = 2'-O-methyladenosine-3'-phosphate
  modified_base 5: mod_base = OTHER; note = 2'-O-methylcytidine-3'-phosphate
  modified_base 6: mod_base = OTHER; note = 2'-fluorouridine-3'-phosphate
  modified_base 7: mod_base = OTHER; note = 2'-O-methylguanosine-3'-phosphate
  modified_base 8: mod_base = OTHER; note = 2'-fluoroadenosine-3'-phosphate
  modified_base 9: mod_base = OTHER; note = 2'-fluorouridine-3'-phosphate
  modified_base 10: mod_base = OTHER; note = 2'-O-methyluridine-3'-phosphate
  modified_base 11: mod_base = OTHER; note = 2'-O-methyluridine-3'-phosphate
  modified_base 12: mod_base = OTHER; note = 2'-O-methyladenosine-3'-phosphate
  modified_base 13: mod_base = OTHER; note = 2'-O-methylguanosine-3'-phosphate
  modified_base 14: mod_base = OTHER; note = 2'-fluorocytidine-3'-phosphate
  modified_base 15: mod_base = OTHER; note = 2'-O-methyladenosine-3'-phosphate
  modified_base 16: mod_base = OTHER; note = 2'-fluorouridine-3'-phosphate
  modified_base 17: mod_base = OTHER; note = 2'-O-methylguanosine-3'-phosphate
  modified_base 18: mod_base = OTHER; note = 2'-O-methyluridine-3'-phosphate
  modified_base 19: mod_base = OTHER; note = 2'-O-methyluridine-3'-phosphate
  modified_base 20: mod_base = OTHER; note = 2'-O-methylguanosine-3'-phosphate
  modified_base 21: mod_base = OTHER; note = 2'-O-methyluridine-3'-phosphorothioate
  modified_base 22: mod_base = OTHER; note = 2'-O-methyluridine-3'-phosphorothioate
  modified_base 23: mod_base = OTHER; note = 2'-O-methylcytidine-3'-phosphate
agtactgatttagcatgttgttc

SEQ ID NO: 1966 - RNA, 21 nt, synthetic construct
  misc_feature 1..21: note = Description of Artificial Sequence: Synthetic oligonucleotide
  source 1..21: mol_type = other RNA
  modified_base 1: mod_base = OTHER; note = 2'-O-methyluridine-3'-phosphorothioate
  modified_base 2: mod_base = OTHER; note = 2'-O-methyladenosine-3'- phosphorothioate
  modified_base 3: mod_base = OTHER; note = 2'-O-methyluridine-3'-phosphate
  modified_base 4: mod_base = OTHER; note = 2'-O-methylguanosine-3'-phosphate
  modified_base 5: mod_base = OTHER; note = 2'-O-methyladenosine-3'-phosphate
  modified_base 6: mod_base = OTHER; note = 2'-O-methyladenosine-3'-phosphate
  modified_base 7: mod_base = OTHER; note = 2'-fluorocytidine-3'-phosphate
  modified_base 8: mod_base = OTHER; note = 2'-O-methyladenosine-3'-phosphate
  modified_base 9: mod_base = OTHER; note = 2'-fluoroadenosine-3'-phosphate
  modified_base 10: mod_base = OTHER; note = 2'-fluorocytidine-3'-phosphate
  modified_base 11: mod_base = OTHER; note = 2'-fluoroadenosine-3'-phosphate
  modified_base 12: mod_base = OTHER; note = 2'-O-methyluridine-3'-phosphate
  modified_base 13: mod_base = OTHER; note = 2'-O-methylguanosine-3'-phosphate
  modified_base 14: mod_base = OTHER; note = 2'-O-methylcytidine-3'-phosphate
  modified_base 15: mod_base = OTHER; note = 2'-O-methyluridine-3'-phosphate
  modified_base 16: mod_base = OTHER; note = 2'-O-methyladenosine-3'-phosphate
  modified_base 17: mod_base = OTHER; note = 2'-O-methyladenosine-3'-phosphate
  modified_base 18: mod_base = OTHER; note = 2'-O-methyladenosine-3'-phosphate
  modified_base 19: mod_base = OTHER; note = 2'-O-methyluridine-3'-phosphate
  modified_base 20: mod_base = OTHER; note = 2'-O-methylcytidine-3'-phosphate
  modified_base 21: mod_base = OTHER; note = 2'-O-methyladenosine-3'-phosphate attached to N-[tris(N-acetylgalactosamine-alkyl)-amidodecanoyl)]-4-hydr oxyprolinol Hyp-(N-acetylgalactosamine-alkyl)3
tatgaacaacatgctaaatca

SEQ ID NO: 1967 - RNA, 23 nt, synthetic construct
  misc_feature 1..23: note = Description of Artificial Sequence: Synthetic oligonucleotide
  source 1..23: mol_type = other RNA
  modified_base 1: mod_base = OTHER; note = 2'-O-methyluridine-3'-phosphorothioate
  modified_base 2: mod_base = OTHER; note = 2'-fluoroguanosine-3'-phosphorothioate
  modified_base 3: mod_base = OTHER; note = 2'-O-methyladenosine-3'-phosphate
  modified_base 4: mod_base = OTHER; note = 2'-O-methyluridine-3'-phosphate
  modified_base 5: mod_base = OTHER; note = 2'-O-methyluridine-3'-phosphate
  modified_base 6: mod_base = OTHER; note = 2'-fluorouridine-3'-phosphate
  modified_base 7: mod_base = OTHER; note = 2'-O-methyladenosine-3'-phosphate
  modified_base 8: mod_base = OTHER; note = 2'-fluoroguanosine-3'-phosphate
  modified_base 9: mod_base = OTHER; note = 2'-fluorocytidine-3'-phosphate
  modified_base 10: mod_base = OTHER; note = 2'-O-methyladenosine-3'-phosphate
  modified_base 11: mod_base = OTHER; note = 2'-O-methyluridine-3'-phosphate
  modified_base 12: mod_base = OTHER; note = 2'-O-methylguanosine-3'-phosphate
  modified_base 13: mod_base = OTHER; note = 2'-O-methyluridine-3'-phosphate
  modified_base 14: mod_base = OTHER; note = 2'-fluorouridine-3'-phosphate
  modified_base 15: mod_base = OTHER; note = 2'-O-methylguanosine-3'-phosphate
  modified_base 16: mod_base = OTHER; note = 2'-fluorouridine-3'-phosphate
  modified_base 17: mod_base = OTHER; note = 2'-O-methyluridine-3'-phosphate
  modified_base 18: mod_base = OTHER; note = 2'-O-methylcytidine-3'-phosphate
  modified_base 19: mod_base = OTHER; note = 2'-O-methyladenosine-3'-phosphate
  modified_base 20: mod_base = OTHER; note = 2'-O-methyluridine-3'-phosphate
  modified_base 21: mod_base = OTHER; note = 2'-O-methyladenosine-3'- phosphorothioate
  modified_base 22: mod_base = OTHER; note = 2'-O-methyladenosine-3'- phosphorothioate
  modified_base 23: mod_base = OTHER; note = 2'-O-methyluridine-3'-phosphate
tgatttagcatgttgttcataat

SEQ ID NO: 1968 - RNA, 21 nt, synthetic construct
  misc_feature 1..21: note = Description of Artificial Sequence: Synthetic oligonucleotide
  source 1..21: mol_type = other RNA
  modified_base 1: mod_base = OTHER; note = 2'-O-methyluridine-3'-phosphorothioate
  modified_base 2: mod_base = OTHER; note = 2'-O-methyluridine-3'-phosphorothioate
  modified_base 3: mod_base = OTHER; note = 2'-O-methyladenosine-3'-phosphate
  modified_base 4: mod_base = OTHER; note = 2'-O-methyluridine-3'-phosphate
  modified_base 5: mod_base = OTHER; note = 2'-O-methylguanosine-3'-phosphate
  modified_base 6: mod_base = OTHER; note = 2'-O-methyladenosine-3'-phosphate
  modified_base 7: mod_base = OTHER; note = 2'-fluoroadenosine-3'-phosphate
  modified_base 8: mod_base = OTHER; note = 2'-O-methylcytidine-3'-phosphate
  modified_base 9: mod_base = OTHER; note = 2'-fluoroadenosine-3'-phosphate
  modified_base 10: mod_base = OTHER; note = 2'-fluoroadenosine-3'-phosphate
  modified_base 11: mod_base = OTHER; note = 2'-fluorocytidine-3'-phosphate
  modified_base 12: mod_base = OTHER; note = 2'-O-methyladenosine-3'-phosphate
  modified_base 13: mod_base = OTHER; note = 2'-O-methyluridine-3'-phosphate
  modified_base 14: mod_base = OTHER; note = 2'-O-methylguanosine-3'-phosphate
  modified_base 15: mod_base = OTHER; note = 2'-O-methylcytidine-3'-phosphate
  modified_base 16: mod_base = OTHER; note = 2'-O-methyluridine-3'-phosphate
  modified_base 17: mod_base = OTHER; note = 2'-O-methyladenosine-3'-phosphate
  modified_base 18: mod_base = OTHER; note = 2'-O-methyladenosine-3'-phosphate
  modified_base 19: mod_base = OTHER; note = 2'-O-methyladenosine-3'-phosphate
  modified_base 20: mod_base = OTHER; note = 2'-O-methyluridine-3'-phosphate
  modified_base 21: mod_base = OTHER; note = 2'-O-methylcytidine-3'-phosphate attached to N-[tris(N-acetylgalactosamine-alkyl)-amidodecanoyl)]-4-hydr oxyprolinol Hyp-(N-acetylgalactosamine-alkyl)3
ttatgaacaacatgctaaatc

SEQ ID NO: 1969 - RNA, 23 nt, synthetic construct
  misc_feature 1..23: note = Description of Artificial Sequence: Synthetic oligonucleotide
  source 1..23: mol_type = other RNA
  modified_base 1: mod_base = OTHER; note = 2'-O-methylguanosine-3'- phosphorothioate
  modified_base 2: mod_base = OTHER; note = 2'-fluoroadenosine-3'-phosphorothioate
  modified_base 3: mod_base = OTHER; note = 2'-O-methyluridine-3'-phosphate
  modified_base 4: mod_base = OTHER; note = 2'-O-methyluridine-3'-phosphate
  modified_base 5: mod_base = OTHER; note = 2'-O-methyluridine-3'-phosphate
  modified_base 6: mod_base = OTHER; note = 2'-fluoroadenosine-3'-phosphate
  modified_base 7: mod_base = OTHER; note = 2'-O-methylguanosine-3'-phosphate
  modified_base 8: mod_base = OTHER; note = 2'-fluorocytidine-3'-phosphate
  modified_base 9: mod_base = OTHER; note = 2'-fluoroadenosine-3'-phosphate
  modified_base 10: mod_base = OTHER; note = 2'-O-methyluridine-3'-phosphate
  modified_base 11: mod_base = OTHER; note = 2'-O-methylguanosine-3'-phosphate
  modified_base 12: mod_base = OTHER; note = 2'-O-methyluridine-3'-phosphate
  modified_base 13: mod_base = OTHER; note = 2'-O-methyluridine-3'-phosphate
  modified_base 14: mod_base = OTHER; note = 2'-fluoroguanosine-3'-phosphate
  modified_base 15: mod_base = OTHER; note = 2'-O-methyluridine-3'-phosphate
  modified_base 16: mod_base = OTHER; note = 2'-fluorouridine-3'-phosphate
  modified_base 17: mod_base = OTHER; note = 2'-O-methylcytidine-3'-phosphate
  modified_base 18: mod_base = OTHER; note = 2'-O-methyladenosine-3'-phosphate
  modified_base 19: mod_base = OTHER; note = 2'-O-methyluridine-3'-phosphate
  modified_base 20: mod_base = OTHER; note = 2'-O-methyladenosine-3'-phosphate
  modified_base 21: mod_base = OTHER; note = 2'-O-methyladenosine-3'- phosphorothioate
  modified_base 22: mod_base = OTHER; note = 2'-O-methyluridine-3'-phosphorothioate
  modified_base 23: mod_base = OTHER; note = 2'-O-methylcytidine-3'-phosphate
gatttagcatgttgttcataatc

SEQ ID NO: 1970 - RNA, 21 nt, synthetic construct
  misc_feature 1..21: note = Description of Artificial Sequence: Synthetic oligonucleotide
  source 1..21: mol_type = other RNA
  modified_base 1: mod_base = OTHER; note = 2'-O-methyluridine-3'-phosphorothioate
  modified_base 2: mod_base = OTHER; note = 2'-O-methylcytidine-3'- phosphorothioate
  modified_base 3: mod_base = OTHER; note = 2'-O-methyluridine-3'-phosphate
  modified_base 4: mod_base = OTHER; note = 2'-O-methyluridine-3'-phosphate
  modified_base 5: mod_base = OTHER; note = 2'-O-methyluridine-3'-phosphate
  modified_base 6: mod_base = OTHER; note = 2'-O-methyladenosine-3'-phosphate
  modified_base 7: mod_base = OTHER; note = 2'-fluoroguanosine-3'-phosphate
  modified_base 8: mod_base = OTHER; note = 2'-O-methyluridine-3'-phosphate
  modified_base 9: mod_base = OTHER; note = 2'-fluoroguanosine-3'-phosphate
  modified_base 10: mod_base = OTHER; note = 2'-fluorouridine-3'-phosphate
  modified_base 11: mod_base = OTHER; note = 2'-fluorocytidine-3'-phosphate
  modified_base 12: mod_base = OTHER; note = 2'-O-methyluridine-3'-phosphate
  modified_base 13: mod_base = OTHER; note = 2'-O-methylguanosine-3'-phosphate
  modified_base 14: mod_base = OTHER; note = 2'-O-methyladenosine-3'-phosphate
  modified_base 15: mod_base = OTHER; note = 2'-O-methyladenosine-3'-phosphate
  modified_base 16: mod_base = OTHER; note = 2'-O-methyluridine-3'-phosphate
  modified_base 17: mod_base = OTHER; note = 2'-O-methyladenosine-3'-phosphate
  modified_base 18: mod_base = OTHER; note = 2'-O-methyluridine-3'-phosphate
  modified_base 19: mod_base = OTHER; note = 2'-O-methyladenosine-3'-phosphate
  modified_base 20: mod_base = OTHER; note = 2'-O-methyluridine-3'-phosphate
  modified_base 21: mod_base = OTHER; note = 2'-O-methylcytidine-3'-phosphate attached to N-[tris(N-acetylgalactosamine-alkyl)-amidodecanoyl)]-4-hydr oxyprolinol Hyp-(N-acetylgalactosamine-alkyl)3
tctttagtgtctgaatatatc

SEQ ID NO: 1971 - RNA, 23 nt, synthetic construct
  misc_feature 1..23: note = Description of Artificial Sequence: Synthetic oligonucleotide
  source 1..23: mol_type = other RNA
  modified_base 1: mod_base = OTHER; note = 2'-O-methylguanosine-3'- phosphorothioate
  modified_base 2: mod_base = OTHER; note = 2'-fluoroadenosine-3'-phosphorothioate
  modified_base 3: mod_base = OTHER; note = 2'-O-methyluridine-3'-phosphate
  modified_base 4: mod_base = OTHER; note = 2'-O-methyladenosine-3'-phosphate
  modified_base 5: mod_base = OTHER; note = 2'-O-methyluridine-3'-phosphate
  modified_base 6: mod_base = OTHER; note = 2'-fluoroadenosine-3'-phosphate
  modified_base 7: mod_base = OTHER; note = 2'-O-methyluridine-3'-phosphate
  modified_base 8: mod_base = OTHER; note = 2'-fluorouridine-3'-phosphate
  modified_base 9: mod_base = OTHER; note = 2'-fluorocytidine-3'-phosphate
  modified_base 10: mod_base = OTHER; note = 2'-O-methyladenosine-3'-phosphate
  modified_base 11: mod_base = OTHER; note = 2'-O-methylguanosine-3'-phosphate
  modified_base 12: mod_base = OTHER; note = 2'-O-methyladenosine-3'-phosphate
  modified_base 13: mod_base = OTHER; note = 2'-O-methylcytidine-3'-phosphate
  modified_base 14: mod_base = OTHER; note = 2'-fluoroadenosine-3'-phosphate
  modified_base 15: mod_base = OTHER; note = 2'-O-methylcytidine-3'-phosphate
  modified_base 16: mod_base = OTHER; note = 2'-fluorouridine-3'-phosphate
  modified_base 17: mod_base = OTHER; note = 2'-O-methyladenosine-3'-phosphate
  modified_base 18: mod_base = OTHER; note = 2'-O-methyladenosine-3'-phosphate
  modified_base 19: mod_base = OTHER; note = 2'-O-methyladenosine-3'-phosphate
  modified_base 20: mod_base = OTHER; note = 2'-O-methylguanosine-3'-phosphate
  modified_base 21: mod_base = OTHER; note = 2'-O-methyladenosine-3'- phosphorothioate
  modified_base 22: mod_base = OTHER; note = 2'-O-methyluridine-3'-phosphorothioate
  modified_base 23: mod_base = OTHER; note = 2'-O-methylguanosine-3'-phosphate
gatatattcagacactaaagatg

SEQ ID NO: 1972 - RNA, 21 nt, synthetic construct
  misc_feature 1..21: note = Description of Artificial Sequence: Synthetic oligonucleotide
  source 1..21: mol_type = other RNA
  modified_base 1: mod_base = OTHER; note = 2'-O-methylcytidine-3'- phosphorothioate
  modified_base 2: mod_base = OTHER; note = 2'-O-methyluridine-3'-phosphorothioate
  modified_base 3: mod_base = OTHER; note = 2'-O-methyluridine-3'-phosphate
  modified_base 4: mod_base = OTHER; note = 2'-O-methyluridine-3'-phosphate
  modified_base 5: mod_base = OTHER; note = 2'-O-methyladenosine-3'-phosphate
  modified_base 6: mod_base = OTHER; note = 2'-O-methylguanosine-3'-phosphate
  modified_base 7: mod_base = OTHER; note = 2'-fluorouridine-3'-phosphate
  modified_base 8: mod_base = OTHER; note = 2'-O-methylguanosine-3'-phosphate
  modified_base 9: mod_base = OTHER; note = 2'-fluorouridine-3'-phosphate
  modified_base 10: mod_base = OTHER; note = 2'-fluorocytidine-3'-phosphate
  modified_base 11: mod_base = OTHER; note = 2'-fluorouridine-3'-phosphate
  modified_base 12: mod_base = OTHER; note = 2'-O-methylguanosine-3'-phosphate
  modified_base 13: mod_base = OTHER; note = 2'-O-methyladenosine-3'-phosphate
  modified_base 14: mod_base = OTHER; note = 2'-O-methyladenosine-3'-phosphate
  modified_base 15: mod_base = OTHER; note = 2'-O-methyluridine-3'-phosphate
  modified_base 16: mod_base = OTHER; note = 2'-O-methyladenosine-3'-phosphate
  modified_base 17: mod_base = OTHER; note = 2'-O-methyluridine-3'-phosphate
  modified_base 18: mod_base = OTHER; note = 2'-O-methyladenosine-3'-phosphate
  modified_base 19: mod_base = OTHER; note = 2'-O-methyluridine-3'-phosphate
  modified_base 20: mod_base = OTHER; note = 2'-O-methylcytidine-3'-phosphate
  modified_base 21: mod_base = OTHER; note = 2'-O-methylcytidine-3'-phosphate attached to N-[tris(N-acetylgalactosamine-alkyl)-amidodecanoyl)]-4-hydr oxyprolinol Hyp-(N-acetylgalactosamine-alkyl)3
ctttagtgtctgaatatatcc

SEQ ID NO: 1973 - RNA, 23 nt, synthetic construct
  misc_feature 1..23: note = Description of Artificial Sequence: Synthetic oligonucleotide
  source 1..23: mol_type = other RNA
  modified_base 1: mod_base = OTHER; note = 2'-O-methylguanosine-3'- phosphorothioate
  modified_base 2: mod_base = OTHER; note = 2'-fluoroguanosine-3'-phosphorothioate
  modified_base 3: mod_base = OTHER; note = 2'-O-methyladenosine-3'-phosphate
  modified_base 4: mod_base = OTHER; note = 2'-O-methyluridine-3'-phosphate
  modified_base 5: mod_base = OTHER; note = 2'-O-methyladenosine-3'-phosphate
  modified_base 6: mod_base = OTHER; note = 2'-fluorouridine-3'-phosphate
  modified_base 7: mod_base = OTHER; note = 2'-O-methyladenosine-3'-phosphate
  modified_base 8: mod_base = OTHER; note = 2'-fluorouridine-3'-phosphate
  modified_base 9: mod_base = OTHER; note = 2'-fluorouridine-3'-phosphate
  modified_base 10: mod_base = OTHER; note = 2'-O-methylcytidine-3'-phosphate
  modified_base 11: mod_base = OTHER; note = 2'-O-methyladenosine-3'-phosphate
  modified_base 12: mod_base = OTHER; note = 2'-O-methylguanosine-3'-phosphate
  modified_base 13: mod_base = OTHER; note = 2'-O-methyladenosine-3'-phosphate
  modified_base 14: mod_base = OTHER; note = 2'-fluorocytidine-3'-phosphate
  modified_base 15: mod_base = OTHER; note = 2'-O-methyladenosine-3'-phosphate
  modified_base 16: mod_base = OTHER; note = 2'-fluorocytidine-3'-phosphate
  modified_base 17: mod_base = OTHER; note = 2'-O-methyluridine-3'-phosphate
  modified_base 18: mod_base = OTHER; note = 2'-O-methyladenosine-3'-phosphate
  modified_base 19: mod_base = OTHER; note = 2'-O-methyladenosine-3'-phosphate
  modified_base 20: mod_base = OTHER; note = 2'-O-methyladenosine-3'-phosphate
  modified_base 21: mod_base = OTHER; note = 2'-O-methylguanosine-3'- phosphorothioate
  modified_base 22: mod_base = OTHER; note = 2'-O-methyladenosine-3'- phosphorothioate
  modified_base 23: mod_base = OTHER; note = 2'-O-methyluridine-3'-phosphate
ggatatattcagacactaaagat

SEQ ID NO: 1974 - RNA, 21 nt, synthetic construct
  misc_feature 1..21: note = Description of Artificial Sequence: Synthetic oligonucleotide
  source 1..21: mol_type = other RNA
  modified_base 1: mod_base = OTHER; note = 2'-O-methylcytidine-3'- phosphorothioate
  modified_base 2: mod_base = OTHER; note = 2'-O-methyladenosine-3'- phosphorothioate
  modified_base 3: mod_base = OTHER; note = 2'-O-methylcytidine-3'-phosphate
  modified_base 4: mod_base = OTHER; note = 2'-O-methyladenosine-3'-phosphate
  modified_base 5: mod_base = OTHER; note = 2'-O-methyluridine-3'-phosphate
  modified_base 6: mod_base = OTHER; note = 2'-O-methylcytidine-3'-phosphate
  modified_base 7: mod_base = OTHER; note = 2'-fluorouridine-3'-phosphate
  modified_base 8: mod_base = OTHER; note = 2'-O-methyluridine-3'-phosphate
  modified_base 9: mod_base = OTHER; note = 2'-fluorouridine-3'-phosphate
  modified_base 10: mod_base = OTHER; note = 2'-fluoroadenosine-3'-phosphate
  modified_base 11: mod_base = OTHER; note = 2'-fluoroguanosine-3'-phosphate
  modified_base 12: mod_base = OTHER; note = 2'-O-methyluridine-3'-phosphate
  modified_base 13: mod_base = OTHER; note = 2'-O-methylguanosine-3'-phosphate
  modified_base 14: mod_base = OTHER; note = 2'-O-methyluridine-3'-phosphate
  modified_base 15: mod_base = OTHER; note = 2'-O-methylcytidine-3'-phosphate
  modified_base 16: mod_base = OTHER; note = 2'-O-methyluridine-3'-phosphate
  modified_base 17: mod_base = OTHER; note = 2'-O-methylguanosine-3'-phosphate
  modified_base 18: mod_base = OTHER; note = 2'-O-methyladenosine-3'-phosphate
  modified_base 19: mod_base = OTHER; note = 2'-O-methyladenosine-3'-phosphate
  modified_base 20: mod_base = OTHER; note = 2'-O-methyluridine-3'-phosphate
  modified_base 21: mod_base = OTHER; note = 2'-O-methyladenosine-3'-phosphate attached to N-[tris(N-acetylgalactosamine-alkyl)-amidodecanoyl)]-4-hydr oxyprolinol Hyp-(N-acetylgalactosamine-alkyl)3
cacatctttagtgtctgaata

SEQ ID NO: 1975 - RNA, 23 nt, synthetic construct
  misc_feature 1..23: note = Description of Artificial Sequence: Synthetic oligonucleotide
  source 1..23: mol_type = other RNA
  modified_base 1: mod_base = OTHER; note = 2'-O-methyluridine-3'-phosphorothioate
  modified_base 2: mod_base = OTHER; note = 2'-fluoroadenosine-3'-phosphorothioate
  modified_base 3: mod_base = OTHER; note = 2'-O-methyluridine-3'-phosphate
  modified_base 4: mod_base = OTHER; note = 2'-O-methyluridine-3'-phosphate
  modified_base 5: mod_base = OTHER; note = 2'-O-methylcytidine-3'-phosphate
  modified_base 6: mod_base = OTHER; note = 2'-fluoroadenosine-3'-phosphate
  modified_base 7: mod_base = OTHER; note = 2'-O-methylguanosine-3'-phosphate
  modified_base 8: mod_base = OTHER; note = 2'-fluoroadenosine-3'-phosphate
  modified_base 9: mod_base = OTHER; note = 2'-fluorocytidine-3'-phosphate
  modified_base 10: mod_base = OTHER; note = 2'-O-methyladenosine-3'-phosphate
  modified_base 11: mod_base = OTHER; note = 2'-O-methylcytidine-3'-phosphate
  modified_base 12: mod_base = OTHER; note = 2'-O-methyluridine-3'-phosphate
  modified_base 13: mod_base = OTHER; note = 2'-O-methyladenosine-3'-phosphate
  modified_base 14: mod_base = OTHER; note = 2'-fluoroadenosine-3'-phosphate
  modified_base 15: mod_base = OTHER; note = 2'-O-methyladenosine-3'-phosphate
  modified_base 16: mod_base = OTHER; note = 2'-fluoroguanosine-3'-phosphate
  modified_base 17: mod_base = OTHER; note = 2'-O-methyladenosine-3'-phosphate
  modified_base 18: mod_base = OTHER; note = 2'-O-methyluridine-3'-phosphate
  modified_base 19: mod_base = OTHER; note = 2'-O-methylguanosine-3'-phosphate
  modified_base 20: mod_base = OTHER; note = 2'-O-methyluridine-3'-phosphate
  modified_base 21: mod_base = OTHER; note = 2'-O-methylguanosine-3'- phosphorothioate
  modified_base 22: mod_base = OTHER; note = 2'-O-methyladenosine-3'- phosphorothioate
  modified_base 23: mod_base = OTHER; note = 2'-O-methyluridine-3'-phosphate
tattcagacactaaagatgtgat

SEQ ID NO: 1976 - RNA, 21 nt, synthetic construct
  misc_feature 1..21: note = Description of Artificial Sequence: Synthetic oligonucleotide
  source 1..21: mol_type = other RNA
  modified_base 1: mod_base = OTHER; note = 2'-O-methyluridine-3'-phosphorothioate
  modified_base 2: mod_base = OTHER; note = 2'-O-methylcytidine-3'- phosphorothioate
  modified_base 3: mod_base = OTHER; note = 2'-O-methyladenosine-3'-phosphate
  modified_base 4: mod_base = OTHER; note = 2'-O-methylcytidine-3'-phosphate
  modified_base 5: mod_base = OTHER; note = 2'-O-methyladenosine-3'-phosphate
  modified_base 6: mod_base = OTHER; note = 2'-O-methyluridine-3'-phosphate
  modified_base 7: mod_base = OTHER; note = 2'-fluorocytidine-3'-phosphate
  modified_base 8: mod_base = OTHER; note = 2'-O-methyluridine-3'-phosphate
  modified_base 9: mod_base = OTHER; note = 2'-fluorouridine-3'-phosphate
  modified_base 10: mod_base = OTHER; note = 2'-fluorouridine-3'-phosphate
  modified_base 11: mod_base = OTHER; note = 2'-fluoroadenosine-3'-phosphate
  modified_base 12: mod_base = OTHER; note = 2'-O-methylguanosine-3'-phosphate
  modified_base 13: mod_base = OTHER; note = 2'-O-methyluridine-3'-phosphate
  modified_base 14: mod_base = OTHER; note = 2'-O-methylguanosine-3'-phosphate
  modified_base 15: mod_base = OTHER; note = 2'-O-methyluridine-3'-phosphate
  modified_base 16: mod_base = OTHER; note = 2'-O-methylcytidine-3'-phosphate
  modified_base 17: mod_base = OTHER; note = 2'-O-methyluridine-3'-phosphate
  modified_base 18: mod_base = OTHER; note = 2'-O-methylguanosine-3'-phosphate
  modified_base 19: mod_base = OTHER; note = 2'-O-methyladenosine-3'-phosphate
  modified_base 20: mod_base = OTHER; note = 2'-O-methyladenosine-3'-phosphate
  modified_base 21: mod_base = OTHER; note = 2'-O-methyluridine-3'-phosphate attached to N-[tris(N-acetylgalactosamine-alkyl)-amidodecanoyl)]-4-hydr oxyprolinol Hyp-(N-acetylgalactosamine-alkyl)3
tcacatctttagtgtctgaat

SEQ ID NO: 1977 - RNA, 23 nt, synthetic construct
  misc_feature 1..23: note = Description of Artificial Sequence: Synthetic oligonucleotide
  source 1..23: mol_type = other RNA
  modified_base 1: mod_base = OTHER; note = 2'-O-methyladenosine-3'- phosphorothioate
  modified_base 2: mod_base = OTHER; note = 2'-fluorouridine -3'-phosphorothioate
  modified_base 3: mod_base = OTHER; note = 2'-O-methyluridine-3'-phosphate
  modified_base 4: mod_base = OTHER; note = 2'-O-methylcytidine-3'-phosphate
  modified_base 5: mod_base = OTHER; note = 2'-O-methyladenosine-3'-phosphate
  modified_base 6: mod_base = OTHER; note = 2'-fluoroguanosine-3'-phosphate
  modified_base 7: mod_base = OTHER; note = 2'-O-methyladenosine-3'-phosphate
  modified_base 8: mod_base = OTHER; note = 2'-fluorocytidine-3'-phosphate
  modified_base 9: mod_base = OTHER; note = 2'-fluoroadenosine-3'-phosphate
  modified_base 10: mod_base = OTHER; note = 2'-O-methylcytidine-3'-phosphate
  modified_base 11: mod_base = OTHER; note = 2'-O-methyluridine-3'-phosphate
  modified_base 12: mod_base = OTHER; note = 2'-O-methyladenosine-3'-phosphate
  modified_base 13: mod_base = OTHER; note = 2'-O-methyladenosine-3'-phosphate
  modified_base 14: mod_base = OTHER; note = 2'-fluoroadenosine-3'-phosphate
  modified_base 15: mod_base = OTHER; note = 2'-O-methylguanosine-3'-phosphate
  modified_base 16: mod_base = OTHER; note = 2'-fluoroadenosine-3'-phosphate
  modified_base 17: mod_base = OTHER; note = 2'-O-methyluridine-3'-phosphate
  modified_base 18: mod_base = OTHER; note = 2'-O-methylguanosine-3'-phosphate
  modified_base 19: mod_base = OTHER; note = 2'-O-methyluridine-3'-phosphate
  modified_base 20: mod_base = OTHER; note = 2'-O-methylguanosine-3'-phosphate
  modified_base 21: mod_base = OTHER; note = 2'-O-methyladenosine-3'- phosphorothioate
  modified_base 22: mod_base = OTHER; note = 2'-O-methyluridine-3'-phosphorothioate
  modified_base 23: mod_base = OTHER; note = 2'-O-methyluridine-3'-phosphate
attcagacactaaagatgtgatt

SEQ ID NO: 1978 - RNA, 21 nt, synthetic construct
  misc_feature 1..21: note = Description of Artificial Sequence: Synthetic oligonucleotide
  source 1..21: mol_type = other RNA
  modified_base 1: mod_base = OTHER; note = 2'-O-methyluridine-3'-phosphorothioate
  modified_base 2: mod_base = OTHER; note = 2'-O-methylguanosine-3'- phosphorothioate
  modified_base 3: mod_base = OTHER; note = 2'-O-methyladenosine-3'-phosphate
  modified_base 4: mod_base = OTHER; note = 2'-O-methyluridine-3'-phosphate
  modified_base 5: mod_base = OTHER; note = 2'-O-methyladenosine-3'-phosphate
  modified_base 6: mod_base = OTHER; note = 2'-O-methylcytidine-3'-phosphate
  modified_base 7: mod_base = OTHER; note = 2'-fluorouridine-3'-phosphate
  modified_base 8: mod_base = OTHER; note = 2'-O-methyluridine-3'-phosphate
  modified_base 9: mod_base = OTHER; note = 2'-fluorocytidine-3'-phosphate
  modified_base 10: mod_base = OTHER; note = 2'-fluorouridine-3'-phosphate
  modified_base 11: mod_base = OTHER; note = 2'-fluorouridine-3'-phosphate
  modified_base 12: mod_base = OTHER; note = 2'-O-methyluridine-3'-phosphate
  modified_base 13: mod_base = OTHER; note = 2'-O-methylguanosine-3'-phosphate
  modified_base 14: mod_base = OTHER; note = 2'-O-methyladenosine-3'-phosphate
  modified_base 15: mod_base = OTHER; note = 2'-O-methyladenosine-3'-phosphate
  modified_base 16: mod_base = OTHER; note = 2'-O-methyluridine-3'-phosphate
  modified_base 17: mod_base = OTHER; note = 2'-O-methylguanosine-3'-phosphate
  modified_base 18: mod_base = OTHER; note = 2'-O-methyluridine-3'-phosphate
  modified_base 19: mod_base = OTHER; note = 2'-O-methyladenosine-3'-phosphate
  modified_base 20: mod_base = OTHER; note = 2'-O-methylguanosine-3'-phosphate
  modified_base 21: mod_base = OTHER; note = 2'-O-methyladenosine-3'-phosphate attached to N-[tris(N-acetylgalactosamine-alkyl)-amidodecanoyl)]-4-hydr oxyprolinol Hyp-(N-acetylgalactosamine-alkyl)3
tgatacttctttgaatgtaga

SEQ ID NO: 1979 - RNA, 23 nt, synthetic construct
  misc_feature 1..23: note = Description of Artificial Sequence: Synthetic oligonucleotide
  source 1..23: mol_type = other RNA
  modified_base 1: mod_base = OTHER; note = 2'-O-methyluridine-3'-phosphorothioate
  modified_base 2: mod_base = OTHER; note = 2'-fluorocytidine-3'-phosphorothioate
  modified_base 3: mod_base = OTHER; note = 2'-O-methyluridine-3'-phosphate
  modified_base 4: mod_base = OTHER; note = 2'-O-methyladenosine-3'-phosphate
  modified_base 5: mod_base = OTHER; note = 2'-O-methylcytidine-3'-phosphate
  modified_base 6: mod_base = OTHER; note = 2'-fluoroadenosine-3'-phosphate
  modified_base 7: mod_base = OTHER; note = 2'-O-methyluridine-3'-phosphate
  modified_base 8: mod_base = OTHER; note = 2'-fluorouridine-3'-phosphate
  modified_base 9: mod_base = OTHER; note = 2'-fluorocytidine-3'-phosphate
  modified_base 10: mod_base = OTHER; note = 2'-O-methyladenosine-3'-phosphate
  modified_base 11: mod_base = OTHER; note = 2'-O-methyladenosine-3'-phosphate
  modified_base 12: mod_base = OTHER; note = 2'-O-methyladenosine-3'-phosphate
  modified_base 13: mod_base = OTHER; note = 2'-O-methylguanosine-3'-phosphate
  modified_base 14: mod_base = OTHER; note = 2'-fluoroadenosine-3'-phosphate
  modified_base 15: mod_base = OTHER; note = 2'-O-methyladenosine-3'-phosphate
  modified_base 16: mod_base = OTHER; note = 2'-fluoroguanosine-3'-phosphate
  modified_base 17: mod_base = OTHER; note = 2'-O-methyluridine-3'-phosphate
  modified_base 18: mod_base = OTHER; note = 2'-O-methyladenosine-3'-phosphate
  modified_base 19: mod_base = OTHER; note = 2'-O-methyluridine-3'-phosphate
  modified_base 20: mod_base = OTHER; note = 2'-O-methylcytidine-3'-phosphate
  modified_base 21: mod_base = OTHER; note = 2'-O-methyladenosine-3'- phosphorothioate
  modified_base 22: mod_base = OTHER; note = 2'-O-methylcytidine-3'- phosphorothioate
  modified_base 23: mod_base = OTHER; note = 2'-O-methylcytidine-3'-phosphate
tctacattcaaagaagtatcacc

SEQ ID NO: 1980 - RNA, 21 nt, synthetic construct
  misc_feature 1..21: note = Description of Artificial Sequence: Synthetic oligonucleotide
  source 1..21: mol_type = other RNA
  modified_base 1: mod_base = OTHER; note = 2'-O-methylguanosine-3'- phosphorothioate
  modified_base 2: mod_base = OTHER; note = 2'-O-methyladenosine-3'- phosphorothioate
  modified_base 3: mod_base = OTHER; note = 2'-O-methyluridine-3'-phosphate
  modified_base 4: mod_base = OTHER; note = 2'-O-methyladenosine-3'-phosphate
  modified_base 5: mod_base = OTHER; note = 2'-O-methylcytidine-3'-phosphate
  modified_base 6: mod_base = OTHER; note = 2'-O-methyluridine-3'-phosphate
  modified_base 7: mod_base = OTHER; note = 2'-fluorouridine-3'-phosphate
  modified_base 8: mod_base = OTHER; note = 2'-O-methylcytidine-3'-phosphate
  modified_base 9: mod_base = OTHER; note = 2'-fluorouridine-3'-phosphate
  modified_base 10: mod_base = OTHER; note = 2'-fluorouridine-3'-phosphate
  modified_base 11: mod_base = OTHER; note = 2'-fluorouridine-3'-phosphate
  modified_base 12: mod_base = OTHER; note = 2'-O-methylguanosine-3'-phosphate
  modified_base 13: mod_base = OTHER; note = 2'-O-methyladenosine-3'-phosphate
  modified_base 14: mod_base = OTHER; note = 2'-O-methyladenosine-3'-phosphate
  modified_base 15: mod_base = OTHER; note = 2'-O-methyluridine-3'-phosphate
  modified_base 16: mod_base = OTHER; note = 2'-O-methylguanosine-3'-phosphate
  modified_base 17: mod_base = OTHER; note = 2'-O-methyluridine-3'-phosphate
  modified_base 18: mod_base = OTHER; note = 2'-O-methyladenosine-3'-phosphate
  modified_base 19: mod_base = OTHER; note = 2'-O-methylguanosine-3'-phosphate
  modified_base 20: mod_base = OTHER; note = 2'-O-methyladenosine-3'-phosphate
  modified_base 21: mod_base = OTHER; note = 2'-O-methyluridine-3'-phosphate attached to N-[tris(N-acetylgalactosamine-alkyl)-amidodecanoyl)]-4-hydr oxyprolinol Hyp-(N-acetylgalactosamine-alkyl)3
gatacttctttgaatgtagat

SEQ ID NO: 1981 - RNA, 23 nt, synthetic construct
  misc_feature 1..23: note = Description of Artificial Sequence: Synthetic oligonucleotide
  source 1..23: mol_type = other RNA
  modified_base 1: mod_base = OTHER; note = 2'-O-methyladenosine-3'- phosphorothioate
  modified_base 2: mod_base = OTHER; note = 2'-fluorouridine -3'-phosphorothioate
  modified_base 3: mod_base = OTHER; note = 2'-O-methylcytidine-3'-phosphate
  modified_base 4: mod_base = OTHER; note = 2'-O-methyluridine-3'-phosphate
  modified_base 5: mod_base = OTHER; note = 2'-O-methyladenosine-3'-phosphate
  modified_base 6: mod_base = OTHER; note = 2'-fluorocytidine-3'-phosphate
  modified_base 7: mod_base = OTHER; note = 2'-O-methyladenosine-3'-phosphate
  modified_base 8: mod_base = OTHER; note = 2'-fluorouridine-3'-phosphate
  modified_base 9: mod_base = OTHER; note = 2'-fluorouridine-3'-phosphate
  modified_base 10: mod_base = OTHER; note = 2'-O-methylcytidine-3'-phosphate
  modified_base 11: mod_base = OTHER; note = 2'-O-methyladenosine-3'-phosphate
  modified_base 12: mod_base = OTHER; note = 2'-O-methyladenosine-3'-phosphate
  modified_base 13: mod_base = OTHER; note = 2'-O-methyladenosine-3'-phosphate
  modified_base 14: mod_base = OTHER; note = 2'-fluoroguanosine-3'-phosphate
  modified_base 15: mod_base = OTHER; note = 2'-O-methyladenosine-3'-phosphate
  modified_base 16: mod_base = OTHER; note = 2'-fluoroadenosine-3'-phosphate
  modified_base 17: mod_base = OTHER; note = 2'-O-methylguanosine-3'-phosphate
  modified_base 18: mod_base = OTHER; note = 2'-O-methyluridine-3'-phosphate
  modified_base 19: mod_base = OTHER; note = 2'-O-methyladenosine-3'-phosphate
  modified_base 20: mod_base = OTHER; note = 2'-O-methyluridine-3'-phosphate
  modified_base 21: mod_base = OTHER; note = 2'-O-methylcytidine-3'- phosphorothioate
  modified_base 22: mod_base = OTHER; note = 2'-O-methyladenosine-3'- phosphorothioate
  modified_base 23: mod_base = OTHER; note = 2'-O-methylcytidine-3'-phosphate
atctacattcaaagaagtatcac

SEQ ID NO: 1982 - RNA, 21 nt, synthetic construct
  misc_feature 1..21: note = Description of Artificial Sequence: Synthetic oligonucleotide
  source 1..21: mol_type = other RNA
  modified_base 1: mod_base = OTHER; note = 2'-O-methyluridine-3'-phosphorothioate
  modified_base 2: mod_base = OTHER; note = 2'-O-methyluridine-3'-phosphorothioate
  modified_base 3: mod_base = OTHER; note = 2'-O-methylguanosine-3'-phosphate
  modified_base 4: mod_base = OTHER; note = 2'-O-methylguanosine-3'-phosphate
  modified_base 5: mod_base = OTHER; note = 2'-O-methyluridine-3'-phosphate
  modified_base 6: mod_base = OTHER; note = 2'-O-methylguanosine-3'-phosphate
  modified_base 7: mod_base = OTHER; note = 2'-fluoroadenosine-3'-phosphate
  modified_base 8: mod_base = OTHER; note = 2'-O-methyluridine-3'-phosphate
  modified_base 9: mod_base = OTHER; note = 2'-fluoroadenosine-3'-phosphate
  modified_base 10: mod_base = OTHER; note = 2'-fluorocytidine-3'-phosphate
  modified_base 11: mod_base = OTHER; note = 2'-fluorouridine-3'-phosphate
  modified_base 12: mod_base = OTHER; note = 2'-O-methyluridine-3'-phosphate
  modified_base 13: mod_base = OTHER; note = 2'-O-methylcytidine-3'-phosphate
  modified_base 14: mod_base = OTHER; note = 2'-O-methyluridine-3'-phosphate
  modified_base 15: mod_base = OTHER; note = 2'-O-methyluridine-3'-phosphate
  modified_base 16: mod_base = OTHER; note = 2'-O-methyluridine-3'-phosphate
  modified_base 17: mod_base = OTHER; note = 2'-O-methylguanosine-3'-phosphate
  modified_base 18: mod_base = OTHER; note = 2'-O-methyladenosine-3'-phosphate
  modified_base 19: mod_base = OTHER; note = 2'-O-methyladenosine-3'-phosphate
  modified_base 20: mod_base = OTHER; note = 2'-O-methyluridine-3'-phosphate
  modified_base 21: mod_base = OTHER; note = 2'-O-methylguanosine-3'-phosphate attached to N-[tris(N-acetylgalactosamine-alkyl)-amidodecanoyl)]-4-hydr oxyprolinol Hyp-(N-acetylgalactosamine-alkyl)3
ttggtgatacttctttgaatg

SEQ ID NO: 1983 - RNA, 23 nt, synthetic construct
  misc_feature 1..23: note = Description of Artificial Sequence: Synthetic oligonucleotide
  source 1..23: mol_type = other RNA
  modified_base 1: mod_base = OTHER; note = 2'-O-methylcytidine-3'- phosphorothioate
  modified_base 2: mod_base = OTHER; note = 2'-fluoroadenosine-3'-phosphorothioate
  modified_base 3: mod_base = OTHER; note = 2'-O-methyluridine-3'-phosphate
  modified_base 4: mod_base = OTHER; note = 2'-O-methyluridine-3'-phosphate
  modified_base 5: mod_base = OTHER; note = 2'-O-methylcytidine-3'-phosphate
  modified_base 6: mod_base = OTHER; note = 2'-fluoroadenosine-3'-phosphate
  modified_base 7: mod_base = OTHER; note = 2'-O-methyladenosine-3'-phosphate
  modified_base 8: mod_base = OTHER; note = 2'-fluoroadenosine-3'-phosphate
  modified_base 9: mod_base = OTHER; note = 2'-fluoroguanosine-3'-phosphate
  modified_base 10: mod_base = OTHER; note = 2'-O-methyladenosine-3'-phosphate
  modified_base 11: mod_base = OTHER; note = 2'-O-methyladenosine-3'-phosphate
  modified_base 12: mod_base = OTHER; note = 2'-O-methylguanosine-3'-phosphate
  modified_base 13: mod_base = OTHER; note = 2'-O-methyluridine-3'-phosphate
  modified_base 14: mod_base = OTHER; note = 2'-fluoroadenosine-3'-phosphate
  modified_base 15: mod_base = OTHER; note = 2'-O-methyluridine-3'-phosphate
  modified_base 16: mod_base = OTHER; note = 2'-fluorocytidine-3'-phosphate
  modified_base 17: mod_base = OTHER; note = 2'-O-methyladenosine-3'-phosphate
  modified_base 18: mod_base = OTHER; note = 2'-O-methylcytidine-3'-phosphate
  modified_base 19: mod_base = OTHER; note = 2'-O-methylcytidine-3'-phosphate
  modified_base 20: mod_base = OTHER; note = 2'-O-methyladenosine-3'-phosphate
  modified_base 21: mod_base = OTHER; note = 2'-O-methyladenosine-3'- phosphorothioate
  modified_base 22: mod_base = OTHER; note = 2'-O-methyluridine-3'-phosphorothioate
  modified_base 23: mod_base = OTHER; note = 2'-O-methyluridine-3'-phosphate
cattcaaagaagtatcaccaatt

SEQ ID NO: 1984 - RNA, 21 nt, synthetic construct
  misc_feature 1..21: note = Description of Artificial Sequence: Synthetic oligonucleotide
  source 1..21: mol_type = other RNA
  modified_base 1: mod_base = OTHER; note = 2'-O-methyladenosine-3'- phosphorothioate
  modified_base 2: mod_base = OTHER; note = 2'-O-methyluridine-3'-phosphorothioate
  modified_base 3: mod_base = OTHER; note = 2'-O-methyluridine-3'-phosphate
  modified_base 4: mod_base = OTHER; note = 2'-O-methylguanosine-3'-phosphate
  modified_base 5: mod_base = OTHER; note = 2'-O-methylguanosine-3'-phosphate
  modified_base 6: mod_base = OTHER; note = 2'-O-methyluridine-3'-phosphate
  modified_base 7: mod_base = OTHER; note = 2'-fluoroguanosine-3'-phosphate
  modified_base 8: mod_base = OTHER; note = 2'-O-methyladenosine-3'-phosphate
  modified_base 9: mod_base = OTHER; note = 2'-fluorouridine-3'-phosphate
  modified_base 10: mod_base = OTHER; note = 2'-fluoroadenosine-3'-phosphate
  modified_base 11: mod_base = OTHER; note = 2'-fluorocytidine-3'-phosphate
  modified_base 12: mod_base = OTHER; note = 2'-O-methyluridine-3'-phosphate
  modified_base 13: mod_base = OTHER; note = 2'-O-methyluridine-3'-phosphate
  modified_base 14: mod_base = OTHER; note = 2'-O-methylcytidine-3'-phosphate
  modified_base 15: mod_base = OTHER; note = 2'-O-methyluridine-3'-phosphate
  modified_base 16: mod_base = OTHER; note = 2'-O-methyluridine-3'-phosphate
  modified_base 17: mod_base = OTHER; note = 2'-O-methyluridine-3'-phosphate
  modified_base 18: mod_base = OTHER; note = 2'-O-methylguanosine-3'-phosphate
  modified_base 19: mod_base = OTHER; note = 2'-O-methyladenosine-3'-phosphate
  modified_base 20: mod_base = OTHER; note = 2'-O-methyladenosine-3'-phosphate
  modified_base 21: mod_base = OTHER; note = 2'-O-methyluridine-3'-phosphate attached to N-[tris(N-acetylgalactosamine-alkyl)-amidodecanoyl)]-4-hydr oxyprolinol Hyp-(N-acetylgalactosamine-alkyl)3
attggtgatacttctttgaat

SEQ ID NO: 1985 - RNA, 23 nt, synthetic construct
  misc_feature 1..23: note = Description of Artificial Sequence: Synthetic oligonucleotide
  source 1..23: mol_type = other RNA
  modified_base 1: mod_base = OTHER; note = 2'-O-methyladenosine-3'- phosphorothioate
  modified_base 2: mod_base = OTHER; note = 2'-fluorouridine -3'-phosphorothioate
  modified_base 3: mod_base = OTHER; note = 2'-O-methyluridine-3'-phosphate
  modified_base 4: mod_base = OTHER; note = 2'-O-methylcytidine-3'-phosphate
  modified_base 5: mod_base = OTHER; note = 2'-O-methyladenosine-3'-phosphate
  modified_base 6: mod_base = OTHER; note = 2'-fluoroadenosine-3'-phosphate
  modified_base 7: mod_base = OTHER; note = 2'-O-methyladenosine-3'-phosphate
  modified_base 8: mod_base = OTHER; note = 2'-fluoroguanosine-3'-phosphate
  modified_base 9: mod_base = OTHER; note = 2'-fluoroadenosine-3'-phosphate
  modified_base 10: mod_base = OTHER; note = 2'-O-methyladenosine-3'-phosphate
  modified_base 11: mod_base = OTHER; note = 2'-O-methylguanosine-3'-phosphate
  modified_base 12: mod_base = OTHER; note = 2'-O-methyluridine-3'-phosphate
  modified_base 13: mod_base = OTHER; note = 2'-O-methyladenosine-3'-phosphate
  modified_base 14: mod_base = OTHER; note = 2'-fluorouridine-3'-phosphate
  modified_base 15: mod_base = OTHER; note = 2'-O-methylcytidine-3'-phosphate
  modified_base 16: mod_base = OTHER; note = 2'-fluoroadenosine-3'-phosphate
  modified_base 17: mod_base = OTHER; note = 2'-O-methylcytidine-3'-phosphate
  modified_base 18: mod_base = OTHER; note = 2'-O-methylcytidine-3'-phosphate
  modified_base 19: mod_base = OTHER; note = 2'-O-methyladenosine-3'-phosphate
  modified_base 20: mod_base = OTHER; note = 2'-O-methyladenosine-3'-phosphate
  modified_base 21: mod_base = OTHER; note = 2'-O-methyluridine-3'-phosphorothioate
  modified_base 22: mod_base = OTHER; note = 2'-O-methyluridine-3'-phosphorothioate
  modified_base 23: mod_base = OTHER; note = 2'-O-methyladenosine-3'-phosphate
attcaaagaagtatcaccaatta

SEQ ID NO: 1986 - RNA, 21 nt, synthetic construct
  misc_feature 1..21: note = Description of Artificial Sequence: Synthetic oligonucleotide
  source 1..21: mol_type = other RNA
  modified_base 1: mod_base = OTHER; note = 2'-O-methyladenosine-3'- phosphorothioate
  modified_base 2: mod_base = OTHER; note = 2'-O-methyladenosine-3'- phosphorothioate
  modified_base 3: mod_base = OTHER; note = 2'-O-methyluridine-3'-phosphate
  modified_base 4: mod_base = OTHER; note = 2'-O-methyladenosine-3'-phosphate
  modified_base 5: mod_base = OTHER; note = 2'-O-methyladenosine-3'-phosphate
  modified_base 6: mod_base = OTHER; note = 2'-O-methylcytidine-3'-phosphate
  modified_base 7: mod_base = OTHER; note = 2'-fluorocytidine-3'-phosphate
  modified_base 8: mod_base = OTHER; note = 2'-O-methyluridine-3'-phosphate
  modified_base 9: mod_base = OTHER; note = 2'-fluoroguanosine-3'-phosphate
  modified_base 10: mod_base = OTHER; note = 2'-fluorouridine-3'-phosphate
  modified_base 11: mod_base = OTHER; note = 2'-fluoroguanosine-3'-phosphate
  modified_base 12: mod_base = OTHER; note = 2'-O-methyladenosine-3'-phosphate
  modified_base 13: mod_base = OTHER; note = 2'-O-methyladenosine-3'-phosphate
  modified_base 14: mod_base = OTHER; note = 2'-O-methyladenosine-3'-phosphate
  modified_base 15: mod_base = OTHER; note = 2'-O-methyladenosine-3'-phosphate
  modified_base 16: mod_base = OTHER; note = 2'-O-methyluridine-3'-phosphate
  modified_base 17: mod_base = OTHER; note = 2'-O-methylguanosine-3'-phosphate
  modified_base 18: mod_base = OTHER; note = 2'-O-methylcytidine-3'-phosphate
  modified_base 19: mod_base = OTHER; note = 2'-O-methyluridine-3'-phosphate
  modified_base 20: mod_base = OTHER; note = 2'-O-methylcytidine-3'-phosphate
  modified_base 21: mod_base = OTHER; note = 2'-O-methylcytidine-3'-phosphate attached to N-[tris(N-acetylgalactosamine-alkyl)-amidodecanoyl)]-4-hydr oxyprolinol Hyp-(N-acetylgalactosamine-alkyl)3
aataacctgtgaaaatgctcc

SEQ ID NO: 1987 - RNA, 23 nt, synthetic construct
  misc_feature 1..23: note = Description of Artificial Sequence: Synthetic oligonucleotide
  source 1..23: mol_type = other RNA
  modified_base 1: mod_base = OTHER; note = 2'-O-methylguanosine-3'- phosphorothioate
  modified_base 2: mod_base = OTHER; note = 2'-fluoroguanosine-3'-phosphorothioate
  modified_base 3: mod_base = OTHER; note = 2'-O-methyladenosine-3'-phosphate
  modified_base 4: mod_base = OTHER; note = 2'-O-methylguanosine-3'-phosphate
  modified_base 5: mod_base = OTHER; note = 2'-O-methylcytidine-3'-phosphate
  modified_base 6: mod_base = OTHER; note = 2'-fluoroadenosine-3'-phosphate
  modified_base 7: mod_base = OTHER; note = 2'-O-methyluridine-3'-phosphate
  modified_base 8: mod_base = OTHER; note = 2'-fluorouridine-3'-phosphate
  modified_base 9: mod_base = OTHER; note = 2'-fluorouridine-3'-phosphate
  modified_base 10: mod_base = OTHER; note = 2'-O-methyluridine-3'-phosphate
  modified_base 11: mod_base = OTHER; note = 2'-O-methylcytidine-3'-phosphate
  modified_base 12: mod_base = OTHER; note = 2'-O-methyladenosine-3'-phosphate
  modified_base 13: mod_base = OTHER; note = 2'-O-methylcytidine-3'-phosphate
  modified_base 14: mod_base = OTHER; note = 2'-fluoroadenosine-3'-phosphate
  modified_base 15: mod_base = OTHER; note = 2'-O-methylguanosine-3'-phosphate
  modified_base 16: mod_base = OTHER; note = 2'-fluoroguanosine-3'-phosphate
  modified_base 17: mod_base = OTHER; note = 2'-O-methyluridine-3'-phosphate
  modified_base 18: mod_base = OTHER; note = 2'-O-methyluridine-3'-phosphate
  modified_base 19: mod_base = OTHER; note = 2'-O-methyladenosine-3'-phosphate
  modified_base 20: mod_base = OTHER; note = 2'-O-methyluridine-3'-phosphate
  modified_base 21: mod_base = OTHER; note = 2'-O-methyluridine-3'-phosphorothioate
  modified_base 22: mod_base = OTHER; note = 2'-O-methylguanosine-3'- phosphorothioate
  modified_base 23: mod_base = OTHER; note = 2'-O-methylcytidine-3'-phosphate
ggagcattttcacaggttattgc

SEQ ID NO: 1988 - RNA, 21 nt, synthetic construct
  misc_feature 1..21: note = Description of Artificial Sequence: Synthetic oligonucleotide
  source 1..21: mol_type = other RNA
  modified_base 1: mod_base = OTHER; note = 2'-O-methyladenosine-3'- phosphorothioate
  modified_base 2: mod_base = OTHER; note = 2'-O-methyluridine-3'-phosphorothioate
  modified_base 3: mod_base = OTHER; note = 2'-O-methyladenosine-3'-phosphate
  modified_base 4: mod_base = OTHER; note = 2'-O-methyladenosine-3'-phosphate
  modified_base 5: mod_base = OTHER; note = 2'-O-methylcytidine-3'-phosphate
  modified_base 6: mod_base = OTHER; note = 2'-O-methylcytidine-3'-phosphate
  modified_base 7: mod_base = OTHER; note = 2'-fluorouridine-3'-phosphate
  modified_base 8: mod_base = OTHER; note = 2'-O-methylguanosine-3'-phosphate
  modified_base 9: mod_base = OTHER; note = 2'-fluorouridine-3'-phosphate
  modified_base 10: mod_base = OTHER; note = 2'-fluoroguanosine-3'-phosphate
  modified_base 11: mod_base = OTHER; note = 2'-fluoroadenosine-3'-phosphate
  modified_base 12: mod_base = OTHER; note = 2'-O-methyladenosine-3'-phosphate
  modified_base 13: mod_base = OTHER; note = 2'-O-methyladenosine-3'-phosphate
  modified_base 14: mod_base = OTHER; note = 2'-O-methyladenosine-3'-phosphate
  modified_base 15: mod_base = OTHER; note = 2'-O-methyluridine-3'-phosphate
  modified_base 16: mod_base = OTHER; note = 2'-O-methylguanosine-3'-phosphate
  modified_base 17: mod_base = OTHER; note = 2'-O-methylcytidine-3'-phosphate
  modified_base 18: mod_base = OTHER; note = 2'-O-methyluridine-3'-phosphate
  modified_base 19: mod_base = OTHER; note = 2'-O-methylcytidine-3'-phosphate
  modified_base 20: mod_base = OTHER; note = 2'-O-methylcytidine-3'-phosphate
  modified_base 21: mod_base = OTHER; note = 2'-O-methylcytidine-3'-phosphate attached to N-[tris(N-acetylgalactosamine-alkyl)-amidodecanoyl)]-4-hydr oxyprolinol Hyp-(N-acetylgalactosamine-alkyl)3
ataacctgtgaaaatgctccc

SEQ ID NO: 1989 - RNA, 23 nt, synthetic construct
  misc_feature 1..23: note = Description of Artificial Sequence: Synthetic oligonucleotide
  source 1..23: mol_type = other RNA
  modified_base 1: mod_base = OTHER; note = 2'-O-methylguanosine-3'- phosphorothioate
  modified_base 2: mod_base = OTHER; note = 2'-fluoroguanosine-3'-phosphorothioate
  modified_base 3: mod_base = OTHER; note = 2'-O-methylguanosine-3'-phosphate
  modified_base 4: mod_base = OTHER; note = 2'-O-methyladenosine-3'-phosphate
  modified_base 5: mod_base = OTHER; note = 2'-O-methylguanosine-3'-phosphate
  modified_base 6: mod_base = OTHER; note = 2'-fluorocytidine-3'-phosphate
  modified_base 7: mod_base = OTHER; note = 2'-O-methyladenosine-3'-phosphate
  modified_base 8: mod_base = OTHER; note = 2'-fluorouridine-3'-phosphate
  modified_base 9: mod_base = OTHER; note = 2'-fluorouridine-3'-phosphate
  modified_base 10: mod_base = OTHER; note = 2'-O-methyluridine-3'-phosphate
  modified_base 11: mod_base = OTHER; note = 2'-O-methyluridine-3'-phosphate
  modified_base 12: mod_base = OTHER; note = 2'-O-methylcytidine-3'-phosphate
  modified_base 13: mod_base = OTHER; note = 2'-O-methyladenosine-3'-phosphate
  modified_base 14: mod_base = OTHER; note = 2'-fluorocytidine-3'-phosphate
  modified_base 15: mod_base = OTHER; note = 2'-O-methyladenosine-3'-phosphate
  modified_base 16: mod_base = OTHER; note = 2'-fluoroguanosine-3'-phosphate
  modified_base 17: mod_base = OTHER; note = 2'-O-methylguanosine-3'-phosphate
  modified_base 18: mod_base = OTHER; note = 2'-O-methyluridine-3'-phosphate
  modified_base 19: mod_base = OTHER; note = 2'-O-methyluridine-3'-phosphate
  modified_base 20: mod_base = OTHER; note = 2'-O-methyladenosine-3'-phosphate
  modified_base 21: mod_base = OTHER; note = 2'-O-methyluridine-3'-phosphorothioate
  modified_base 22: mod_base = OTHER; note = 2'-O-methyluridine-3'-phosphorothioate
  modified_base 23: mod_base = OTHER; note = 2'-O-methylguanosine-3'-phosphate
gggagcattttcacaggttattg

SEQ ID NO: 1990 - RNA, 21 nt, synthetic construct
  misc_feature 1..21: note = Description of Artificial Sequence: Synthetic oligonucleotide
  source 1..21: mol_type = other RNA
  modified_base 1: mod_base = OTHER; note = 2'-O-methyluridine-3'-phosphorothioate
  modified_base 2: mod_base = OTHER; note = 2'-O-methyladenosine-3'- phosphorothioate
  modified_base 3: mod_base = OTHER; note = 2'-O-methylguanosine-3'-phosphate
  modified_base 4: mod_base = OTHER; note = 2'-O-methylcytidine-3'-phosphate
  modified_base 5: mod_base = OTHER; note = 2'-O-methyladenosine-3'-phosphate
  modified_base 6: mod_base = OTHER; note = 2'-O-methyladenosine-3'-phosphate
  modified_base 7: mod_base = OTHER; note = 2'-fluorouridine-3'-phosphate
  modified_base 8: mod_base = OTHER; note = 2'-O-methyladenosine-3'-phosphate
  modified_base 9: mod_base = OTHER; note = 2'-fluoroadenosine-3'-phosphate
  modified_base 10: mod_base = OTHER; note = 2'-fluorocytidine-3'-phosphate
  modified_base 11: mod_base = OTHER; note = 2'-fluorocytidine-3'-phosphate
  modified_base 12: mod_base = OTHER; note = 2'-O-methyluridine-3'-phosphate
  modified_base 13: mod_base = OTHER; note = 2'-O-methylguanosine-3'-phosphate
  modified_base 14: mod_base = OTHER; note = 2'-O-methyluridine-3'-phosphate
  modified_base 15: mod_base = OTHER; note = 2'-O-methylguanosine-3'-phosphate
  modified_base 16: mod_base = OTHER; note = 2'-O-methyladenosine-3'-phosphate
  modified_base 17: mod_base = OTHER; note = 2'-O-methyladenosine-3'-phosphate
  modified_base 18: mod_base = OTHER; note = 2'-O-methyladenosine-3'-phosphate
  modified_base 19: mod_base = OTHER; note = 2'-O-methyladenosine-3'-phosphate
  modified_base 20: mod_base = OTHER; note = 2'-O-methyluridine-3'-phosphate
  modified_base 21: mod_base = OTHER; note = 2'-O-methylguanosine-3'-phosphate attached to N-[tris(N-acetylgalactosamine-alkyl)-amidodecanoyl)]-4-hydr oxyprolinol Hyp-(N-acetylgalactosamine-alkyl)3
tagcaataacctgtgaaaatg

SEQ ID NO: 1991 - RNA, 23 nt, synthetic construct
  misc_feature 1..23: note = Description of Artificial Sequence: Synthetic oligonucleotide
  source 1..23: mol_type = other RNA
  modified_base 1: mod_base = OTHER; note = 2'-O-methylcytidine-3'- phosphorothioate
  modified_base 2: mod_base = OTHER; note = 2'-fluoroadenosine-3'-phosphorothioate
  modified_base 3: mod_base = OTHER; note = 2'-O-methyluridine-3'-phosphate
  modified_base 4: mod_base = OTHER; note = 2'-O-methyluridine-3'-phosphate
  modified_base 5: mod_base = OTHER; note = 2'-O-methyluridine-3'-phosphate
  modified_base 6: mod_base = OTHER; note = 2'-fluorouridine-3'-phosphate
  modified_base 7: mod_base = OTHER; note = 2'-O-methylcytidine-3'-phosphate
  modified_base 8: mod_base = OTHER; note = 2'-fluoroadenosine-3'-phosphate
  modified_base 9: mod_base = OTHER; note = 2'-fluorocytidine-3'-phosphate
  modified_base 10: mod_base = OTHER; note = 2'-O-methyladenosine-3'-phosphate
  modified_base 11: mod_base = OTHER; note = 2'-O-methylguanosine-3'-phosphate
  modified_base 12: mod_base = OTHER; note = 2'-O-methylguanosine-3'-phosphate
  modified_base 13: mod_base = OTHER; note = 2'-O-methyluridine-3'-phosphate
  modified_base 14: mod_base = OTHER; note = 2'-fluorouridine-3'-phosphate
  modified_base 15: mod_base = OTHER; note = 2'-O-methyladenosine-3'-phosphate
  modified_base 16: mod_base = OTHER; note = 2'-fluorouridine-3'-phosphate
  modified_base 17: mod_base = OTHER; note = 2'-O-methyluridine-3'-phosphate
  modified_base 18: mod_base = OTHER; note = 2'-O-methylguanosine-3'-phosphate
  modified_base 19: mod_base = OTHER; note = 2'-O-methylcytidine-3'-phosphate
  modified_base 20: mod_base = OTHER; note = 2'-O-methyluridine-3'-phosphate
  modified_base 21: mod_base = OTHER; note = 2'-O-methyladenosine-3'- phosphorothioate
  modified_base 22: mod_base = OTHER; note = 2'-O-methyluridine-3'-phosphorothioate
  modified_base 23: mod_base = OTHER; note = 2'-O-methylcytidine-3'-phosphate
cattttcacaggttattgctatc

SEQ ID NO: 1992 - RNA, 21 nt, synthetic construct
  misc_feature 1..21: note = Description of Artificial Sequence: Synthetic oligonucleotide
  source 1..21: mol_type = other RNA
  modified_base 1: mod_base = OTHER; note = 2'-O-methyladenosine-3'- phosphorothioate
  modified_base 2: mod_base = OTHER; note = 2'-O-methyluridine-3'-phosphorothioate
  modified_base 3: mod_base = OTHER; note = 2'-O-methyladenosine-3'-phosphate
  modified_base 4: mod_base = OTHER; note = 2'-O-methylguanosine-3'-phosphate
  modified_base 5: mod_base = OTHER; note = 2'-O-methylcytidine-3'-phosphate
  modified_base 6: mod_base = OTHER; note = 2'-O-methyladenosine-3'-phosphate
  modified_base 7: mod_base = OTHER; note = 2'-fluoroadenosine-3'-phosphate
  modified_base 8: mod_base = OTHER; note = 2'-O-methyluridine-3'-phosphate
  modified_base 9: mod_base = OTHER; note = 2'-fluoroadenosine-3'-phosphate
  modified_base 10: mod_base = OTHER; note = 2'-fluoroadenosine-3'-phosphate
  modified_base 11: mod_base = OTHER; note = 2'-fluorocytidine-3'-phosphate
  modified_base 12: mod_base = OTHER; note = 2'-O-methylcytidine-3'-phosphate
  modified_base 13: mod_base = OTHER; note = 2'-O-methyluridine-3'-phosphate
  modified_base 14: mod_base = OTHER; note = 2'-O-methylguanosine-3'-phosphate
  modified_base 15: mod_base = OTHER; note = 2'-O-methyluridine-3'-phosphate
  modified_base 16: mod_base = OTHER; note = 2'-O-methylguanosine-3'-phosphate
  modified_base 17: mod_base = OTHER; note = 2'-O-methyladenosine-3'-phosphate
  modified_base 18: mod_base = OTHER; note = 2'-O-methyladenosine-3'-phosphate
  modified_base 19: mod_base = OTHER; note = 2'-O-methyladenosine-3'-phosphate
  modified_base 20: mod_base = OTHER; note = 2'-O-methyladenosine-3'-phosphate
  modified_base 21: mod_base = OTHER; note = 2'-O-methyluridine-3'-phosphate attached to N-[tris(N-acetylgalactosamine-alkyl)-amidodecanoyl)]-4-hydr oxyprolinol Hyp-(N-acetylgalactosamine-alkyl)3
atagcaataacctgtgaaaat

SEQ ID NO: 1993 - RNA, 23 nt, synthetic construct
  misc_feature 1..23: note = Description of Artificial Sequence: Synthetic oligonucleotide
  source 1..23: mol_type = other RNA
  modified_base 1: mod_base = OTHER; note = 2'-O-methyladenosine-3'- phosphorothioate
  modified_base 2: mod_base = OTHER; note = 2'-fluorouridine -3'-phosphorothioate
  modified_base 3: mod_base = OTHER; note = 2'-O-methyluridine-3'-phosphate
  modified_base 4: mod_base = OTHER; note = 2'-O-methyluridine-3'-phosphate
  modified_base 5: mod_base = OTHER; note = 2'-O-methyluridine-3'-phosphate
  modified_base 6: mod_base = OTHER; note = 2'-fluorocytidine-3'-phosphate
  modified_base 7: mod_base = OTHER; note = 2'-O-methyladenosine-3'-phosphate
  modified_base 8: mod_base = OTHER; note = 2'-fluorocytidine-3'-phosphate
  modified_base 9: mod_base = OTHER; note = 2'-fluoroadenosine-3'-phosphate
  modified_base 10: mod_base = OTHER; note = 2'-O-methylguanosine-3'-phosphate
  modified_base 11: mod_base = OTHER; note = 2'-O-methylguanosine-3'-phosphate
  modified_base 12: mod_base = OTHER; note = 2'-O-methyluridine-3'-phosphate
  modified_base 13: mod_base = OTHER; note = 2'-O-methyluridine-3'-phosphate
  modified_base 14: mod_base = OTHER; note = 2'-fluoroadenosine-3'-phosphate
  modified_base 15: mod_base = OTHER; note = 2'-O-methyluridine-3'-phosphate
  modified_base 16: mod_base = OTHER; note = 2'-fluorouridine-3'-phosphate
  modified_base 17: mod_base = OTHER; note = 2'-O-methylguanosine-3'-phosphate
  modified_base 18: mod_base = OTHER; note = 2'-O-methylcytidine-3'-phosphate
  modified_base 19: mod_base = OTHER; note = 2'-O-methyluridine-3'-phosphate
  modified_base 20: mod_base = OTHER; note = 2'-O-methyladenosine-3'-phosphate
  modified_base 21: mod_base = OTHER; note = 2'-O-methyluridine-3'-phosphorothioate
  modified_base 22: mod_base = OTHER; note = 2'-O-methylcytidine-3'- phosphorothioate
  modified_base 23: mod_base = OTHER; note = 2'-O-methylcytidine-3'-phosphate
attttcacaggttattgctatcc

SEQ ID NO: 1994 - RNA, 21 nt, synthetic construct
  misc_feature 1..21: note = Description of Artificial Sequence: Synthetic oligonucleotide
  source 1..21: mol_type = other RNA
  modified_base 1: mod_base = OTHER; note = 2'-O-methyladenosine-3'- phosphorothioate
  modified_base 2: mod_base = OTHER; note = 2'-O-methyladenosine-3'- phosphorothioate
  modified_base 3: mod_base = OTHER; note = 2'-O-methyluridine-3'-phosphate
  modified_base 4: mod_base = OTHER; note = 2'-O-methylcytidine-3'-phosphate
  modified_base 5: mod_base = OTHER; note = 2'-O-methyladenosine-3'-phosphate
  modified_base 6: mod_base = OTHER; note = 2'-O-methylcytidine-3'-phosphate
  modified_base 7: mod_base = OTHER; note = 2'-fluoroadenosine-3'-phosphate
  modified_base 8: mod_base = OTHER; note = 2'-O-methyluridine-3'-phosphate
  modified_base 9: mod_base = OTHER; note = 2'-fluorocytidine-3'-phosphate
  modified_base 10: mod_base = OTHER; note = 2'-fluorouridine-3'-phosphate
  modified_base 11: mod_base = OTHER; note = 2'-fluorouridine-3'-phosphate
  modified_base 12: mod_base = OTHER; note = 2'-O-methyluridine-3'-phosphate
  modified_base 13: mod_base = OTHER; note = 2'-O-methyladenosine-3'-phosphate
  modified_base 14: mod_base = OTHER; note = 2'-O-methylguanosine-3'-phosphate
  modified_base 15: mod_base = OTHER; note = 2'-O-methyluridine-3'-phosphate
  modified_base 16: mod_base = OTHER; note = 2'-O-methylguanosine-3'-phosphate
  modified_base 17: mod_base = OTHER; note = 2'-O-methyluridine-3'-phosphate
  modified_base 18: mod_base = OTHER; note = 2'-O-methylcytidine-3'-phosphate
  modified_base 19: mod_base = OTHER; note = 2'-O-methyluridine-3'-phosphate
  modified_base 20: mod_base = OTHER; note = 2'-O-methylguanosine-3'-phosphate
  modified_base 21: mod_base = OTHER; note = 2'-O-methyladenosine-3'-phosphate attached to N-[tris(N-acetylgalactosamine-alkyl)-amidodecanoyl)]-4-hydr oxyprolinol Hyp-(N-acetylgalactosamine-alkyl)3
aatcacatctttagtgtctga

SEQ ID NO: 1995 - RNA, 23 nt, synthetic construct
  misc_feature 1..23: note = Description of Artificial Sequence: Synthetic oligonucleotide
  source 1..23: mol_type = other RNA
  modified_base 1: mod_base = OTHER; note = 2'-O-methyluridine-3'-phosphorothioate
  modified_base 2: mod_base = OTHER; note = 2'-fluorocytidine-3'-phosphorothioate
  modified_base 3: mod_base = OTHER; note = 2'-O-methyladenosine-3'-phosphate
  modified_base 4: mod_base = OTHER; note = 2'-O-methylguanosine-3'-phosphate
  modified_base 5: mod_base = OTHER; note = 2'-O-methyladenosine-3'-phosphate
  modified_base 6: mod_base = OTHER; note = 2'-fluorocytidine-3'-phosphate
  modified_base 7: mod_base = OTHER; note = 2'-O-methyladenosine-3'-phosphate
  modified_base 8: mod_base = OTHER; note = 2'-fluorocytidine-3'-phosphate
  modified_base 9: mod_base = OTHER; note = 2'-fluorouridine-3'-phosphate
  modified_base 10: mod_base = OTHER; note = 2'-O-methyladenosine-3'-phosphate
  modified_base 11: mod_base = OTHER; note = 2'-O-methyladenosine-3'-phosphate
  modified_base 12: mod_base = OTHER; note = 2'-O-methyladenosine-3'-phosphate
  modified_base 13: mod_base = OTHER; note = 2'-O-methylguanosine-3'-phosphate
  modified_base 14: mod_base = OTHER; note = 2'-fluoroadenosine-3'-phosphate
  modified_base 15: mod_base = OTHER; note = 2'-O-methyluridine-3'-phosphate
  modified_base 16: mod_base = OTHER; note = 2'-fluoroguanosine-3'-phosphate
  modified_base 17: mod_base = OTHER; note = 2'-O-methyluridine-3'-phosphate
  modified_base 18: mod_base = OTHER; note = 2'-O-methylguanosine-3'-phosphate
  modified_base 19: mod_base = OTHER; note = 2'-O-methyladenosine-3'-phosphate
  modified_base 20: mod_base = OTHER; note = 2'-O-methyluridine-3'-phosphate
  modified_base 21: mod_base = OTHER; note = 2'-O-methyluridine-3'-phosphorothioate
  modified_base 22: mod_base = OTHER; note = 2'-O-methylguanosine-3'- phosphorothioate
  modified_base 23: mod_base = OTHER; note = 2'-O-methylguanosine-3'-phosphate
tcagacactaaagatgtgattgg

SEQ ID NO: 1996 - RNA, 21 nt, synthetic construct
  misc_feature 1..21: note = Description of Artificial Sequence: Synthetic oligonucleotide
  source 1..21: mol_type = other RNA
  modified_base 1: mod_base = OTHER; note = 2'-O-methyladenosine-3'- phosphorothioate
  modified_base 2: mod_base = OTHER; note = 2'-O-methyluridine-3'-phosphorothioate
  modified_base 3: mod_base = OTHER; note = 2'-O-methylcytidine-3'-phosphate
  modified_base 4: mod_base = OTHER; note = 2'-O-methyladenosine-3'-phosphate
  modified_base 5: mod_base = OTHER; note = 2'-O-methylcytidine-3'-phosphate
  modified_base 6: mod_base = OTHER; note = 2'-O-methyladenosine-3'-phosphate
  modified_base 7: mod_base = OTHER; note = 2'-fluorouridine-3'-phosphate
  modified_base 8: mod_base = OTHER; note = 2'-O-methylcytidine-3'-phosphate
  modified_base 9: mod_base = OTHER; note = 2'-fluorouridine-3'-phosphate
  modified_base 10: mod_base = OTHER; note = 2'-fluorouridine-3'-phosphate
  modified_base 11: mod_base = OTHER; note = 2'-fluorouridine-3'-phosphate
  modified_base 12: mod_base = OTHER; note = 2'-O-methyladenosine-3'-phosphate
  modified_base 13: mod_base = OTHER; note = 2'-O-methylguanosine-3'-phosphate
  modified_base 14: mod_base = OTHER; note = 2'-O-methyluridine-3'-phosphate
  modified_base 15: mod_base = OTHER; note = 2'-O-methylguanosine-3'-phosphate
  modified_base 16: mod_base = OTHER; note = 2'-O-methyluridine-3'-phosphate
  modified_base 17: mod_base = OTHER; note = 2'-O-methylcytidine-3'-phosphate
  modified_base 18: mod_base = OTHER; note = 2'-O-methyluridine-3'-phosphate
  modified_base 19: mod_base = OTHER; note = 2'-O-methylguanosine-3'-phosphate
  modified_base 20: mod_base = OTHER; note = 2'-O-methyladenosine-3'-phosphate
  modified_base 21: mod_base = OTHER; note = 2'-O-methyladenosine-3'-phosphate attached to N-[tris(N-acetylgalactosamine-alkyl)-amidodecanoyl)]-4-hydr oxyprolinol Hyp-(N-acetylgalactosamine-alkyl)3
atcacatctttagtgtctgaa

SEQ ID NO: 1997 - RNA, 23 nt, synthetic construct
  misc_feature 1..23: note = Description of Artificial Sequence: Synthetic oligonucleotide
  source 1..23: mol_type = other RNA
  modified_base 1: mod_base = OTHER; note = 2'-O-methyluridine-3'-phosphorothioate
  modified_base 2: mod_base = OTHER; note = 2'-fluorouridine -3'-phosphorothioate
  modified_base 3: mod_base = OTHER; note = 2'-O-methylcytidine-3'-phosphate
  modified_base 4: mod_base = OTHER; note = 2'-O-methyladenosine-3'-phosphate
  modified_base 5: mod_base = OTHER; note = 2'-O-methylguanosine-3'-phosphate
  modified_base 6: mod_base = OTHER; note = 2'-fluoroadenosine-3'-phosphate
  modified_base 7: mod_base = OTHER; note = 2'-O-methylcytidine-3'-phosphate
  modified_base 8: mod_base = OTHER; note = 2'-fluoroadenosine-3'-phosphate
  modified_base 9: mod_base = OTHER; note = 2'-fluorocytidine-3'-phosphate
  modified_base 10: mod_base = OTHER; note = 2'-O-methyluridine-3'-phosphate
  modified_base 11: mod_base = OTHER; note = 2'-O-methyladenosine-3'-phosphate
  modified_base 12: mod_base = OTHER; note = 2'-O-methyladenosine-3'-phosphate
  modified_base 13: mod_base = OTHER; note = 2'-O-methyladenosine-3'-phosphate
  modified_base 14: mod_base = OTHER; note = 2'-fluoroguanosine-3'-phosphate
  modified_base 15: mod_base = OTHER; note = 2'-O-methyladenosine-3'-phosphate
  modified_base 16: mod_base = OTHER; note = 2'-fluorouridine-3'-phosphate
  modified_base 17: mod_base = OTHER; note = 2'-O-methylguanosine-3'-phosphate
  modified_base 18: mod_base = OTHER; note = 2'-O-methyluridine-3'-phosphate
  modified_base 19: mod_base = OTHER; note = 2'-O-methylguanosine-3'-phosphate
  modified_base 20: mod_base = OTHER; note = 2'-O-methyladenosine-3'-phosphate
  modified_base 21: mod_base = OTHER; note = 2'-O-methyluridine-3'-phosphorothioate
  modified_base 22: mod_base = OTHER; note = 2'-O-methyluridine-3'-phosphorothioate
  modified_base 23: mod_base = OTHER; note = 2'-O-methylguanosine-3'-phosphate
ttcagacactaaagatgtgattg

SEQ ID NO: 1998 - RNA, 21 nt, synthetic construct
  misc_feature 1..21: note = Description of Artificial Sequence: Synthetic oligonucleotide
  source 1..21: mol_type = other RNA
  modified_base 1: mod_base = OTHER; note = 2'-O-methyluridine-3'-phosphorothioate
  modified_base 2: mod_base = OTHER; note = 2'-O-methyluridine-3'-phosphorothioate
  modified_base 3: mod_base = OTHER; note = 2'-O-methylcytidine-3'-phosphate
  modified_base 4: mod_base = OTHER; note = 2'-O-methylcytidine-3'-phosphate
  modified_base 5: mod_base = OTHER; note = 2'-O-methyladenosine-3'-phosphate
  modified_base 6: mod_base = OTHER; note = 2'-O-methyladenosine-3'-phosphate
  modified_base 7: mod_base = OTHER; note = 2'-fluorouridine-3'-phosphate
  modified_base 8: mod_base = OTHER; note = 2'-O-methylcytidine-3'-phosphate
  modified_base 9: mod_base = OTHER; note = 2'-fluoroadenosine-3'-phosphate
  modified_base 10: mod_base = OTHER; note = 2'-fluorocytidine-3'-phosphate
  modified_base 11: mod_base = OTHER; note = 2'-fluoroadenosine-3'-phosphate
  modified_base 12: mod_base = OTHER; note = 2'-O-methyluridine-3'-phosphate
  modified_base 13: mod_base = OTHER; note = 2'-O-methylcytidine-3'-phosphate
  modified_base 14: mod_base = OTHER; note = 2'-O-methyluridine-3'-phosphate
  modified_base 15: mod_base = OTHER; note = 2'-O-methyluridine-3'-phosphate
  modified_base 16: mod_base = OTHER; note = 2'-O-methyluridine-3'-phosphate
  modified_base 17: mod_base = OTHER; note = 2'-O-methyladenosine-3'-phosphate
  modified_base 18: mod_base = OTHER; note = 2'-O-methylguanosine-3'-phosphate
  modified_base 19: mod_base = OTHER; note = 2'-O-methyluridine-3'-phosphate
  modified_base 20: mod_base = OTHER; note = 2'-O-methylguanosine-3'-phosphate
  modified_base 21: mod_base = OTHER; note = 2'-O-methyluridine-3'-phosphate attached to N-[tris(N-acetylgalactosamine-alkyl)-amidodecanoyl)]-4-hydr oxyprolinol Hyp-(N-acetylgalactosamine-alkyl)3
ttccaatcacatctttagtgt

SEQ ID NO: 1999 - RNA, 23 nt, synthetic construct
  misc_feature 1..23: note = Description of Artificial Sequence: Synthetic oligonucleotide
  source 1..23: mol_type = other RNA
  modified_base 1: mod_base = OTHER; note = 2'-O-methyladenosine-3'- phosphorothioate
  modified_base 2: mod_base = OTHER; note = 2'-fluorocytidine-3'-phosphorothioate
  modified_base 3: mod_base = OTHER; note = 2'-O-methyladenosine-3'-phosphate
  modified_base 4: mod_base = OTHER; note = 2'-O-methylcytidine-3'-phosphate
  modified_base 5: mod_base = OTHER; note = 2'-O-methyluridine-3'-phosphate
  modified_base 6: mod_base = OTHER; note = 2'-fluoroadenosine-3'-phosphate
  modified_base 7: mod_base = OTHER; note = 2'-O-methyladenosine-3'-phosphate
  modified_base 8: mod_base = OTHER; note = 2'-fluoroadenosine-3'-phosphate
  modified_base 9: mod_base = OTHER; note = 2'-fluoroguanosine-3'-phosphate
  modified_base 10: mod_base = OTHER; note = 2'-O-methyladenosine-3'-phosphate
  modified_base 11: mod_base = OTHER; note = 2'-O-methyluridine-3'-phosphate
  modified_base 12: mod_base = OTHER; note = 2'-O-methylguanosine-3'-phosphate
  modified_base 13: mod_base = OTHER; note = 2'-O-methyluridine-3'-phosphate
  modified_base 14: mod_base = OTHER; note = 2'-fluoroguanosine-3'-phosphate
  modified_base 15: mod_base = OTHER; note = 2'-O-methyladenosine-3'-phosphate
  modified_base 16: mod_base = OTHER; note = 2'-fluorouridine-3'-phosphate
  modified_base 17: mod_base = OTHER; note = 2'-O-methyluridine-3'-phosphate
  modified_base 18: mod_base = OTHER; note = 2'-O-methylguanosine-3'-phosphate
  modified_base 19: mod_base = OTHER; note = 2'-O-methylguanosine-3'-phosphate
  modified_base 20: mod_base = OTHER; note = 2'-O-methyladenosine-3'-phosphate
  modified_base 21: mod_base = OTHER; note = 2'-O-methyladenosine-3'- phosphorothioate
  modified_base 22: mod_base = OTHER; note = 2'-O-methyladenosine-3'- phosphorothioate
  modified_base 23: mod_base = OTHER; note = 2'-O-methyluridine-3'-phosphate
acactaaagatgtgattggaaat

SEQ ID NO: 2000 - RNA, 21 nt, synthetic construct
  misc_feature 1..21: note = Description of Artificial Sequence: Synthetic oligonucleotide
  source 1..21: mol_type = other RNA
  modified_base 1: mod_base = OTHER; note = 2'-O-methyluridine-3'-phosphorothioate
  modified_base 2: mod_base = OTHER; note = 2'-O-methyluridine-3'-phosphorothioate
  modified_base 3: mod_base = OTHER; note = 2'-O-methyluridine-3'-phosphate
  modified_base 4: mod_base = OTHER; note = 2'-O-methylcytidine-3'-phosphate
  modified_base 5: mod_base = OTHER; note = 2'-O-methylcytidine-3'-phosphate
  modified_base 6: mod_base = OTHER; note = 2'-O-methyladenosine-3'-phosphate
  modified_base 7: mod_base = OTHER; note = 2'-fluoroadenosine-3'-phosphate
  modified_base 8: mod_base = OTHER; note = 2'-O-methyluridine-3'-phosphate
  modified_base 9: mod_base = OTHER; note = 2'-fluorocytidine-3'-phosphate
  modified_base 10: mod_base = OTHER; note = 2'-fluoroadenosine-3'-phosphate
  modified_base 11: mod_base = OTHER; note = 2'-fluorocytidine-3'-phosphate
  modified_base 12: mod_base = OTHER; note = 2'-O-methyladenosine-3'-phosphate
  modified_base 13: mod_base = OTHER; note = 2'-O-methyluridine-3'-phosphate
  modified_base 14: mod_base = OTHER; note = 2'-O-methylcytidine-3'-phosphate
  modified_base 15: mod_base = OTHER; note = 2'-O-methyluridine-3'-phosphate
  modified_base 16: mod_base = OTHER; note = 2'-O-methyluridine-3'-phosphate
  modified_base 17: mod_base = OTHER; note = 2'-O-methyluridine-3'-phosphate
  modified_base 18: mod_base = OTHER; note = 2'-O-methyladenosine-3'-phosphate
  modified_base 19: mod_base = OTHER; note = 2'-O-methylguanosine-3'-phosphate
  modified_base 20: mod_base = OTHER; note = 2'-O-methyluridine-3'-phosphate
  modified_base 21: mod_base = OTHER; note = 2'-O-methylguanosine-3'-phosphate attached to N-[tris(N-acetylgalactosamine-alkyl)-amidodecanoyl)]-4-hydr oxyprolinol Hyp-(N-acetylgalactosamine-alkyl)3
tttccaatcacatctttagtg

SEQ ID NO: 2001 - RNA, 23 nt, synthetic construct
  misc_feature 1..23: note = Description of Artificial Sequence: Synthetic oligonucleotide
  source 1..23: mol_type = other RNA
  modified_base 1: mod_base = OTHER; note = 2'-O-methylcytidine-3'- phosphorothioate
  modified_base 2: mod_base = OTHER; note = 2'-fluoroadenosine-3'-phosphorothioate
  modified_base 3: mod_base = OTHER; note = 2'-O-methylcytidine-3'-phosphate
  modified_base 4: mod_base = OTHER; note = 2'-O-methyluridine-3'-phosphate
  modified_base 5: mod_base = OTHER; note = 2'-O-methyladenosine-3'-phosphate
  modified_base 6: mod_base = OTHER; note = 2'-fluoroadenosine-3'-phosphate
  modified_base 7: mod_base = OTHER; note = 2'-O-methyladenosine-3'-phosphate
  modified_base 8: mod_base = OTHER; note = 2'-fluoroguanosine-3'-phosphate
  modified_base 9: mod_base = OTHER; note = 2'-fluoroadenosine-3'-phosphate
  modified_base 10: mod_base = OTHER; note = 2'-O-methyluridine-3'-phosphate
  modified_base 11: mod_base = OTHER; note = 2'-O-methylguanosine-3'-phosphate
  modified_base 12: mod_base = OTHER; note = 2'-O-methyluridine-3'-phosphate
  modified_base 13: mod_base = OTHER; note = 2'-O-methylguanosine-3'-phosphate
  modified_base 14: mod_base = OTHER; note = 2'-fluoroadenosine-3'-phosphate
  modified_base 15: mod_base = OTHER; note = 2'-O-methyluridine-3'-phosphate
  modified_base 16: mod_base = OTHER; note = 2'-fluorouridine-3'-phosphate
  modified_base 17: mod_base = OTHER; note = 2'-O-methylguanosine-3'-phosphate
  modified_base 18: mod_base = OTHER; note = 2'-O-methylguanosine-3'-phosphate
  modified_base 19: mod_base = OTHER; note = 2'-O-methyladenosine-3'-phosphate
  modified_base 20: mod_base = OTHER; note = 2'-O-methyladenosine-3'-phosphate
  modified_base 21: mod_base = OTHER; note = 2'-O-methyladenosine-3'- phosphorothioate
  modified_base 22: mod_base = OTHER; note = 2'-O-methyluridine-3'-phosphorothioate
  modified_base 23: mod_base = OTHER; note = 2'-O-methylcytidine-3'-phosphate
cactaaagatgtgattggaaatc

SEQ ID NO: 2002 - RNA, 21 nt, synthetic construct
  misc_feature 1..21: note = Description of Artificial Sequence: Synthetic oligonucleotide
  source 1..21: mol_type = other RNA
  modified_base 1: mod_base = OTHER; note = 2'-O-methyladenosine-3'- phosphorothioate
  modified_base 2: mod_base = OTHER; note = 2'-O-methylcytidine-3'- phosphorothioate
  modified_base 3: mod_base = OTHER; note = 2'-O-methylguanosine-3'-phosphate
  modified_base 4: mod_base = OTHER; note = 2'-O-methylguanosine-3'-phosphate
  modified_base 5: mod_base = OTHER; note = 2'-O-methylguanosine-3'-phosphate
  modified_base 6: mod_base = OTHER; note = 2'-O-methylcytidine-3'-phosphate
  modified_base 7: mod_base = OTHER; note = 2'-fluoroadenosine-3'-phosphate
  modified_base 8: mod_base = OTHER; note = 2'-O-methyluridine-3'-phosphate
  modified_base 9: mod_base = OTHER; note = 2'-fluoroguanosine-3'-phosphate
  modified_base 10: mod_base = OTHER; note = 2'-fluoroadenosine-3'-phosphate
  modified_base 11: mod_base = OTHER; note = 2'-fluorouridine-3'-phosphate
  modified_base 12: mod_base = OTHER; note = 2'-O-methylguanosine-3'-phosphate
  modified_base 13: mod_base = OTHER; note = 2'-O-methyluridine-3'-phosphate
  modified_base 14: mod_base = OTHER; note = 2'-O-methyluridine-3'-phosphate
  modified_base 15: mod_base = OTHER; note = 2'-O-methylguanosine-3'-phosphate
  modified_base 16: mod_base = OTHER; note = 2'-O-methyladenosine-3'-phosphate
  modified_base 17: mod_base = OTHER; note = 2'-O-methylguanosine-3'-phosphate
  modified_base 18: mod_base = OTHER; note = 2'-O-methyluridine-3'-phosphate
  modified_base 19: mod_base = OTHER; note = 2'-O-methyluridine-3'-phosphate
  modified_base 20: mod_base = OTHER; note = 2'-O-methylcytidine-3'-phosphate
  modified_base 21: mod_base = OTHER; note = 2'-O-methylcytidine-3'-phosphate attached to N-[tris(N-acetylgalactosamine-alkyl)-amidodecanoyl)]-4-hydr oxyprolinol Hyp-(N-acetylgalactosamine-alkyl)3
acgggcatgatgttgagttcc

SEQ ID NO: 2003 - RNA, 23 nt, synthetic construct
  misc_feature 1..23: note = Description of Artificial Sequence: Synthetic oligonucleotide
  source 1..23: mol_type = other RNA
  modified_base 1: mod_base = OTHER; note = 2'-O-methylguanosine-3'- phosphorothioate
  modified_base 2: mod_base = OTHER; note = 2'-fluoroguanosine-3'-phosphorothioate
  modified_base 3: mod_base = OTHER; note = 2'-O-methyladenosine-3'-phosphate
  modified_base 4: mod_base = OTHER; note = 2'-O-methyladenosine-3'-phosphate
  modified_base 5: mod_base = OTHER; note = 2'-O-methylcytidine-3'-phosphate
  modified_base 6: mod_base = OTHER; note = 2'-fluorouridine-3'-phosphate
  modified_base 7: mod_base = OTHER; note = 2'-O-methylcytidine-3'-phosphate
  modified_base 8: mod_base = OTHER; note = 2'-fluoroadenosine-3'-phosphate
  modified_base 9: mod_base = OTHER; note = 2'-fluoroadenosine-3'-phosphate
  modified_base 10: mod_base = OTHER; note = 2'-O-methylcytidine-3'-phosphate
  modified_base 11: mod_base = OTHER; note = 2'-O-methyladenosine-3'-phosphate
  modified_base 12: mod_base = OTHER; note = 2'-O-methyluridine-3'-phosphate
  modified_base 13: mod_base = OTHER; note = 2'-O-methylcytidine-3'-phosphate
  modified_base 14: mod_base = OTHER; note = 2'-fluoroadenosine-3'-phosphate
  modified_base 15: mod_base = OTHER; note = 2'-O-methyluridine-3'-phosphate
  modified_base 16: mod_base = OTHER; note = 2'-fluoroguanosine-3'-phosphate
  modified_base 17: mod_base = OTHER; note = 2'-O-methylcytidine-3'-phosphate
  modified_base 18: mod_base = OTHER; note = 2'-O-methylcytidine-3'-phosphate
  modified_base 19: mod_base = OTHER; note = 2'-O-methylcytidine-3'-phosphate
  modified_base 20: mod_base = OTHER; note = 2'-O-methylguanosine-3'-phosphate
  modified_base 21: mod_base = OTHER; note = 2'-O-methyluridine-3'-phosphorothioate
  modified_base 22: mod_base = OTHER; note = 2'-O-methyluridine-3'-phosphorothioate
  modified_base 23: mod_base = OTHER; note = 2'-O-methylcytidine-3'-phosphate
ggaactcaacatcatgcccgttc

SEQ ID NO: 2004 - RNA, 21 nt, synthetic construct
  misc_feature 1..21: note = Description of Artificial Sequence: Synthetic oligonucleotide
  source 1..21: mol_type = other RNA
  modified_base 1: mod_base = OTHER; note = 2'-O-methylcytidine-3'- phosphorothioate
  modified_base 2: mod_base = OTHER; note = 2'-O-methylguanosine-3'- phosphorothioate
  modified_base 3: mod_base = OTHER; note = 2'-O-methylguanosine-3'-phosphate
  modified_base 4: mod_base = OTHER; note = 2'-O-methylguanosine-3'-phosphate
  modified_base 5: mod_base = OTHER; note = 2'-O-methylcytidine-3'-phosphate
  modified_base 6: mod_base = OTHER; note = 2'-O-methyladenosine-3'-phosphate
  modified_base 7: mod_base = OTHER; note = 2'-fluorouridine-3'-phosphate
  modified_base 8: mod_base = OTHER; note = 2'-O-methylguanosine-3'-phosphate
  modified_base 9: mod_base = OTHER; note = 2'-fluoroadenosine-3'-phosphate
  modified_base 10: mod_base = OTHER; note = 2'-fluorouridine-3'-phosphate
  modified_base 11: mod_base = OTHER; note = 2'-fluoroguanosine-3'-phosphate
  modified_base 12: mod_base = OTHER; note = 2'-O-methyluridine-3'-phosphate
  modified_base 13: mod_base = OTHER; note = 2'-O-methyluridine-3'-phosphate
  modified_base 14: mod_base = OTHER; note = 2'-O-methylguanosine-3'-phosphate
  modified_base 15: mod_base = OTHER; note = 2'-O-methyladenosine-3'-phosphate
  modified_base 16: mod_base = OTHER; note = 2'-O-methylguanosine-3'-phosphate
  modified_base 17: mod_base = OTHER; note = 2'-O-methyluridine-3'-phosphate
  modified_base 18: mod_base = OTHER; note = 2'-O-methyluridine-3'-phosphate
  modified_base 19: mod_base = OTHER; note = 2'-O-methylcytidine-3'-phosphate
  modified_base 20: mod_base = OTHER; note = 2'-O-methylcytidine-3'-phosphate
  modified_base 21: mod_base = OTHER; note = 2'-O-methyluridine-3'-phosphate attached to N-[tris(N-acetylgalactosamine-alkyl)-amidodecanoyl)]-4-hydr oxyprolinol Hyp-(N-acetylgalactosamine-alkyl)3
cgggcatgatgttgagttcct

SEQ ID NO: 2005 - RNA, 23 nt, synthetic construct
  misc_feature 1..23: note = Description of Artificial Sequence: Synthetic oligonucleotide
  source 1..23: mol_type = other RNA
  modified_base 1: mod_base = OTHER; note = 2'-O-methyladenosine-3'- phosphorothioate
  modified_base 2: mod_base = OTHER; note = 2'-fluoroguanosine-3'-phosphorothioate
  modified_base 3: mod_base = OTHER; note = 2'-O-methylguanosine-3'-phosphate
  modified_base 4: mod_base = OTHER; note = 2'-O-methyladenosine-3'-phosphate
  modified_base 5: mod_base = OTHER; note = 2'-O-methyladenosine-3'-phosphate
  modified_base 6: mod_base = OTHER; note = 2'-fluorocytidine-3'-phosphate
  modified_base 7: mod_base = OTHER; note = 2'-O-methyluridine-3'-phosphate
  modified_base 8: mod_base = OTHER; note = 2'-fluorocytidine-3'-phosphate
  modified_base 9: mod_base = OTHER; note = 2'-fluoroadenosine-3'-phosphate
  modified_base 10: mod_base = OTHER; note = 2'-O-methyladenosine-3'-phosphate
  modified_base 11: mod_base = OTHER; note = 2'-O-methylcytidine-3'-phosphate
  modified_base 12: mod_base = OTHER; note = 2'-O-methyladenosine-3'-phosphate
  modified_base 13: mod_base = OTHER; note = 2'-O-methyluridine-3'-phosphate
  modified_base 14: mod_base = OTHER; note = 2'-fluorocytidine-3'-phosphate
  modified_base 15: mod_base = OTHER; note = 2'-O-methyladenosine-3'-phosphate
  modified_base 16: mod_base = OTHER; note = 2'-fluorouridine-3'-phosphate
  modified_base 17: mod_base = OTHER; note = 2'-O-methylguanosine-3'-phosphate
  modified_base 18: mod_base = OTHER; note = 2'-O-methylcytidine-3'-phosphate
  modified_base 19: mod_base = OTHER; note = 2'-O-methylcytidine-3'-phosphate
  modified_base 20: mod_base = OTHER; note = 2'-O-methylcytidine-3'-phosphate
  modified_base 21: mod_base = OTHER; note = 2'-O-methylguanosine-3'- phosphorothioate
  modified_base 22: mod_base = OTHER; note = 2'-O-methyluridine-3'-phosphorothioate
  modified_base 23: mod_base = OTHER; note = 2'-O-methyluridine-3'-phosphate
aggaactcaacatcatgcccgtt

SEQ ID NO: 2006 - RNA, 21 nt, synthetic construct
  misc_feature 1..21: note = Description of Artificial Sequence: Synthetic oligonucleotide
  source 1..21: mol_type = other RNA
  modified_base 1: mod_base = OTHER; note = 2'-O-methylguanosine-3'- phosphorothioate
  modified_base 2: mod_base = OTHER; note = 2'-O-methylguanosine-3'- phosphorothioate
  modified_base 3: mod_base = OTHER; note = 2'-O-methylguanosine-3'-phosphate
  modified_base 4: mod_base = OTHER; note = 2'-O-methyladenosine-3'-phosphate
  modified_base 5: mod_base = OTHER; note = 2'-O-methyladenosine-3'-phosphate
  modified_base 6: mod_base = OTHER; note = 2'-O-methylcytidine-3'-phosphate
  modified_base 7: mod_base = OTHER; note = 2'-fluoroguanosine-3'-phosphate
  modified_base 8: mod_base = OTHER; note = 2'-O-methylguanosine-3'-phosphate
  modified_base 9: mod_base = OTHER; note = 2'-fluoroguanosine-3'-phosphate
  modified_base 10: mod_base = OTHER; note = 2'-fluorocytidine-3'-phosphate
  modified_base 11: mod_base = OTHER; note = 2'-fluoroadenosine-3'-phosphate
  modified_base 12: mod_base = OTHER; note = 2'-O-methyluridine-3'-phosphate
  modified_base 13: mod_base = OTHER; note = 2'-O-methylguanosine-3'-phosphate
  modified_base 14: mod_base = OTHER; note = 2'-O-methyladenosine-3'-phosphate
  modified_base 15: mod_base = OTHER; note = 2'-O-methyluridine-3'-phosphate
  modified_base 16: mod_base = OTHER; note = 2'-O-methylguanosine-3'-phosphate
  modified_base 17: mod_base = OTHER; note = 2'-O-methyluridine-3'-phosphate
  modified_base 18: mod_base = OTHER; note = 2'-O-methyluridine-3'-phosphate
  modified_base 19: mod_base = OTHER; note = 2'-O-methylguanosine-3'-phosphate
  modified_base 20: mod_base = OTHER; note = 2'-O-methyladenosine-3'-phosphate
  modified_base 21: mod_base = OTHER; note = 2'-O-methylguanosine-3'-phosphate attached to N-[tris(N-acetylgalactosamine-alkyl)-amidodecanoyl)]-4-hydr oxyprolinol Hyp-(N-acetylgalactosamine-alkyl)3
gggaacgggcatgatgttgag

SEQ ID NO: 2007 - RNA, 23 nt, synthetic construct
  misc_feature 1..23: note = Description of Artificial Sequence: Synthetic oligonucleotide
  source 1..23: mol_type = other RNA
  modified_base 1: mod_base = OTHER; note = 2'-O-methylcytidine-3'- phosphorothioate
  modified_base 2: mod_base = OTHER; note = 2'-fluorouridine -3'-phosphorothioate
  modified_base 3: mod_base = OTHER; note = 2'-O-methylcytidine-3'-phosphate
  modified_base 4: mod_base = OTHER; note = 2'-O-methyladenosine-3'-phosphate
  modified_base 5: mod_base = OTHER; note = 2'-O-methyladenosine-3'-phosphate
  modified_base 6: mod_base = OTHER; note = 2'-fluorocytidine-3'-phosphate
  modified_base 7: mod_base = OTHER; note = 2'-O-methyladenosine-3'-phosphate
  modified_base 8: mod_base = OTHER; note = 2'-fluorouridine-3'-phosphate
  modified_base 9: mod_base = OTHER; note = 2'-fluorocytidine-3'-phosphate
  modified_base 10: mod_base = OTHER; note = 2'-O-methyladenosine-3'-phosphate
  modified_base 11: mod_base = OTHER; note = 2'-O-methyluridine-3'-phosphate
  modified_base 12: mod_base = OTHER; note = 2'-O-methylguanosine-3'-phosphate
  modified_base 13: mod_base = OTHER; note = 2'-O-methylcytidine-3'-phosphate
  modified_base 14: mod_base = OTHER; note = 2'-fluorocytidine-3'-phosphate
  modified_base 15: mod_base = OTHER; note = 2'-O-methylcytidine-3'-phosphate
  modified_base 16: mod_base = OTHER; note = 2'-fluoroguanosine-3'-phosphate
  modified_base 17: mod_base = OTHER; note = 2'-O-methyluridine-3'-phosphate
  modified_base 18: mod_base = OTHER; note = 2'-O-methyluridine-3'-phosphate
  modified_base 19: mod_base = OTHER; note = 2'-O-methylcytidine-3'-phosphate
  modified_base 20: mod_base = OTHER; note = 2'-O-methylcytidine-3'-phosphate
  modified_base 21: mod_base = OTHER; note = 2'-O-methylcytidine-3'- phosphorothioate
  modified_base 22: mod_base = OTHER; note = 2'-O-methyladenosine-3'- phosphorothioate
  modified_base 23: mod_base = OTHER; note = 2'-O-methylguanosine-3'-phosphate
ctcaacatcatgcccgttcccag

SEQ ID NO: 2008 - RNA, 21 nt, synthetic construct
  misc_feature 1..21: note = Description of Artificial Sequence: Synthetic oligonucleotide
  source 1..21: mol_type = other RNA
  modified_base 1: mod_base = OTHER; note = 2'-O-methyluridine-3'-phosphorothioate
  modified_base 2: mod_base = OTHER; note = 2'-O-methylguanosine-3'- phosphorothioate
  modified_base 3: mod_base = OTHER; note = 2'-O-methylguanosine-3'-phosphate
  modified_base 4: mod_base = OTHER; note = 2'-O-methylguanosine-3'-phosphate
  modified_base 5: mod_base = OTHER; note = 2'-O-methyladenosine-3'-phosphate
  modified_base 6: mod_base = OTHER; note = 2'-O-methyladenosine-3'-phosphate
  modified_base 7: mod_base = OTHER; note = 2'-fluorocytidine-3'-phosphate
  modified_base 8: mod_base = OTHER; note = 2'-O-methylguanosine-3'-phosphate
  modified_base 9: mod_base = OTHER; note = 2'-fluoroguanosine-3'-phosphate
  modified_base 10: mod_base = OTHER; note = 2'-fluoroguanosine-3'-phosphate
  modified_base 11: mod_base = OTHER; note = 2'-fluorocytidine-3'-phosphate
  modified_base 12: mod_base = OTHER; note = 2'-O-methyladenosine-3'-phosphate
  modified_base 13: mod_base = OTHER; note = 2'-O-methyluridine-3'-phosphate
  modified_base 14: mod_base = OTHER; note = 2'-O-methylguanosine-3'-phosphate
  modified_base 15: mod_base = OTHER; note = 2'-O-methyladenosine-3'-phosphate
  modified_base 16: mod_base = OTHER; note = 2'-O-methyluridine-3'-phosphate
  modified_base 17: mod_base = OTHER; note = 2'-O-methylguanosine-3'-phosphate
  modified_base 18: mod_base = OTHER; note = 2'-O-methyluridine-3'-phosphate
  modified_base 19: mod_base = OTHER; note = 2'-O-methyluridine-3'-phosphate
  modified_base 20: mod_base = OTHER; note = 2'-O-methylguanosine-3'-phosphate
  modified_base 21: mod_base = OTHER; note = 2'-O-methyladenosine-3'-phosphate attached to N-[tris(N-acetylgalactosamine-alkyl)-amidodecanoyl)]-4-hydr oxyprolinol Hyp-(N-acetylgalactosamine-alkyl)3
tgggaacgggcatgatgttga

SEQ ID NO: 2009 - RNA, 23 nt, synthetic construct
  misc_feature 1..23: note = Description of Artificial Sequence: Synthetic oligonucleotide
  source 1..23: mol_type = other RNA
  modified_base 1: mod_base = OTHER; note = 2'-O-methyluridine-3'-phosphorothioate
  modified_base 2: mod_base = OTHER; note = 2'-fluorocytidine-3'-phosphorothioate
  modified_base 3: mod_base = OTHER; note = 2'-O-methyladenosine-3'-phosphate
  modified_base 4: mod_base = OTHER; note = 2'-O-methyladenosine-3'-phosphate
  modified_base 5: mod_base = OTHER; note = 2'-O-methylcytidine-3'-phosphate
  modified_base 6: mod_base = OTHER; note = 2'-fluoroadenosine-3'-phosphate
  modified_base 7: mod_base = OTHER; note = 2'-O-methyluridine-3'-phosphate
  modified_base 8: mod_base = OTHER; note = 2'-fluorocytidine-3'-phosphate
  modified_base 9: mod_base = OTHER; note = 2'-fluoroadenosine-3'-phosphate
  modified_base 10: mod_base = OTHER; note = 2'-O-methyluridine-3'-phosphate
  modified_base 11: mod_base = OTHER; note = 2'-O-methylguanosine-3'-phosphate
  modified_base 12: mod_base = OTHER; note = 2'-O-methylcytidine-3'-phosphate
  modified_base 13: mod_base = OTHER; note = 2'-O-methylcytidine-3'-phosphate
  modified_base 14: mod_base = OTHER; note = 2'-fluorocytidine-3'-phosphate
  modified_base 15: mod_base = OTHER; note = 2'-O-methylguanosine-3'-phosphate
  modified_base 16: mod_base = OTHER; note = 2'-fluorouridine-3'-phosphate
  modified_base 17: mod_base = OTHER; note = 2'-O-methyluridine-3'-phosphate
  modified_base 18: mod_base = OTHER; note = 2'-O-methylcytidine-3'-phosphate
  modified_base 19: mod_base = OTHER; note = 2'-O-methylcytidine-3'-phosphate
  modified_base 20: mod_base = OTHER; note = 2'-O-methylcytidine-3'-phosphate
  modified_base 21: mod_base = OTHER; note = 2'-O-methyladenosine-3'- phosphorothioate
  modified_base 22: mod_base = OTHER; note = 2'-O-methylguanosine-3'- phosphorothioate
  modified_base 23: mod_base = OTHER; note = 2'-O-methylguanosine-3'-phosphate
tcaacatcatgcccgttcccagg

SEQ ID NO: 2010 - RNA, 21 nt, synthetic construct
  misc_feature 1..21: note = Description of Artificial Sequence: Synthetic oligonucleotide
  source 1..21: mol_type = other RNA
  modified_base 1: mod_base = OTHER; note = 2'-O-methyladenosine-3'- phosphorothioate
  modified_base 2: mod_base = OTHER; note = 2'-O-methylcytidine-3'- phosphorothioate
  modified_base 3: mod_base = OTHER; note = 2'-O-methyluridine-3'-phosphate
  modified_base 4: mod_base = OTHER; note = 2'-O-methyladenosine-3'-phosphate
  modified_base 5: mod_base = OTHER; note = 2'-O-methyladenosine-3'-phosphate
  modified_base 6: mod_base = OTHER; note = 2'-O-methylguanosine-3'-phosphate
  modified_base 7: mod_base = OTHER; note = 2'-fluoroguanosine-3'-phosphate
  modified_base 8: mod_base = OTHER; note = 2'-O-methyluridine-3'-phosphate
  modified_base 9: mod_base = OTHER; note = 2'-fluoroguanosine-3'-phosphate
  modified_base 10: mod_base = OTHER; note = 2'-fluoroadenosine-3'-phosphate
  modified_base 11: mod_base = OTHER; note = 2'-fluoroadenosine-3'-phosphate
  modified_base 12: mod_base = OTHER; note = 2'-O-methyladenosine-3'-phosphate
  modified_base 13: mod_base = OTHER; note = 2'-O-methyladenosine-3'-phosphate
  modified_base 14: mod_base = OTHER; note = 2'-O-methylguanosine-3'-phosphate
  modified_base 15: mod_base = OTHER; note = 2'-O-methyladenosine-3'-phosphate
  modified_base 16: mod_base = OTHER; note = 2'-O-methyluridine-3'-phosphate
  modified_base 17: mod_base = OTHER; note = 2'-O-methyladenosine-3'-phosphate
  modified_base 18: mod_base = OTHER; note = 2'-O-methyladenosine-3'-phosphate
  modified_base 19: mod_base = OTHER; note = 2'-O-methyluridine-3'-phosphate
  modified_base 20: mod_base = OTHER; note = 2'-O-methylguanosine-3'-phosphate
  modified_base 21: mod_base = OTHER; note = 2'-O-methyladenosine-3'-phosphate attached to N-[tris(N-acetylgalactosamine-alkyl)-amidodecanoyl)]-4-hydr oxyprolinol Hyp-(N-acetylgalactosamine-alkyl)3
actaaggtgaaaagataatga

SEQ ID NO: 2011 - RNA, 23 nt, synthetic construct
  misc_feature 1..23: note = Description of Artificial Sequence: Synthetic oligonucleotide
  source 1..23: mol_type = other RNA
  modified_base 1: mod_base = OTHER; note = 2'-O-methyluridine-3'-phosphorothioate
  modified_base 2: mod_base = OTHER; note = 2'-fluorocytidine-3'-phosphorothioate
  modified_base 3: mod_base = OTHER; note = 2'-O-methyladenosine-3'-phosphate
  modified_base 4: mod_base = OTHER; note = 2'-O-methyluridine-3'-phosphate
  modified_base 5: mod_base = OTHER; note = 2'-O-methyluridine-3'-phosphate
  modified_base 6: mod_base = OTHER; note = 2'-fluoroadenosine-3'-phosphate
  modified_base 7: mod_base = OTHER; note = 2'-O-methyluridine-3'-phosphate
  modified_base 8: mod_base = OTHER; note = 2'-fluorocytidine-3'-phosphate
  modified_base 9: mod_base = OTHER; note = 2'-fluorouridine-3'-phosphate
  modified_base 10: mod_base = OTHER; note = 2'-O-methyluridine-3'-phosphate
  modified_base 11: mod_base = OTHER; note = 2'-O-methyluridine-3'-phosphate
  modified_base 12: mod_base = OTHER; note = 2'-O-methyluridine-3'-phosphate
  modified_base 13: mod_base = OTHER; note = 2'-O-methylcytidine-3'-phosphate
  modified_base 14: mod_base = OTHER; note = 2'-fluoroadenosine-3'-phosphate
  modified_base 15: mod_base = OTHER; note = 2'-O-methylcytidine-3'-phosphate
  modified_base 16: mod_base = OTHER; note = 2'-fluorocytidine-3'-phosphate
  modified_base 17: mod_base = OTHER; note = 2'-O-methyluridine-3'-phosphate
  modified_base 18: mod_base = OTHER; note = 2'-O-methyluridine-3'-phosphate
  modified_base 19: mod_base = OTHER; note = 2'-O-methyladenosine-3'-phosphate
  modified_base 20: mod_base = OTHER; note = 2'-O-methylguanosine-3'-phosphate
  modified_base 21: mod_base = OTHER; note = 2'-O-methyluridine-3'-phosphorothioate
  modified_base 22: mod_base = OTHER; note = 2'-O-methylguanosine-3'- phosphorothioate
  modified_base 23: mod_base = OTHER; note = 2'-O-methyluridine-3'-phosphate
tcattatcttttcaccttagtgt

SEQ ID NO: 2012 - RNA, 21 nt, synthetic construct
  misc_feature 1..21: note = Description of Artificial Sequence: Synthetic oligonucleotide
  source 1..21: mol_type = other RNA
  modified_base 1: mod_base = OTHER; note = 2'-O-methylcytidine-3'- phosphorothioate
  modified_base 2: mod_base = OTHER; note = 2'-O-methyluridine-3'-phosphorothioate
  modified_base 3: mod_base = OTHER; note = 2'-O-methyladenosine-3'-phosphate
  modified_base 4: mod_base = OTHER; note = 2'-O-methyladenosine-3'-phosphate
  modified_base 5: mod_base = OTHER; note = 2'-O-methylguanosine-3'-phosphate
  modified_base 6: mod_base = OTHER; note = 2'-O-methylguanosine-3'-phosphate
  modified_base 7: mod_base = OTHER; note = 2'-fluorouridine-3'-phosphate
  modified_base 8: mod_base = OTHER; note = 2'-O-methylguanosine-3'-phosphate
  modified_base 9: mod_base = OTHER; note = 2'-fluoroadenosine-3'-phosphate
  modified_base 10: mod_base = OTHER; note = 2'-fluoroadenosine-3'-phosphate
  modified_base 11: mod_base = OTHER; note = 2'-fluoroadenosine-3'-phosphate
  modified_base 12: mod_base = OTHER; note = 2'-O-methyladenosine-3'-phosphate
  modified_base 13: mod_base = OTHER; note = 2'-O-methylguanosine-3'-phosphate
  modified_base 14: mod_base = OTHER; note = 2'-O-methyladenosine-3'-phosphate
  modified_base 15: mod_base = OTHER; note = 2'-O-methyluridine-3'-phosphate
  modified_base 16: mod_base = OTHER; note = 2'-O-methyladenosine-3'-phosphate
  modified_base 17: mod_base = OTHER; note = 2'-O-methyladenosine-3'-phosphate
  modified_base 18: mod_base = OTHER; note = 2'-O-methyluridine-3'-phosphate
  modified_base 19: mod_base = OTHER; note = 2'-O-methylguanosine-3'-phosphate
  modified_base 20: mod_base = OTHER; note = 2'-O-methyladenosine-3'-phosphate
  modified_base 21: mod_base = OTHER; note = 2'-O-methyluridine-3'-phosphate attached to N-[tris(N-acetylgalactosamine-alkyl)-amidodecanoyl)]-4-hydr oxyprolinol Hyp-(N-acetylgalactosamine-alkyl)3
ctaaggtgaaaagataatgat

SEQ ID NO: 2013 - RNA, 23 nt, synthetic construct
  misc_feature 1..23: note = Description of Artificial Sequence: Synthetic oligonucleotide
  source 1..23: mol_type = other RNA
  modified_base 1: mod_base = OTHER; note = 2'-O-methyladenosine-3'- phosphorothioate
  modified_base 2: mod_base = OTHER; note = 2'-fluorouridine -3'-phosphorothioate
  modified_base 3: mod_base = OTHER; note = 2'-O-methylcytidine-3'-phosphate
  modified_base 4: mod_base = OTHER; note = 2'-O-methyladenosine-3'-phosphate
  modified_base 5: mod_base = OTHER; note = 2'-O-methyluridine-3'-phosphate
  modified_base 6: mod_base = OTHER; note = 2'-fluorouridine-3'-phosphate
  modified_base 7: mod_base = OTHER; note = 2'-O-methyladenosine-3'-phosphate
  modified_base 8: mod_base = OTHER; note = 2'-fluorouridine-3'-phosphate
  modified_base 9: mod_base = OTHER; note = 2'-fluorocytidine-3'-phosphate
  modified_base 10: mod_base = OTHER; note = 2'-O-methyluridine-3'-phosphate
  modified_base 11: mod_base = OTHER; note = 2'-O-methyluridine-3'-phosphate
  modified_base 12: mod_base = OTHER; note = 2'-O-methyluridine-3'-phosphate
  modified_base 13: mod_base = OTHER; note = 2'-O-methyluridine-3'-phosphate
  modified_base 14: mod_base = OTHER; note = 2'-fluorocytidine-3'-phosphate
  modified_base 15: mod_base = OTHER; note = 2'-O-methyladenosine-3'-phosphate
  modified_base 16: mod_base = OTHER; note = 2'-fluorocytidine-3'-phosphate
  modified_base 17: mod_base = OTHER; note = 2'-O-methylcytidine-3'-phosphate
  modified_base 18: mod_base = OTHER; note = 2'-O-methyluridine-3'-phosphate
  modified_base 19: mod_base = OTHER; note = 2'-O-methyluridine-3'-phosphate
  modified_base 20: mod_base = OTHER; note = 2'-O-methyladenosine-3'-phosphate
  modified_base 21: mod_base = OTHER; note = 2'-O-methylguanosine-3'- phosphorothioate
  modified_base 22: mod_base = OTHER; note = 2'-O-methyluridine-3'-phosphorothioate
  modified_base 23: mod_base = OTHER; note = 2'-O-methylguanosine-3'-phosphate
atcattatcttttcaccttagtg

SEQ ID NO: 2014 - RNA, 21 nt, synthetic construct
  misc_feature 1..21: note = Description of Artificial Sequence: Synthetic oligonucleotide
  source 1..21: mol_type = other RNA
  modified_base 1: mod_base = OTHER; note = 2'-O-methyladenosine-3'- phosphorothioate
  modified_base 2: mod_base = OTHER; note = 2'-O-methyladenosine-3'- phosphorothioate
  modified_base 3: mod_base = OTHER; note = 2'-O-methyladenosine-3'-phosphate
  modified_base 4: mod_base = OTHER; note = 2'-O-methylcytidine-3'-phosphate
  modified_base 5: mod_base = OTHER; note = 2'-O-methyladenosine-3'-phosphate
  modified_base 6: mod_base = OTHER; note = 2'-O-methylcytidine-3'-phosphate
  modified_base 7: mod_base = OTHER; note = 2'-fluorouridine-3'-phosphate
  modified_base 8: mod_base = OTHER; note = 2'-O-methyladenosine-3'-phosphate
  modified_base 9: mod_base = OTHER; note = 2'-fluoroadenosine-3'-phosphate
  modified_base 10: mod_base = OTHER; note = 2'-fluoroguanosine-3'-phosphate
  modified_base 11: mod_base = OTHER; note = 2'-fluoroguanosine-3'-phosphate
  modified_base 12: mod_base = OTHER; note = 2'-O-methyluridine-3'-phosphate
  modified_base 13: mod_base = OTHER; note = 2'-O-methylguanosine-3'-phosphate
  modified_base 14: mod_base = OTHER; note = 2'-O-methyladenosine-3'-phosphate
  modified_base 15: mod_base = OTHER; note = 2'-O-methyladenosine-3'-phosphate
  modified_base 16: mod_base = OTHER; note = 2'-O-methyladenosine-3'-phosphate
  modified_base 17: mod_base = OTHER; note = 2'-O-methyladenosine-3'-phosphate
  modified_base 18: mod_base = OTHER; note = 2'-O-methylguanosine-3'-phosphate
  modified_base 19: mod_base = OTHER; note = 2'-O-methyladenosine-3'-phosphate
  modified_base 20: mod_base = OTHER; note = 2'-O-methyluridine-3'-phosphate
  modified_base 21: mod_base = OTHER; note = 2'-O-methyladenosine-3'-phosphate attached to N-[tris(N-acetylgalactosamine-alkyl)-amidodecanoyl)]-4-hydr oxyprolinol Hyp-(N-acetylgalactosamine-alkyl)3
aaacactaaggtgaaaagata

SEQ ID NO: 2015 - RNA, 23 nt, synthetic construct
  misc_feature 1..23: note = Description of Artificial Sequence: Synthetic oligonucleotide
  source 1..23: mol_type = other RNA
  modified_base 1: mod_base = OTHER; note = 2'-O-methyluridine-3'-phosphorothioate
  modified_base 2: mod_base = OTHER; note = 2'-fluoroadenosine-3'-phosphorothioate
  modified_base 3: mod_base = OTHER; note = 2'-O-methyluridine-3'-phosphate
  modified_base 4: mod_base = OTHER; note = 2'-O-methylcytidine-3'-phosphate
  modified_base 5: mod_base = OTHER; note = 2'-O-methyluridine-3'-phosphate
  modified_base 6: mod_base = OTHER; note = 2'-fluorouridine-3'-phosphate
  modified_base 7: mod_base = OTHER; note = 2'-O-methyluridine-3'-phosphate
  modified_base 8: mod_base = OTHER; note = 2'-fluorouridine-3'-phosphate
  modified_base 9: mod_base = OTHER; note = 2'-fluorocytidine-3'-phosphate
  modified_base 10: mod_base = OTHER; note = 2'-O-methyladenosine-3'-phosphate
  modified_base 11: mod_base = OTHER; note = 2'-O-methylcytidine-3'-phosphate
  modified_base 12: mod_base = OTHER; note = 2'-O-methylcytidine-3'-phosphate
  modified_base 13: mod_base = OTHER; note = 2'-O-methyluridine-3'-phosphate
  modified_base 14: mod_base = OTHER; note = 2'-fluorouridine-3'-phosphate
  modified_base 15: mod_base = OTHER; note = 2'-O-methyladenosine-3'-phosphate
  modified_base 16: mod_base = OTHER; note = 2'-fluoroguanosine-3'-phosphate
  modified_base 17: mod_base = OTHER; note = 2'-O-methyluridine-3'-phosphate
  modified_base 18: mod_base = OTHER; note = 2'-O-methylguanosine-3'-phosphate
  modified_base 19: mod_base = OTHER; note = 2'-O-methyluridine-3'-phosphate
  modified_base 20: mod_base = OTHER; note = 2'-O-methyluridine-3'-phosphate
  modified_base 21: mod_base = OTHER; note = 2'-O-methyluridine-3'-phosphorothioate
  modified_base 22: mod_base = OTHER; note = 2'-O-methylguanosine-3'- phosphorothioate
  modified_base 23: mod_base = OTHER; note = 2'-O-methylcytidine-3'-phosphate
tatcttttcaccttagtgtttgc

SEQ ID NO: 2016 - RNA, 21 nt, synthetic construct
  misc_feature 1..21: note = Description of Artificial Sequence: Synthetic oligonucleotide
  source 1..21: mol_type = other RNA
  modified_base 1: mod_base = OTHER; note = 2'-O-methylcytidine-3'- phosphorothioate
  modified_base 2: mod_base = OTHER; note = 2'-O-methyladenosine-3'- phosphorothioate
  modified_base 3: mod_base = OTHER; note = 2'-O-methyladenosine-3'-phosphate
  modified_base 4: mod_base = OTHER; note = 2'-O-methyladenosine-3'-phosphate
  modified_base 5: mod_base = OTHER; note = 2'-O-methylcytidine-3'-phosphate
  modified_base 6: mod_base = OTHER; note = 2'-O-methyladenosine-3'-phosphate
  modified_base 7: mod_base = OTHER; note = 2'-fluorocytidine-3'-phosphate
  modified_base 8: mod_base = OTHER; note = 2'-O-methyluridine-3'-phosphate
  modified_base 9: mod_base = OTHER; note = 2'-fluoroadenosine-3'-phosphate
  modified_base 10: mod_base = OTHER; note = 2'-fluoroadenosine-3'-phosphate
  modified_base 11: mod_base = OTHER; note = 2'-fluoroguanosine-3'-phosphate
  modified_base 12: mod_base = OTHER; note = 2'-O-methylguanosine-3'-phosphate
  modified_base 13: mod_base = OTHER; note = 2'-O-methyluridine-3'-phosphate
  modified_base 14: mod_base = OTHER; note = 2'-O-methylguanosine-3'-phosphate
  modified_base 15: mod_base = OTHER; note = 2'-O-methyladenosine-3'-phosphate
  modified_base 16: mod_base = OTHER; note = 2'-O-methyladenosine-3'-phosphate
  modified_base 17: mod_base = OTHER; note = 2'-O-methyladenosine-3'-phosphate
  modified_base 18: mod_base = OTHER; note = 2'-O-methyladenosine-3'-phosphate
  modified_base 19: mod_base = OTHER; note = 2'-O-methylguanosine-3'-phosphate
  modified_base 20: mod_base = OTHER; note = 2'-O-methyladenosine-3'-phosphate
  modified_base 21: mod_base = OTHER; note = 2'-O-methyluridine-3'-phosphate attached to N-[tris(N-acetylgalactosamine-alkyl)-amidodecanoyl)]-4-hydr oxyprolinol Hyp-(N-acetylgalactosamine-alkyl)3
caaacactaaggtgaaaagat

SEQ ID NO: 2017 - RNA, 23 nt, synthetic construct
  misc_feature 1..23: note = Description of Artificial Sequence: Synthetic oligonucleotide
  source 1..23: mol_type = other RNA
  modified_base 1: mod_base = OTHER; note = 2'-O-methyladenosine-3'- phosphorothioate
  modified_base 2: mod_base = OTHER; note = 2'-fluorouridine -3'-phosphorothioate
  modified_base 3: mod_base = OTHER; note = 2'-O-methylcytidine-3'-phosphate
  modified_base 4: mod_base = OTHER; note = 2'-O-methyluridine-3'-phosphate
  modified_base 5: mod_base = OTHER; note = 2'-O-methyluridine-3'-phosphate
  modified_base 6: mod_base = OTHER; note = 2'-fluorouridine-3'-phosphate
  modified_base 7: mod_base = OTHER; note = 2'-O-methyluridine-3'-phosphate
  modified_base 8: mod_base = OTHER; note = 2'-fluorocytidine-3'-phosphate
  modified_base 9: mod_base = OTHER; note = 2'-fluoroadenosine-3'-phosphate
  modified_base 10: mod_base = OTHER; note = 2'-O-methylcytidine-3'-phosphate
  modified_base 11: mod_base = OTHER; note = 2'-O-methylcytidine-3'-phosphate
  modified_base 12: mod_base = OTHER; note = 2'-O-methyluridine-3'-phosphate
  modified_base 13: mod_base = OTHER; note = 2'-O-methyluridine-3'-phosphate
  modified_base 14: mod_base = OTHER; note = 2'-fluoroadenosine-3'-phosphate
  modified_base 15: mod_base = OTHER; note = 2'-O-methylguanosine-3'-phosphate
  modified_base 16: mod_base = OTHER; note = 2'-fluorouridine-3'-phosphate
  modified_base 17: mod_base = OTHER; note = 2'-O-methylguanosine-3'-phosphate
  modified_base 18: mod_base = OTHER; note = 2'-O-methyluridine-3'-phosphate
  modified_base 19: mod_base = OTHER; note = 2'-O-methyluridine-3'-phosphate
  modified_base 20: mod_base = OTHER; note = 2'-O-methyluridine-3'-phosphate
  modified_base 21: mod_base = OTHER; note = 2'-O-methylguanosine-3'- phosphorothioate
  modified_base 22: mod_base = OTHER; note = 2'-O-methylcytidine-3'- phosphorothioate
  modified_base 23: mod_base = OTHER; note = 2'-O-methyluridine-3'-phosphate
atcttttcaccttagtgtttgct

SEQ ID NO: 2018 - RNA, 21 nt, synthetic construct
  misc_feature 1..21: note = Description of Artificial Sequence: Synthetic oligonucleotide
  source 1..21: mol_type = other RNA
  modified_base 1: mod_base = OTHER; note = 2'-O-methyladenosine-3'- phosphorothioate
  modified_base 2: mod_base = OTHER; note = 2'-O-methylguanosine-3'- phosphorothioate
  modified_base 3: mod_base = OTHER; note = 2'-O-methylguanosine-3'-phosphate
  modified_base 4: mod_base = OTHER; note = 2'-O-methyluridine-3'-phosphate
  modified_base 5: mod_base = OTHER; note = 2'-O-methyladenosine-3'-phosphate
  modified_base 6: mod_base = OTHER; note = 2'-O-methylguanosine-3'-phosphate
  modified_base 7: mod_base = OTHER; note = 2'-fluorocytidine-3'-phosphate
  modified_base 8: mod_base = OTHER; note = 2'-O-methyladenosine-3'-phosphate
  modified_base 9: mod_base = OTHER; note = 2'-fluorocytidine-3'-phosphate
  modified_base 10: mod_base = OTHER; note = 2'-fluorouridine-3'-phosphate
  modified_base 11: mod_base = OTHER; note = 2'-fluoroguanosine-3'-phosphate
  modified_base 12: mod_base = OTHER; note = 2'-O-methylguanosine-3'-phosphate
  modified_base 13: mod_base = OTHER; note = 2'-O-methyladenosine-3'-phosphate
  modified_base 14: mod_base = OTHER; note = 2'-O-methylguanosine-3'-phosphate
  modified_base 15: mod_base = OTHER; note = 2'-O-methyladenosine-3'-phosphate
  modified_base 16: mod_base = OTHER; note = 2'-O-methylguanosine-3'-phosphate
  modified_base 17: mod_base = OTHER; note = 2'-O-methyladenosine-3'-phosphate
  modified_base 18: mod_base = OTHER; note = 2'-O-methyladenosine-3'-phosphate
  modified_base 19: mod_base = OTHER; note = 2'-O-methyluridine-3'-phosphate
  modified_base 20: mod_base = OTHER; note = 2'-O-methyluridine-3'-phosphate
  modified_base 21: mod_base = OTHER; note = 2'-O-methylguanosine-3'-phosphate attached to N-[tris(N-acetylgalactosamine-alkyl)-amidodecanoyl)]-4-hydr oxyprolinol Hyp-(N-acetylgalactosamine-alkyl)3
aggtagcactggagagaattg

SEQ ID NO: 2019 - RNA, 23 nt, synthetic construct
  misc_feature 1..23: note = Description of Artificial Sequence: Synthetic oligonucleotide
  source 1..23: mol_type = other RNA
  modified_base 1: mod_base = OTHER; note = 2'-O-methylcytidine-3'- phosphorothioate
  modified_base 2: mod_base = OTHER; note = 2'-fluoroadenosine-3'-phosphorothioate
  modified_base 3: mod_base = OTHER; note = 2'-O-methyladenosine-3'-phosphate
  modified_base 4: mod_base = OTHER; note = 2'-O-methyluridine-3'-phosphate
  modified_base 5: mod_base = OTHER; note = 2'-O-methyluridine-3'-phosphate
  modified_base 6: mod_base = OTHER; note = 2'-fluorocytidine-3'-phosphate
  modified_base 7: mod_base = OTHER; note = 2'-O-methyluridine-3'-phosphate
  modified_base 8: mod_base = OTHER; note = 2'-fluorocytidine-3'-phosphate
  modified_base 9: mod_base = OTHER; note = 2'-fluorouridine-3'-phosphate
  modified_base 10: mod_base = OTHER; note = 2'-O-methylcytidine-3'-phosphate
  modified_base 11: mod_base = OTHER; note = 2'-O-methylcytidine-3'-phosphate
  modified_base 12: mod_base = OTHER; note = 2'-O-methyladenosine-3'-phosphate
  modified_base 13: mod_base = OTHER; note = 2'-O-methylguanosine-3'-phosphate
  modified_base 14: mod_base = OTHER; note = 2'-fluorouridine-3'-phosphate
  modified_base 15: mod_base = OTHER; note = 2'-O-methylguanosine-3'-phosphate
  modified_base 16: mod_base = OTHER; note = 2'-fluorocytidine-3'-phosphate
  modified_base 17: mod_base = OTHER; note = 2'-O-methyluridine-3'-phosphate
  modified_base 18: mod_base = OTHER; note = 2'-O-methyladenosine-3'-phosphate
  modified_base 19: mod_base = OTHER; note = 2'-O-methylcytidine-3'-phosphate
  modified_base 20: mod_base = OTHER; note = 2'-O-methylcytidine-3'-phosphate
  modified_base 21: mod_base = OTHER; note = 2'-O-methyluridine-3'-phosphorothioate
  modified_base 22: mod_base = OTHER; note = 2'-O-methyluridine-3'-phosphorothioate
  modified_base 23: mod_base = OTHER; note = 2'-O-methylcytidine-3'-phosphate
caattctctccagtgctaccttc

SEQ ID NO: 2020 - RNA, 21 nt, synthetic construct
  misc_feature 1..21: note = Description of Artificial Sequence: Synthetic oligonucleotide
  source 1..21: mol_type = other RNA
  modified_base 1: mod_base = OTHER; note = 2'-O-methylguanosine-3'- phosphorothioate
  modified_base 2: mod_base = OTHER; note = 2'-O-methylguanosine-3'- phosphorothioate
  modified_base 3: mod_base = OTHER; note = 2'-O-methyluridine-3'-phosphate
  modified_base 4: mod_base = OTHER; note = 2'-O-methyladenosine-3'-phosphate
  modified_base 5: mod_base = OTHER; note = 2'-O-methylguanosine-3'-phosphate
  modified_base 6: mod_base = OTHER; note = 2'-O-methylcytidine-3'-phosphate
  modified_base 7: mod_base = OTHER; note = 2'-fluoroadenosine-3'-phosphate
  modified_base 8: mod_base = OTHER; note = 2'-O-methylcytidine-3'-phosphate
  modified_base 9: mod_base = OTHER; note = 2'-fluorouridine-3'-phosphate
  modified_base 10: mod_base = OTHER; note = 2'-fluoroguanosine-3'-phosphate
  modified_base 11: mod_base = OTHER; note = 2'-fluoroguanosine-3'-phosphate
  modified_base 12: mod_base = OTHER; note = 2'-O-methyladenosine-3'-phosphate
  modified_base 13: mod_base = OTHER; note = 2'-O-methylguanosine-3'-phosphate
  modified_base 14: mod_base = OTHER; note = 2'-O-methyladenosine-3'-phosphate
  modified_base 15: mod_base = OTHER; note = 2'-O-methylguanosine-3'-phosphate
  modified_base 16: mod_base = OTHER; note = 2'-O-methyladenosine-3'-phosphate
  modified_base 17: mod_base = OTHER; note = 2'-O-methyladenosine-3'-phosphate
  modified_base 18: mod_base = OTHER; note = 2'-O-methyluridine-3'-phosphate
  modified_base 19: mod_base = OTHER; note = 2'-O-methyluridine-3'-phosphate
  modified_base 20: mod_base = OTHER; note = 2'-O-methylguanosine-3'-phosphate
  modified_base 21: mod_base = OTHER; note = 2'-O-methylguanosine-3'-phosphate attached to N-[tris(N-acetylgalactosamine-alkyl)-amidodecanoyl)]-4-hydr oxyprolinol Hyp-(N-acetylgalactosamine-alkyl)3
ggtagcactggagagaattgg

SEQ ID NO: 2021 - RNA, 23 nt, synthetic construct
  misc_feature 1..23: note = Description of Artificial Sequence: Synthetic oligonucleotide
  source 1..23: mol_type = other RNA
  modified_base 1: mod_base = OTHER; note = 2'-O-methylcytidine-3'- phosphorothioate
  modified_base 2: mod_base = OTHER; note = 2'-fluorocytidine-3'-phosphorothioate
  modified_base 3: mod_base = OTHER; note = 2'-O-methyladenosine-3'-phosphate
  modified_base 4: mod_base = OTHER; note = 2'-O-methyladenosine-3'-phosphate
  modified_base 5: mod_base = OTHER; note = 2'-O-methyluridine-3'-phosphate
  modified_base 6: mod_base = OTHER; note = 2'-fluorouridine-3'-phosphate
  modified_base 7: mod_base = OTHER; note = 2'-O-methylcytidine-3'-phosphate
  modified_base 8: mod_base = OTHER; note = 2'-fluorouridine-3'-phosphate
  modified_base 9: mod_base = OTHER; note = 2'-fluorocytidine-3'-phosphate
  modified_base 10: mod_base = OTHER; note = 2'-O-methyluridine-3'-phosphate
  modified_base 11: mod_base = OTHER; note = 2'-O-methylcytidine-3'-phosphate
  modified_base 12: mod_base = OTHER; note = 2'-O-methylcytidine-3'-phosphate
  modified_base 13: mod_base = OTHER; note = 2'-O-methyladenosine-3'-phosphate
  modified_base 14: mod_base = OTHER; note = 2'-fluoroguanosine-3'-phosphate
  modified_base 15: mod_base = OTHER; note = 2'-O-methyluridine-3'-phosphate
  modified_base 16: mod_base = OTHER; note = 2'-fluoroguanosine-3'-phosphate
  modified_base 17: mod_base = OTHER; note = 2'-O-methylcytidine-3'-phosphate
  modified_base 18: mod_base = OTHER; note = 2'-O-methyluridine-3'-phosphate
  modified_base 19: mod_base = OTHER; note = 2'-O-methyladenosine-3'-phosphate
  modified_base 20: mod_base = OTHER; note = 2'-O-methylcytidine-3'-phosphate
  modified_base 21: mod_base = OTHER; note = 2'-O-methylcytidine-3'- phosphorothioate
  modified_base 22: mod_base = OTHER; note = 2'-O-methyluridine-3'-phosphorothioate
  modified_base 23: mod_base = OTHER; note = 2'-O-methyluridine-3'-phosphate
ccaattctctccagtgctacctt

SEQ ID NO: 2022 - RNA, 21 nt, synthetic construct
  misc_feature 1..21: note = Description of Artificial Sequence: Synthetic oligonucleotide
  source 1..21: mol_type = other RNA
  modified_base 1: mod_base = OTHER; note = 2'-O-methylguanosine-3'- phosphorothioate
  modified_base 2: mod_base = OTHER; note = 2'-O-methyladenosine-3'- phosphorothioate
  modified_base 3: mod_base = OTHER; note = 2'-O-methylguanosine-3'-phosphate
  modified_base 4: mod_base = OTHER; note = 2'-O-methyladenosine-3'-phosphate
  modified_base 5: mod_base = OTHER; note = 2'-O-methyladenosine-3'-phosphate
  modified_base 6: mod_base = OTHER; note = 2'-O-methylguanosine-3'-phosphate
  modified_base 7: mod_base = OTHER; note = 2'-fluoroguanosine-3'-phosphate
  modified_base 8: mod_base = OTHER; note = 2'-O-methyluridine-3'-phosphate
  modified_base 9: mod_base = OTHER; note = 2'-fluoroadenosine-3'-phosphate
  modified_base 10: mod_base = OTHER; note = 2'-fluoroguanosine-3'-phosphate
  modified_base 11: mod_base = OTHER; note = 2'-fluorocytidine-3'-phosphate
  modified_base 12: mod_base = OTHER; note = 2'-O-methyladenosine-3'-phosphate
  modified_base 13: mod_base = OTHER; note = 2'-O-methylcytidine-3'-phosphate
  modified_base 14: mod_base = OTHER; note = 2'-O-methyluridine-3'-phosphate
  modified_base 15: mod_base = OTHER; note = 2'-O-methylguanosine-3'-phosphate
  modified_base 16: mod_base = OTHER; note = 2'-O-methylguanosine-3'-phosphate
  modified_base 17: mod_base = OTHER; note = 2'-O-methyladenosine-3'-phosphate
  modified_base 18: mod_base = OTHER; note = 2'-O-methylguanosine-3'-phosphate
  modified_base 19: mod_base = OTHER; note = 2'-O-methyladenosine-3'-phosphate
  modified_base 20: mod_base = OTHER; note = 2'-O-methylguanosine-3'-phosphate
  modified_base 21: mod_base = OTHER; note = 2'-O-methyladenosine-3'-phosphate attached to N-[tris(N-acetylgalactosamine-alkyl)-amidodecanoyl)]-4-hydr oxyprolinol Hyp-(N-acetylgalactosamine-alkyl)3
gagaaggtagcactggagaga

SEQ ID NO: 2023 - RNA, 23 nt, synthetic construct
  misc_feature 1..23: note = Description of Artificial Sequence: Synthetic oligonucleotide
  source 1..23: mol_type = other RNA
  modified_base 1: mod_base = OTHER; note = 2'-O-methyluridine-3'-phosphorothioate
  modified_base 2: mod_base = OTHER; note = 2'-fluorocytidine-3'-phosphorothioate
  modified_base 3: mod_base = OTHER; note = 2'-O-methyluridine-3'-phosphate
  modified_base 4: mod_base = OTHER; note = 2'-O-methylcytidine-3'-phosphate
  modified_base 5: mod_base = OTHER; note = 2'-O-methyluridine-3'-phosphate
  modified_base 6: mod_base = OTHER; note = 2'-fluorocytidine-3'-phosphate
  modified_base 7: mod_base = OTHER; note = 2'-O-methylcytidine-3'-phosphate
  modified_base 8: mod_base = OTHER; note = 2'-fluoroadenosine-3'-phosphate
  modified_base 9: mod_base = OTHER; note = 2'-fluoroguanosine-3'-phosphate
  modified_base 10: mod_base = OTHER; note = 2'-O-methyluridine-3'-phosphate
  modified_base 11: mod_base = OTHER; note = 2'-O-methylguanosine-3'-phosphate
  modified_base 12: mod_base = OTHER; note = 2'-O-methylcytidine-3'-phosphate
  modified_base 13: mod_base = OTHER; note = 2'-O-methyluridine-3'-phosphate
  modified_base 14: mod_base = OTHER; note = 2'-fluoroadenosine-3'-phosphate
  modified_base 15: mod_base = OTHER; note = 2'-O-methylcytidine-3'-phosphate
  modified_base 16: mod_base = OTHER; note = 2'-fluorocytidine-3'-phosphate
  modified_base 17: mod_base = OTHER; note = 2'-O-methyluridine-3'-phosphate
  modified_base 18: mod_base = OTHER; note = 2'-O-methyluridine-3'-phosphate
  modified_base 19: mod_base = OTHER; note = 2'-O-methylcytidine-3'-phosphate
  modified_base 20: mod_base = OTHER; note = 2'-O-methyluridine-3'-phosphate
  modified_base 21: mod_base = OTHER; note = 2'-O-methylcytidine-3'- phosphorothioate
  modified_base 22: mod_base = OTHER; note = 2'-O-methyladenosine-3'- phosphorothioate
  modified_base 23: mod_base = OTHER; note = 2'-O-methyladenosine-3'-phosphate
tctctccagtgctaccttctcaa

SEQ ID NO: 2024 - RNA, 21 nt, synthetic construct
  misc_feature 1..21: note = Description of Artificial Sequence: Synthetic oligonucleotide
  source 1..21: mol_type = other RNA
  modified_base 1: mod_base = OTHER; note = 2'-O-methyluridine-3'-phosphorothioate
  modified_base 2: mod_base = OTHER; note = 2'-O-methylguanosine-3'- phosphorothioate
  modified_base 3: mod_base = OTHER; note = 2'-O-methyladenosine-3'-phosphate
  modified_base 4: mod_base = OTHER; note = 2'-O-methylguanosine-3'-phosphate
  modified_base 5: mod_base = OTHER; note = 2'-O-methyladenosine-3'-phosphate
  modified_base 6: mod_base = OTHER; note = 2'-O-methyladenosine-3'-phosphate
  modified_base 7: mod_base = OTHER; note = 2'-fluoroguanosine-3'-phosphate
  modified_base 8: mod_base = OTHER; note = 2'-O-methylguanosine-3'-phosphate
  modified_base 9: mod_base = OTHER; note = 2'-fluorouridine-3'-phosphate
  modified_base 10: mod_base = OTHER; note = 2'-fluoroadenosine-3'-phosphate
  modified_base 11: mod_base = OTHER; note = 2'-fluoroguanosine-3'-phosphate
  modified_base 12: mod_base = OTHER; note = 2'-O-methylcytidine-3'-phosphate
  modified_base 13: mod_base = OTHER; note = 2'-O-methyladenosine-3'-phosphate
  modified_base 14: mod_base = OTHER; note = 2'-O-methylcytidine-3'-phosphate
  modified_base 15: mod_base = OTHER; note = 2'-O-methyluridine-3'-phosphate
  modified_base 16: mod_base = OTHER; note = 2'-O-methylguanosine-3'-phosphate
  modified_base 17: mod_base = OTHER; note = 2'-O-methylguanosine-3'-phosphate
  modified_base 18: mod_base = OTHER; note = 2'-O-methyladenosine-3'-phosphate
  modified_base 19: mod_base = OTHER; note = 2'-O-methylguanosine-3'-phosphate
  modified_base 20: mod_base = OTHER; note = 2'-O-methyladenosine-3'-phosphate
  modified_base 21: mod_base = OTHER; note = 2'-O-methylguanosine-3'-phosphate attached to N-[tris(N-acetylgalactosamine-alkyl)-amidodecanoyl)]-4-hydr oxyprolinol Hyp-(N-acetylgalactosamine-alkyl)3
tgagaaggtagcactggagag

SEQ ID NO: 2025 - RNA, 23 nt, synthetic construct
  misc_feature 1..23: note = Description of Artificial Sequence: Synthetic oligonucleotide
  source 1..23: mol_type = other RNA
  modified_base 1: mod_base = OTHER; note = 2'-O-methylcytidine-3'- phosphorothioate
  modified_base 2: mod_base = OTHER; note = 2'-fluorouridine -3'-phosphorothioate
  modified_base 3: mod_base = OTHER; note = 2'-O-methylcytidine-3'-phosphate
  modified_base 4: mod_base = OTHER; note = 2'-O-methyluridine-3'-phosphate
  modified_base 5: mod_base = OTHER; note = 2'-O-methylcytidine-3'-phosphate
  modified_base 6: mod_base = OTHER; note = 2'-fluorocytidine-3'-phosphate
  modified_base 7: mod_base = OTHER; note = 2'-O-methyladenosine-3'-phosphate
  modified_base 8: mod_base = OTHER; note = 2'-fluoroguanosine-3'-phosphate
  modified_base 9: mod_base = OTHER; note = 2'-fluorouridine-3'-phosphate
  modified_base 10: mod_base = OTHER; note = 2'-O-methylguanosine-3'-phosphate
  modified_base 11: mod_base = OTHER; note = 2'-O-methylcytidine-3'-phosphate
  modified_base 12: mod_base = OTHER; note = 2'-O-methyluridine-3'-phosphate
  modified_base 13: mod_base = OTHER; note = 2'-O-methyladenosine-3'-phosphate
  modified_base 14: mod_base = OTHER; note = 2'-fluorocytidine-3'-phosphate
  modified_base 15: mod_base = OTHER; note = 2'-O-methylcytidine-3'-phosphate
  modified_base 16: mod_base = OTHER; note = 2'-fluorouridine-3'-phosphate
  modified_base 17: mod_base = OTHER; note = 2'-O-methyluridine-3'-phosphate
  modified_base 18: mod_base = OTHER; note = 2'-O-methylcytidine-3'-phosphate
  modified_base 19: mod_base = OTHER; note = 2'-O-methyluridine-3'-phosphate
  modified_base 20: mod_base = OTHER; note = 2'-O-methylcytidine-3'-phosphate
  modified_base 21: mod_base = OTHER; note = 2'-O-methyladenosine-3'- phosphorothioate
  modified_base 22: mod_base = OTHER; note = 2'-O-methyladenosine-3'- phosphorothioate
  modified_base 23: mod_base = OTHER; note = 2'-O-methyladenosine-3'-phosphate
ctctccagtgctaccttctcaaa

SEQ ID NO: 2026 - RNA, 21 nt, synthetic construct
  misc_feature 1..21: note = Description of Artificial Sequence: Synthetic oligonucleotide
  source 1..21: mol_type = other RNA
  modified_base 1: mod_base = OTHER; note = 2'-O-methyladenosine-3'- phosphorothioate
  modified_base 2: mod_base = OTHER; note = 2'-O-methylguanosine-3'- phosphorothioate
  modified_base 3: mod_base = OTHER; note = 2'-O-methyluridine-3'-phosphate
  modified_base 4: mod_base = OTHER; note = 2'-O-methylguanosine-3'-phosphate
  modified_base 5: mod_base = OTHER; note = 2'-O-methylguanosine-3'-phosphate
  modified_base 6: mod_base = OTHER; note = 2'-O-methyladenosine-3'-phosphate
  modified_base 7: mod_base = OTHER; note = 2'-fluorocytidine-3'-phosphate
  modified_base 8: mod_base = OTHER; note = 2'-O-methyluridine-3'-phosphate
  modified_base 9: mod_base = OTHER; note = 2'-fluorouridine-3'-phosphate
  modified_base 10: mod_base = OTHER; note = 2'-fluoroguanosine-3'-phosphate
  modified_base 11: mod_base = OTHER; note = 2'-fluorocytidine-3'-phosphate
  modified_base 12: mod_base = OTHER; note = 2'-O-methyluridine-3'-phosphate
  modified_base 13: mod_base = OTHER; note = 2'-O-methylguanosine-3'-phosphate
  modified_base 14: mod_base = OTHER; note = 2'-O-methylcytidine-3'-phosphate
  modified_base 15: mod_base = OTHER; note = 2'-O-methyladenosine-3'-phosphate
  modified_base 16: mod_base = OTHER; note = 2'-O-methyluridine-3'-phosphate
  modified_base 17: mod_base = OTHER; note = 2'-O-methyladenosine-3'-phosphate
  modified_base 18: mod_base = OTHER; note = 2'-O-methyluridine-3'-phosphate
  modified_base 19: mod_base = OTHER; note = 2'-O-methylguanosine-3'-phosphate
  modified_base 20: mod_base = OTHER; note = 2'-O-methyluridine-3'-phosphate
  modified_base 21: mod_base = OTHER; note = 2'-O-methylguanosine-3'-phosphate attached to N-[tris(N-acetylgalactosamine-alkyl)-amidodecanoyl)]-4-hydr oxyprolinol Hyp-(N-acetylgalactosamine-alkyl)3
agtggacttgctgcatatgtg

SEQ ID NO: 2027 - RNA, 23 nt, synthetic construct
  misc_feature 1..23: note = Description of Artificial Sequence: Synthetic oligonucleotide
  source 1..23: mol_type = other RNA
  modified_base 1: mod_base = OTHER; note = 2'-O-methylcytidine-3'- phosphorothioate
  modified_base 2: mod_base = OTHER; note = 2'-fluoroadenosine-3'-phosphorothioate
  modified_base 3: mod_base = OTHER; note = 2'-O-methylcytidine-3'-phosphate
  modified_base 4: mod_base = OTHER; note = 2'-O-methyladenosine-3'-phosphate
  modified_base 5: mod_base = OTHER; note = 2'-O-methyluridine-3'-phosphate
  modified_base 6: mod_base = OTHER; note = 2'-fluoroadenosine-3'-phosphate
  modified_base 7: mod_base = OTHER; note = 2'-O-methyluridine-3'-phosphate
  modified_base 8: mod_base = OTHER; note = 2'-fluoroguanosine-3'-phosphate
  modified_base 9: mod_base = OTHER; note = 2'-fluorocytidine-3'-phosphate
  modified_base 10: mod_base = OTHER; note = 2'-O-methyladenosine-3'-phosphate
  modified_base 11: mod_base = OTHER; note = 2'-O-methylguanosine-3'-phosphate
  modified_base 12: mod_base = OTHER; note = 2'-O-methylcytidine-3'-phosphate
  modified_base 13: mod_base = OTHER; note = 2'-O-methyladenosine-3'-phosphate
  modified_base 14: mod_base = OTHER; note = 2'-fluoroadenosine-3'-phosphate
  modified_base 15: mod_base = OTHER; note = 2'-O-methylguanosine-3'-phosphate
  modified_base 16: mod_base = OTHER; note = 2'-fluorouridine-3'-phosphate
  modified_base 17: mod_base = OTHER; note = 2'-O-methylcytidine-3'-phosphate
  modified_base 18: mod_base = OTHER; note = 2'-O-methylcytidine-3'-phosphate
  modified_base 19: mod_base = OTHER; note = 2'-O-methyladenosine-3'-phosphate
  modified_base 20: mod_base = OTHER; note = 2'-O-methylcytidine-3'-phosphate
  modified_base 21: mod_base = OTHER; note = 2'-O-methyluridine-3'-phosphorothioate
  modified_base 22: mod_base = OTHER; note = 2'-O-methylguanosine-3'- phosphorothioate
  modified_base 23: mod_base = OTHER; note = 2'-O-methyluridine-3'-phosphate
cacatatgcagcaagtccactgt

SEQ ID NO: 2028 - RNA, 21 nt, synthetic construct
  misc_feature 1..21: note = Description of Artificial Sequence: Synthetic oligonucleotide
  source 1..21: mol_type = other RNA
  modified_base 1: mod_base = OTHER; note = 2'-O-methylguanosine-3'- phosphorothioate
  modified_base 2: mod_base = OTHER; note = 2'-O-methyluridine-3'-phosphorothioate
  modified_base 3: mod_base = OTHER; note = 2'-O-methylguanosine-3'-phosphate
  modified_base 4: mod_base = OTHER; note = 2'-O-methylguanosine-3'-phosphate
  modified_base 5: mod_base = OTHER; note = 2'-O-methyladenosine-3'-phosphate
  modified_base 6: mod_base = OTHER; note = 2'-O-methylcytidine-3'-phosphate
  modified_base 7: mod_base = OTHER; note = 2'-fluorouridine-3'-phosphate
  modified_base 8: mod_base = OTHER; note = 2'-O-methyluridine-3'-phosphate
  modified_base 9: mod_base = OTHER; note = 2'-fluoroguanosine-3'-phosphate
  modified_base 10: mod_base = OTHER; note = 2'-fluorocytidine-3'-phosphate
  modified_base 11: mod_base = OTHER; note = 2'-fluorouridine-3'-phosphate
  modified_base 12: mod_base = OTHER; note = 2'-O-methylguanosine-3'-phosphate
  modified_base 13: mod_base = OTHER; note = 2'-O-methylcytidine-3'-phosphate
  modified_base 14: mod_base = OTHER; note = 2'-O-methyladenosine-3'-phosphate
  modified_base 15: mod_base = OTHER; note = 2'-O-methyluridine-3'-phosphate
  modified_base 16: mod_base = OTHER; note = 2'-O-methyladenosine-3'-phosphate
  modified_base 17: mod_base = OTHER; note = 2'-O-methyluridine-3'-phosphate
  modified_base 18: mod_base = OTHER; note = 2'-O-methylguanosine-3'-phosphate
  modified_base 19: mod_base = OTHER; note = 2'-O-methyluridine-3'-phosphate
  modified_base 20: mod_base = OTHER; note = 2'-O-methylguanosine-3'-phosphate
  modified_base 21: mod_base = OTHER; note = 2'-O-methylguanosine-3'-phosphate attached to N-[tris(N-acetylgalactosamine-alkyl)-amidodecanoyl)]-4-hydr oxyprolinol Hyp-(N-acetylgalactosamine-alkyl)3
gtggacttgctgcatatgtgg

SEQ ID NO: 2029 - RNA, 23 nt, synthetic construct
  misc_feature 1..23: note = Description of Artificial Sequence: Synthetic oligonucleotide
  source 1..23: mol_type = other RNA
  modified_base 1: mod_base = OTHER; note = 2'-O-methylcytidine-3'- phosphorothioate
  modified_base 2: mod_base = OTHER; note = 2'-fluorocytidine-3'-phosphorothioate
  modified_base 3: mod_base = OTHER; note = 2'-O-methyladenosine-3'-phosphate
  modified_base 4: mod_base = OTHER; note = 2'-O-methylcytidine-3'-phosphate
  modified_base 5: mod_base = OTHER; note = 2'-O-methyladenosine-3'-phosphate
  modified_base 6: mod_base = OTHER; note = 2'-fluorouridine-3'-phosphate
  modified_base 7: mod_base = OTHER; note = 2'-O-methyladenosine-3'-phosphate
  modified_base 8: mod_base = OTHER; note = 2'-fluorouridine-3'-phosphate
  modified_base 9: mod_base = OTHER; note = 2'-fluoroguanosine-3'-phosphate
  modified_base 10: mod_base = OTHER; note = 2'-O-methylcytidine-3'-phosphate
  modified_base 11: mod_base = OTHER; note = 2'-O-methyladenosine-3'-phosphate
  modified_base 12: mod_base = OTHER; note = 2'-O-methylguanosine-3'-phosphate
  modified_base 13: mod_base = OTHER; note = 2'-O-methylcytidine-3'-phosphate
  modified_base 14: mod_base = OTHER; note = 2'-fluoroadenosine-3'-phosphate
  modified_base 15: mod_base = OTHER; note = 2'-O-methyladenosine-3'-phosphate
  modified_base 16: mod_base = OTHER; note = 2'-fluoroguanosine-3'-phosphate
  modified_base 17: mod_base = OTHER; note = 2'-O-methyluridine-3'-phosphate
  modified_base 18: mod_base = OTHER; note = 2'-O-methylcytidine-3'-phosphate
  modified_base 19: mod_base = OTHER; note = 2'-O-methylcytidine-3'-phosphate
  modified_base 20: mod_base = OTHER; note = 2'-O-methyladenosine-3'-phosphate
  modified_base 21: mod_base = OTHER; note = 2'-O-methylcytidine-3'- phosphorothioate
  modified_base 22: mod_base = OTHER; note = 2'-O-methyluridine-3'-phosphorothioate
  modified_base 23: mod_base = OTHER; note = 2'-O-methylguanosine-3'-phosphate
ccacatatgcagcaagtccactg

SEQ ID NO: 2030 - RNA, 21 nt, synthetic construct
  misc_feature 1..21: note = Description of Artificial Sequence: Synthetic oligonucleotide
  source 1..21: mol_type = other RNA
  modified_base 1: mod_base = OTHER; note = 2'-O-methylcytidine-3'- phosphorothioate
  modified_base 2: mod_base = OTHER; note = 2'-O-methylguanosine-3'- phosphorothioate
  modified_base 3: mod_base = OTHER; note = 2'-O-methyladenosine-3'-phosphate
  modified_base 4: mod_base = OTHER; note = 2'-O-methylcytidine-3'-phosphate
  modified_base 5: mod_base = OTHER; note = 2'-O-methyladenosine-3'-phosphate
  modified_base 6: mod_base = OTHER; note = 2'-O-methylguanosine-3'-phosphate
  modified_base 7: mod_base = OTHER; note = 2'-fluorouridine-3'-phosphate
  modified_base 8: mod_base = OTHER; note = 2'-O-methylguanosine-3'-phosphate
  modified_base 9: mod_base = OTHER; note = 2'-fluoroguanosine-3'-phosphate
  modified_base 10: mod_base = OTHER; note = 2'-fluoroadenosine-3'-phosphate
  modified_base 11: mod_base = OTHER; note = 2'-fluorocytidine-3'-phosphate
  modified_base 12: mod_base = OTHER; note = 2'-O-methyluridine-3'-phosphate
  modified_base 13: mod_base = OTHER; note = 2'-O-methyluridine-3'-phosphate
  modified_base 14: mod_base = OTHER; note = 2'-O-methylguanosine-3'-phosphate
  modified_base 15: mod_base = OTHER; note = 2'-O-methylcytidine-3'-phosphate
  modified_base 16: mod_base = OTHER; note = 2'-O-methyluridine-3'-phosphate
  modified_base 17: mod_base = OTHER; note = 2'-O-methylguanosine-3'-phosphate
  modified_base 18: mod_base = OTHER; note = 2'-O-methylcytidine-3'-phosphate
  modified_base 19: mod_base = OTHER; note = 2'-O-methyladenosine-3'-phosphate
  modified_base 20: mod_base = OTHER; note = 2'-O-methyluridine-3'-phosphate
  modified_base 21: mod_base = OTHER; note = 2'-O-methyladenosine-3'-phosphate attached to N-[tris(N-acetylgalactosamine-alkyl)-amidodecanoyl)]-4-hydr oxyprolinol Hyp-(N-acetylgalactosamine-alkyl)3
cgacagtggacttgctgcata

SEQ ID NO: 2031 - RNA, 23 nt, synthetic construct
  misc_feature 1..23: note = Description of Artificial Sequence: Synthetic oligonucleotide
  source 1..23: mol_type = other RNA
  modified_base 1: mod_base = OTHER; note = 2'-O-methyluridine-3'-phosphorothioate
  modified_base 2: mod_base = OTHER; note = 2'-fluoroadenosine-3'-phosphorothioate
  modified_base 3: mod_base = OTHER; note = 2'-O-methyluridine-3'-phosphate
  modified_base 4: mod_base = OTHER; note = 2'-O-methylguanosine-3'-phosphate
  modified_base 5: mod_base = OTHER; note = 2'-O-methylcytidine-3'-phosphate
  modified_base 6: mod_base = OTHER; note = 2'-fluoroadenosine-3'-phosphate
  modified_base 7: mod_base = OTHER; note = 2'-O-methylguanosine-3'-phosphate
  modified_base 8: mod_base = OTHER; note = 2'-fluorocytidine-3'-phosphate
  modified_base 9: mod_base = OTHER; note = 2'-fluoroadenosine-3'-phosphate
  modified_base 10: mod_base = OTHER; note = 2'-O-methyladenosine-3'-phosphate
  modified_base 11: mod_base = OTHER; note = 2'-O-methylguanosine-3'-phosphate
  modified_base 12: mod_base = OTHER; note = 2'-O-methyluridine-3'-phosphate
  modified_base 13: mod_base = OTHER; note = 2'-O-methylcytidine-3'-phosphate
  modified_base 14: mod_base = OTHER; note = 2'-fluorocytidine-3'-phosphate
  modified_base 15: mod_base = OTHER; note = 2'-O-methyladenosine-3'-phosphate
  modified_base 16: mod_base = OTHER; note = 2'-fluorocytidine-3'-phosphate
  modified_base 17: mod_base = OTHER; note = 2'-O-methyluridine-3'-phosphate
  modified_base 18: mod_base = OTHER; note = 2'-O-methylguanosine-3'-phosphate
  modified_base 19: mod_base = OTHER; note = 2'-O-methyluridine-3'-phosphate
  modified_base 20: mod_base = OTHER; note = 2'-O-methylcytidine-3'-phosphate
  modified_base 21: mod_base = OTHER; note = 2'-O-methylguanosine-3'- phosphorothioate
  modified_base 22: mod_base = OTHER; note = 2'-O-methyluridine-3'-phosphorothioate
  modified_base 23: mod_base = OTHER; note = 2'-O-methylcytidine-3'-phosphate
tatgcagcaagtccactgtcgtc

SEQ ID NO: 2032 - RNA, 21 nt, synthetic construct
  misc_feature 1..21: note = Description of Artificial Sequence: Synthetic oligonucleotide
  source 1..21: mol_type = other RNA
  modified_base 1: mod_base = OTHER; note = 2'-O-methyladenosine-3'- phosphorothioate
  modified_base 2: mod_base = OTHER; note = 2'-O-methylcytidine-3'- phosphorothioate
  modified_base 3: mod_base = OTHER; note = 2'-O-methylguanosine-3'-phosphate
  modified_base 4: mod_base = OTHER; note = 2'-O-methyladenosine-3'-phosphate
  modified_base 5: mod_base = OTHER; note = 2'-O-methylcytidine-3'-phosphate
  modified_base 6: mod_base = OTHER; note = 2'-O-methyladenosine-3'-phosphate
  modified_base 7: mod_base = OTHER; note = 2'-fluoroguanosine-3'-phosphate
  modified_base 8: mod_base = OTHER; note = 2'-O-methyluridine-3'-phosphate
  modified_base 9: mod_base = OTHER; note = 2'-fluoroguanosine-3'-phosphate
  modified_base 10: mod_base = OTHER; note = 2'-fluoroguanosine-3'-phosphate
  modified_base 11: mod_base = OTHER; note = 2'-fluoroadenosine-3'-phosphate
  modified_base 12: mod_base = OTHER; note = 2'-O-methylcytidine-3'-phosphate
  modified_base 13: mod_base = OTHER; note = 2'-O-methyluridine-3'-phosphate
  modified_base 14: mod_base = OTHER; note = 2'-O-methyluridine-3'-phosphate
  modified_base 15: mod_base = OTHER; note = 2'-O-methylguanosine-3'-phosphate
  modified_base 16: mod_base = OTHER; note = 2'-O-methylcytidine-3'-phosphate
  modified_base 17: mod_base = OTHER; note = 2'-O-methyluridine-3'-phosphate
  modified_base 18: mod_base = OTHER; note = 2'-O-methylguanosine-3'-phosphate
  modified_base 19: mod_base = OTHER; note = 2'-O-methylcytidine-3'-phosphate
  modified_base 20: mod_base = OTHER; note = 2'-O-methyladenosine-3'-phosphate
  modified_base 21: mod_base = OTHER; note = 2'-O-methyluridine-3'-phosphate attached to N-[tris(N-acetylgalactosamine-alkyl)-amidodecanoyl)]-4-hydr oxyprolinol Hyp-(N-acetylgalactosamine-alkyl)3
acgacagtggacttgctgcat

SEQ ID NO: 2033 - RNA, 23 nt, synthetic construct
  misc_feature 1..23: note = Description of Artificial Sequence: Synthetic oligonucleotide
  source 1..23: mol_type = other RNA
  modified_base 1: mod_base = OTHER; note = 2'-O-methyladenosine-3'- phosphorothioate
  modified_base 2: mod_base = OTHER; note = 2'-fluorouridine -3'-phosphorothioate
  modified_base 3: mod_base = OTHER; note = 2'-O-methylguanosine-3'-phosphate
  modified_base 4: mod_base = OTHER; note = 2'-O-methylcytidine-3'-phosphate
  modified_base 5: mod_base = OTHER; note = 2'-O-methyladenosine-3'-phosphate
  modified_base 6: mod_base = OTHER; note = 2'-fluoroguanosine-3'-phosphate
  modified_base 7: mod_base = OTHER; note = 2'-O-methylcytidine-3'-phosphate
  modified_base 8: mod_base = OTHER; note = 2'-fluoroadenosine-3'-phosphate
  modified_base 9: mod_base = OTHER; note = 2'-fluoroadenosine-3'-phosphate
  modified_base 10: mod_base = OTHER; note = 2'-O-methylguanosine-3'-phosphate
  modified_base 11: mod_base = OTHER; note = 2'-O-methyluridine-3'-phosphate
  modified_base 12: mod_base = OTHER; note = 2'-O-methylcytidine-3'-phosphate
  modified_base 13: mod_base = OTHER; note = 2'-O-methylcytidine-3'-phosphate
  modified_base 14: mod_base = OTHER; note = 2'-fluoroadenosine-3'-phosphate
  modified_base 15: mod_base = OTHER; note = 2'-O-methylcytidine-3'-phosphate
  modified_base 16: mod_base = OTHER; note = 2'-fluorouridine-3'-phosphate
  modified_base 17: mod_base = OTHER; note = 2'-O-methylguanosine-3'-phosphate
  modified_base 18: mod_base = OTHER; note = 2'-O-methyluridine-3'-phosphate
  modified_base 19: mod_base = OTHER; note = 2'-O-methylcytidine-3'-phosphate
  modified_base 20: mod_base = OTHER; note = 2'-O-methylguanosine-3'-phosphate
  modified_base 21: mod_base = OTHER; note = 2'-O-methyluridine-3'-phosphorothioate
  modified_base 22: mod_base = OTHER; note = 2'-O-methylcytidine-3'- phosphorothioate
  modified_base 23: mod_base = OTHER; note = 2'-O-methyluridine-3'-phosphate
atgcagcaagtccactgtcgtct

SEQ ID NO: 2034 - RNA, 21 nt, synthetic construct
  misc_feature 1..21: note = Description of Artificial Sequence: Synthetic oligonucleotide
  source 1..21: mol_type = other RNA
  modified_base 1: mod_base = OTHER; note = 2'-O-methyladenosine-3'- phosphorothioate
  modified_base 2: mod_base = OTHER; note = 2'-O-methyladenosine-3'- phosphorothioate
  modified_base 3: mod_base = OTHER; note = 2'-O-methylguanosine-3'-phosphate
  modified_base 4: mod_base = OTHER; note = 2'-O-methylguanosine-3'-phosphate
  modified_base 5: mod_base = OTHER; note = 2'-O-methyluridine-3'-phosphate
  modified_base 6: mod_base = OTHER; note = 2'-O-methylguanosine-3'-phosphate
  modified_base 7: mod_base = OTHER; note = 2'-fluorouridine-3'-phosphate
  modified_base 8: mod_base = OTHER; note = 2'-O-methyluridine-3'-phosphate
  modified_base 9: mod_base = OTHER; note = 2'-fluorocytidine-3'-phosphate
  modified_base 10: mod_base = OTHER; note = 2'-fluoroadenosine-3'-phosphate
  modified_base 11: mod_base = OTHER; note = 2'-fluoroadenosine-3'-phosphate
  modified_base 12: mod_base = OTHER; note = 2'-O-methylguanosine-3'-phosphate
  modified_base 13: mod_base = OTHER; note = 2'-O-methyladenosine-3'-phosphate
  modified_base 14: mod_base = OTHER; note = 2'-O-methyluridine-3'-phosphate
  modified_base 15: mod_base = OTHER; note = 2'-O-methylguanosine-3'-phosphate
  modified_base 16: mod_base = OTHER; note = 2'-O-methyluridine-3'-phosphate
  modified_base 17: mod_base = OTHER; note = 2'-O-methylcytidine-3'-phosphate
  modified_base 18: mod_base = OTHER; note = 2'-O-methylcytidine-3'-phosphate
  modified_base 19: mod_base = OTHER; note = 2'-O-methyluridine-3'-phosphate
  modified_base 20: mod_base = OTHER; note = 2'-O-methylcytidine-3'-phosphate
  modified_base 21: mod_base = OTHER; note = 2'-O-methylguanosine-3'-phosphate attached to N-[tris(N-acetylgalactosamine-alkyl)-amidodecanoyl)]-4-hydr oxyprolinol Hyp-(N-acetylgalactosamine-alkyl)3
aaggtgttcaagatgtcctcg

SEQ ID NO: 2035 - RNA, 23 nt, synthetic construct
  misc_feature 1..23: note = Description of Artificial Sequence: Synthetic oligonucleotide
  source 1..23: mol_type = other RNA
  modified_base 1: mod_base = OTHER; note = 2'-O-methylcytidine-3'- phosphorothioate
  modified_base 2: mod_base = OTHER; note = 2'-fluoroguanosine-3'-phosphorothioate
  modified_base 3: mod_base = OTHER; note = 2'-O-methyladenosine-3'-phosphate
  modified_base 4: mod_base = OTHER; note = 2'-O-methylguanosine-3'-phosphate
  modified_base 5: mod_base = OTHER; note = 2'-O-methylguanosine-3'-phosphate
  modified_base 6: mod_base = OTHER; note = 2'-fluoroadenosine-3'-phosphate
  modified_base 7: mod_base = OTHER; note = 2'-O-methylcytidine-3'-phosphate
  modified_base 8: mod_base = OTHER; note = 2'-fluoroadenosine-3'-phosphate
  modified_base 9: mod_base = OTHER; note = 2'-fluorouridine-3'-phosphate
  modified_base 10: mod_base = OTHER; note = 2'-O-methylcytidine-3'-phosphate
  modified_base 11: mod_base = OTHER; note = 2'-O-methyluridine-3'-phosphate
  modified_base 12: mod_base = OTHER; note = 2'-O-methyluridine-3'-phosphate
  modified_base 13: mod_base = OTHER; note = 2'-O-methylguanosine-3'-phosphate
  modified_base 14: mod_base = OTHER; note = 2'-fluoroadenosine-3'-phosphate
  modified_base 15: mod_base = OTHER; note = 2'-O-methyladenosine-3'-phosphate
  modified_base 16: mod_base = OTHER; note = 2'-fluorocytidine-3'-phosphate
  modified_base 17: mod_base = OTHER; note = 2'-O-methyladenosine-3'-phosphate
  modified_base 18: mod_base = OTHER; note = 2'-O-methylcytidine-3'-phosphate
  modified_base 19: mod_base = OTHER; note = 2'-O-methylcytidine-3'-phosphate
  modified_base 20: mod_base = OTHER; note = 2'-O-methyluridine-3'-phosphate
  modified_base 21: mod_base = OTHER; note = 2'-O-methyluridine-3'-phosphorothioate
  modified_base 22: mod_base = OTHER; note = 2'-O-methyluridine-3'-phosphorothioate
  modified_base 23: mod_base = OTHER; note = 2'-O-methylcytidine-3'-phosphate
cgaggacatcttgaacacctttc

SEQ ID NO: 2036 - RNA, 21 nt, synthetic construct
  misc_feature 1..21: note = Description of Artificial Sequence: Synthetic oligonucleotide
  source 1..21: mol_type = other RNA
  modified_base 1: mod_base = OTHER; note = 2'-O-methyladenosine-3'- phosphorothioate
  modified_base 2: mod_base = OTHER; note = 2'-O-methylguanosine-3'- phosphorothioate
  modified_base 3: mod_base = OTHER; note = 2'-O-methylguanosine-3'-phosphate
  modified_base 4: mod_base = OTHER; note = 2'-O-methyluridine-3'-phosphate
  modified_base 5: mod_base = OTHER; note = 2'-O-methylguanosine-3'-phosphate
  modified_base 6: mod_base = OTHER; note = 2'-O-methyluridine-3'-phosphate
  modified_base 7: mod_base = OTHER; note = 2'-fluorouridine-3'-phosphate
  modified_base 8: mod_base = OTHER; note = 2'-O-methylcytidine-3'-phosphate
  modified_base 9: mod_base = OTHER; note = 2'-fluoroadenosine-3'-phosphate
  modified_base 10: mod_base = OTHER; note = 2'-fluoroadenosine-3'-phosphate
  modified_base 11: mod_base = OTHER; note = 2'-fluoroguanosine-3'-phosphate
  modified_base 12: mod_base = OTHER; note = 2'-O-methyladenosine-3'-phosphate
  modified_base 13: mod_base = OTHER; note = 2'-O-methyluridine-3'-phosphate
  modified_base 14: mod_base = OTHER; note = 2'-O-methylguanosine-3'-phosphate
  modified_base 15: mod_base = OTHER; note = 2'-O-methyluridine-3'-phosphate
  modified_base 16: mod_base = OTHER; note = 2'-O-methylcytidine-3'-phosphate
  modified_base 17: mod_base = OTHER; note = 2'-O-methylcytidine-3'-phosphate
  modified_base 18: mod_base = OTHER; note = 2'-O-methyluridine-3'-phosphate
  modified_base 19: mod_base = OTHER; note = 2'-O-methylcytidine-3'-phosphate
  modified_base 20: mod_base = OTHER; note = 2'-O-methylguanosine-3'-phosphate
  modified_base 21: mod_base = OTHER; note = 2'-O-methyladenosine-3'-phosphate attached to N-[tris(N-acetylgalactosamine-alkyl)-amidodecanoyl)]-4-hydr oxyprolinol Hyp-(N-acetylgalactosamine-alkyl)3
aggtgttcaagatgtcctcga

SEQ ID NO: 2037 - RNA, 23 nt, synthetic construct
  misc_feature 1..23: note = Description of Artificial Sequence: Synthetic oligonucleotide
  source 1..23: mol_type = other RNA
  modified_base 1: mod_base = OTHER; note = 2'-O-methyluridine-3'-phosphorothioate
  modified_base 2: mod_base = OTHER; note = 2'-fluorocytidine-3'-phosphorothioate
  modified_base 3: mod_base = OTHER; note = 2'-O-methylguanosine-3'-phosphate
  modified_base 4: mod_base = OTHER; note = 2'-O-methyladenosine-3'-phosphate
  modified_base 5: mod_base = OTHER; note = 2'-O-methylguanosine-3'-phosphate
  modified_base 6: mod_base = OTHER; note = 2'-fluoroguanosine-3'-phosphate
  modified_base 7: mod_base = OTHER; note = 2'-O-methyladenosine-3'-phosphate
  modified_base 8: mod_base = OTHER; note = 2'-fluorocytidine-3'-phosphate
  modified_base 9: mod_base = OTHER; note = 2'-fluoroadenosine-3'-phosphate
  modified_base 10: mod_base = OTHER; note = 2'-O-methyluridine-3'-phosphate
  modified_base 11: mod_base = OTHER; note = 2'-O-methylcytidine-3'-phosphate
  modified_base 12: mod_base = OTHER; note = 2'-O-methyluridine-3'-phosphate
  modified_base 13: mod_base = OTHER; note = 2'-O-methyluridine-3'-phosphate
  modified_base 14: mod_base = OTHER; note = 2'-fluoroguanosine-3'-phosphate
  modified_base 15: mod_base = OTHER; note = 2'-O-methyladenosine-3'-phosphate
  modified_base 16: mod_base = OTHER; note = 2'-fluoroadenosine-3'-phosphate
  modified_base 17: mod_base = OTHER; note = 2'-O-methylcytidine-3'-phosphate
  modified_base 18: mod_base = OTHER; note = 2'-O-methyladenosine-3'-phosphate
  modified_base 19: mod_base = OTHER; note = 2'-O-methylcytidine-3'-phosphate
  modified_base 20: mod_base = OTHER; note = 2'-O-methylcytidine-3'-phosphate
  modified_base 21: mod_base = OTHER; note = 2'-O-methyluridine-3'-phosphorothioate
  modified_base 22: mod_base = OTHER; note = 2'-O-methyluridine-3'-phosphorothioate
  modified_base 23: mod_base = OTHER; note = 2'-O-methyluridine-3'-phosphate
tcgaggacatcttgaacaccttt

SEQ ID NO: 2038 - RNA, 21 nt, synthetic construct
  misc_feature 1..21: note = Description of Artificial Sequence: Synthetic oligonucleotide
  source 1..21: mol_type = other RNA
  modified_base 1: mod_base = OTHER; note = 2'-O-methylguanosine-3'- phosphorothioate
  modified_base 2: mod_base = OTHER; note = 2'-O-methyladenosine-3'- phosphorothioate
  modified_base 3: mod_base = OTHER; note = 2'-O-methylguanosine-3'-phosphate
  modified_base 4: mod_base = OTHER; note = 2'-O-methyladenosine-3'-phosphate
  modified_base 5: mod_base = OTHER; note = 2'-O-methyladenosine-3'-phosphate
  modified_base 6: mod_base = OTHER; note = 2'-O-methyladenosine-3'-phosphate
  modified_base 7: mod_base = OTHER; note = 2'-fluoroguanosine-3'-phosphate
  modified_base 8: mod_base = OTHER; note = 2'-O-methylguanosine-3'-phosphate
  modified_base 9: mod_base = OTHER; note = 2'-fluorouridine-3'-phosphate
  modified_base 10: mod_base = OTHER; note = 2'-fluoroguanosine-3'-phosphate
  modified_base 11: mod_base = OTHER; note = 2'-fluorouridine-3'-phosphate
  modified_base 12: mod_base = OTHER; note = 2'-O-methyluridine-3'-phosphate
  modified_base 13: mod_base = OTHER; note = 2'-O-methylcytidine-3'-phosphate
  modified_base 14: mod_base = OTHER; note = 2'-O-methyladenosine-3'-phosphate
  modified_base 15: mod_base = OTHER; note = 2'-O-methyladenosine-3'-phosphate
  modified_base 16: mod_base = OTHER; note = 2'-O-methylguanosine-3'-phosphate
  modified_base 17: mod_base = OTHER; note = 2'-O-methyladenosine-3'-phosphate
  modified_base 18: mod_base = OTHER; note = 2'-O-methyluridine-3'-phosphate
  modified_base 19: mod_base = OTHER; note = 2'-O-methylguanosine-3'-phosphate
  modified_base 20: mod_base = OTHER; note = 2'-O-methyluridine-3'-phosphate
  modified_base 21: mod_base = OTHER; note = 2'-O-methylcytidine-3'-phosphate attached to N-[tris(N-acetylgalactosamine-alkyl)-amidodecanoyl)]-4-hydr oxyprolinol Hyp-(N-acetylgalactosamine-alkyl)3
gagaaaggtgttcaagatgtc

SEQ ID NO: 2039 - RNA, 23 nt, synthetic construct
  misc_feature 1..23: note = Description of Artificial Sequence: Synthetic oligonucleotide
  source 1..23: mol_type = other RNA
  modified_base 1: mod_base = OTHER; note = 2'-O-methylguanosine-3'- phosphorothioate
  modified_base 2: mod_base = OTHER; note = 2'-fluoroadenosine-3'-phosphorothioate
  modified_base 3: mod_base = OTHER; note = 2'-O-methylcytidine-3'-phosphate
  modified_base 4: mod_base = OTHER; note = 2'-O-methyladenosine-3'-phosphate
  modified_base 5: mod_base = OTHER; note = 2'-O-methyluridine-3'-phosphate
  modified_base 6: mod_base = OTHER; note = 2'-fluorocytidine-3'-phosphate
  modified_base 7: mod_base = OTHER; note = 2'-O-methyluridine-3'-phosphate
  modified_base 8: mod_base = OTHER; note = 2'-fluorouridine-3'-phosphate
  modified_base 9: mod_base = OTHER; note = 2'-fluoroguanosine-3'-phosphate
  modified_base 10: mod_base = OTHER; note = 2'-O-methyladenosine-3'-phosphate
  modified_base 11: mod_base = OTHER; note = 2'-O-methyladenosine-3'-phosphate
  modified_base 12: mod_base = OTHER; note = 2'-O-methylcytidine-3'-phosphate
  modified_base 13: mod_base = OTHER; note = 2'-O-methyladenosine-3'-phosphate
  modified_base 14: mod_base = OTHER; note = 2'-fluorocytidine-3'-phosphate
  modified_base 15: mod_base = OTHER; note = 2'-O-methylcytidine-3'-phosphate
  modified_base 16: mod_base = OTHER; note = 2'-fluorouridine-3'-phosphate
  modified_base 17: mod_base = OTHER; note = 2'-O-methyluridine-3'-phosphate
  modified_base 18: mod_base = OTHER; note = 2'-O-methyluridine-3'-phosphate
  modified_base 19: mod_base = OTHER; note = 2'-O-methylcytidine-3'-phosphate
  modified_base 20: mod_base = OTHER; note = 2'-O-methyluridine-3'-phosphate
  modified_base 21: mod_base = OTHER; note = 2'-O-methylcytidine-3'- phosphorothioate
  modified_base 22: mod_base = OTHER; note = 2'-O-methylcytidine-3'- phosphorothioate
  modified_base 23: mod_base = OTHER; note = 2'-O-methylcytidine-3'-phosphate
gacatcttgaacacctttctccc

SEQ ID NO: 2040 - RNA, 21 nt, synthetic construct
  misc_feature 1..21: note = Description of Artificial Sequence: Synthetic oligonucleotide
  source 1..21: mol_type = other RNA
  modified_base 1: mod_base = OTHER; note = 2'-O-methylguanosine-3'- phosphorothioate
  modified_base 2: mod_base = OTHER; note = 2'-O-methylguanosine-3'- phosphorothioate
  modified_base 3: mod_base = OTHER; note = 2'-O-methyladenosine-3'-phosphate
  modified_base 4: mod_base = OTHER; note = 2'-O-methylguanosine-3'-phosphate
  modified_base 5: mod_base = OTHER; note = 2'-O-methyladenosine-3'-phosphate
  modified_base 6: mod_base = OTHER; note = 2'-O-methyladenosine-3'-phosphate
  modified_base 7: mod_base = OTHER; note = 2'-fluoroadenosine-3'-phosphate
  modified_base 8: mod_base = OTHER; note = 2'-O-methylguanosine-3'-phosphate
  modified_base 9: mod_base = OTHER; note = 2'-fluoroguanosine-3'-phosphate
  modified_base 10: mod_base = OTHER; note = 2'-fluorouridine-3'-phosphate
  modified_base 11: mod_base = OTHER; note = 2'-fluoroguanosine-3'-phosphate
  modified_base 12: mod_base = OTHER; note = 2'-O-methyluridine-3'-phosphate
  modified_base 13: mod_base = OTHER; note = 2'-O-methyluridine-3'-phosphate
  modified_base 14: mod_base = OTHER; note = 2'-O-methylcytidine-3'-phosphate
  modified_base 15: mod_base = OTHER; note = 2'-O-methyladenosine-3'-phosphate
  modified_base 16: mod_base = OTHER; note = 2'-O-methyladenosine-3'-phosphate
  modified_base 17: mod_base = OTHER; note = 2'-O-methylguanosine-3'-phosphate
  modified_base 18: mod_base = OTHER; note = 2'-O-methyladenosine-3'-phosphate
  modified_base 19: mod_base = OTHER; note = 2'-O-methyluridine-3'-phosphate
  modified_base 20: mod_base = OTHER; note = 2'-O-methylguanosine-3'-phosphate
  modified_base 21: mod_base = OTHER; note = 2'-O-methyluridine-3'-phosphate attached to N-[tris(N-acetylgalactosamine-alkyl)-amidodecanoyl)]-4-hydr oxyprolinol Hyp-(N-acetylgalactosamine-alkyl)3
ggagaaaggtgttcaagatgt

SEQ ID NO: 2041 - RNA, 23 nt, synthetic construct
  misc_feature 1..23: note = Description of Artificial Sequence: Synthetic oligonucleotide
  source 1..23: mol_type = other RNA
  modified_base 1: mod_base = OTHER; note = 2'-O-methyladenosine-3'- phosphorothioate
  modified_base 2: mod_base = OTHER; note = 2'-fluorocytidine-3'-phosphorothioate
  modified_base 3: mod_base = OTHER; note = 2'-O-methyladenosine-3'-phosphate
  modified_base 4: mod_base = OTHER; note = 2'-O-methyluridine-3'-phosphate
  modified_base 5: mod_base = OTHER; note = 2'-O-methylcytidine-3'-phosphate
  modified_base 6: mod_base = OTHER; note = 2'-fluorouridine-3'-phosphate
  modified_base 7: mod_base = OTHER; note = 2'-O-methyluridine-3'-phosphate
  modified_base 8: mod_base = OTHER; note = 2'-fluoroguanosine-3'-phosphate
  modified_base 9: mod_base = OTHER; note = 2'-fluoroadenosine-3'-phosphate
  modified_base 10: mod_base = OTHER; note = 2'-O-methyladenosine-3'-phosphate
  modified_base 11: mod_base = OTHER; note = 2'-O-methylcytidine-3'-phosphate
  modified_base 12: mod_base = OTHER; note = 2'-O-methyladenosine-3'-phosphate
  modified_base 13: mod_base = OTHER; note = 2'-O-methylcytidine-3'-phosphate
  modified_base 14: mod_base = OTHER; note = 2'-fluorocytidine-3'-phosphate
  modified_base 15: mod_base = OTHER; note = 2'-O-methyluridine-3'-phosphate
  modified_base 16: mod_base = OTHER; note = 2'-fluorouridine-3'-phosphate
  modified_base 17: mod_base = OTHER; note = 2'-O-methyluridine-3'-phosphate
  modified_base 18: mod_base = OTHER; note = 2'-O-methylcytidine-3'-phosphate
  modified_base 19: mod_base = OTHER; note = 2'-O-methyluridine-3'-phosphate
  modified_base 20: mod_base = OTHER; note = 2'-O-methylcytidine-3'-phosphate
  modified_base 21: mod_base = OTHER; note = 2'-O-methylcytidine-3'- phosphorothioate
  modified_base 22: mod_base = OTHER; note = 2'-O-methylcytidine-3'- phosphorothioate
  modified_base 23: mod_base = OTHER; note = 2'-O-methylcytidine-3'-phosphate
acatcttgaacacctttctcccc

SEQ ID NO: 2042 - RNA, 21 nt, synthetic construct
  misc_feature 1..21: note = Description of Artificial Sequence: Synthetic oligonucleotide
  source 1..21: mol_type = other RNA
  modified_base 1: mod_base = OTHER; note = 2'-O-methyladenosine-3'- phosphorothioate
  modified_base 2: mod_base = OTHER; note = 2'-O-methyladenosine-3'- phosphorothioate
  modified_base 3: mod_base = OTHER; note = 2'-O-methylcytidine-3'-phosphate
  modified_base 4: mod_base = OTHER; note = 2'-O-methylcytidine-3'-phosphate
  modified_base 5: mod_base = OTHER; note = 2'-O-methylguanosine-3'-phosphate
  modified_base 6: mod_base = OTHER; note = 2'-O-methyluridine-3'-phosphate
  modified_base 7: mod_base = OTHER; note = 2'-fluorocytidine-3'-phosphate
  modified_base 8: mod_base = OTHER; note = 2'-O-methyluridine-3'-phosphate
  modified_base 9: mod_base = OTHER; note = 2'-fluoroguanosine-3'-phosphate
  modified_base 10: mod_base = OTHER; note = 2'-fluoroguanosine-3'-phosphate
  modified_base 11: mod_base = OTHER; note = 2'-fluoroadenosine-3'-phosphate
  modified_base 12: mod_base = OTHER; note = 2'-O-methyluridine-3'-phosphate
  modified_base 13: mod_base = OTHER; note = 2'-O-methylguanosine-3'-phosphate
  modified_base 14: mod_base = OTHER; note = 2'-O-methyladenosine-3'-phosphate
  modified_base 15: mod_base = OTHER; note = 2'-O-methyluridine-3'-phosphate
  modified_base 16: mod_base = OTHER; note = 2'-O-methylguanosine-3'-phosphate
  modified_base 17: mod_base = OTHER; note = 2'-O-methyluridine-3'-phosphate
  modified_base 18: mod_base = OTHER; note = 2'-O-methylguanosine-3'-phosphate
  modified_base 19: mod_base = OTHER; note = 2'-O-methylcytidine-3'-phosphate
  modified_base 20: mod_base = OTHER; note = 2'-O-methylguanosine-3'-phosphate
  modified_base 21: mod_base = OTHER; note = 2'-O-methyluridine-3'-phosphate attached to N-[tris(N-acetylgalactosamine-alkyl)-amidodecanoyl)]-4-hydr oxyprolinol Hyp-(N-acetylgalactosamine-alkyl)3
aaccgtctggatgatgtgcgt

SEQ ID NO: 2043 - RNA, 23 nt, synthetic construct
  misc_feature 1..23: note = Description of Artificial Sequence: Synthetic oligonucleotide
  source 1..23: mol_type = other RNA
  modified_base 1: mod_base = OTHER; note = 2'-O-methyladenosine-3'- phosphorothioate
  modified_base 2: mod_base = OTHER; note = 2'-fluorocytidine-3'-phosphorothioate
  modified_base 3: mod_base = OTHER; note = 2'-O-methylguanosine-3'-phosphate
  modified_base 4: mod_base = OTHER; note = 2'-O-methylcytidine-3'-phosphate
  modified_base 5: mod_base = OTHER; note = 2'-O-methyladenosine-3'-phosphate
  modified_base 6: mod_base = OTHER; note = 2'-fluorocytidine-3'-phosphate
  modified_base 7: mod_base = OTHER; note = 2'-O-methyladenosine-3'-phosphate
  modified_base 8: mod_base = OTHER; note = 2'-fluorouridine-3'-phosphate
  modified_base 9: mod_base = OTHER; note = 2'-fluorocytidine-3'-phosphate
  modified_base 10: mod_base = OTHER; note = 2'-O-methyladenosine-3'-phosphate
  modified_base 11: mod_base = OTHER; note = 2'-O-methyluridine-3'-phosphate
  modified_base 12: mod_base = OTHER; note = 2'-O-methylcytidine-3'-phosphate
  modified_base 13: mod_base = OTHER; note = 2'-O-methylcytidine-3'-phosphate
  modified_base 14: mod_base = OTHER; note = 2'-fluoroadenosine-3'-phosphate
  modified_base 15: mod_base = OTHER; note = 2'-O-methylguanosine-3'-phosphate
  modified_base 16: mod_base = OTHER; note = 2'-fluoroadenosine-3'-phosphate
  modified_base 17: mod_base = OTHER; note = 2'-O-methylcytidine-3'-phosphate
  modified_base 18: mod_base = OTHER; note = 2'-O-methylguanosine-3'-phosphate
  modified_base 19: mod_base = OTHER; note = 2'-O-methylguanosine-3'-phosphate
  modified_base 20: mod_base = OTHER; note = 2'-O-methyluridine-3'-phosphate
  modified_base 21: mod_base = OTHER; note = 2'-O-methyluridine-3'-phosphorothioate
  modified_base 22: mod_base = OTHER; note = 2'-O-methylguanosine-3'- phosphorothioate
  modified_base 23: mod_base = OTHER; note = 2'-O-methylcytidine-3'-phosphate
acgcacatcatccagacggttgc

SEQ ID NO: 2044 - RNA, 21 nt, synthetic construct
  misc_feature 1..21: note = Description of Artificial Sequence: Synthetic oligonucleotide
  source 1..21: mol_type = other RNA
  modified_base 1: mod_base = OTHER; note = 2'-O-methyladenosine-3'- phosphorothioate
  modified_base 2: mod_base = OTHER; note = 2'-O-methylcytidine-3'- phosphorothioate
  modified_base 3: mod_base = OTHER; note = 2'-O-methylcytidine-3'-phosphate
  modified_base 4: mod_base = OTHER; note = 2'-O-methylguanosine-3'-phosphate
  modified_base 5: mod_base = OTHER; note = 2'-O-methyluridine-3'-phosphate
  modified_base 6: mod_base = OTHER; note = 2'-O-methylcytidine-3'-phosphate
  modified_base 7: mod_base = OTHER; note = 2'-fluorouridine-3'-phosphate
  modified_base 8: mod_base = OTHER; note = 2'-O-methylguanosine-3'-phosphate
  modified_base 9: mod_base = OTHER; note = 2'-fluoroguanosine-3'-phosphate
  modified_base 10: mod_base = OTHER; note = 2'-fluoroadenosine-3'-phosphate
  modified_base 11: mod_base = OTHER; note = 2'-fluorouridine-3'-phosphate
  modified_base 12: mod_base = OTHER; note = 2'-O-methylguanosine-3'-phosphate
  modified_base 13: mod_base = OTHER; note = 2'-O-methyladenosine-3'-phosphate
  modified_base 14: mod_base = OTHER; note = 2'-O-methyluridine-3'-phosphate
  modified_base 15: mod_base = OTHER; note = 2'-O-methylguanosine-3'-phosphate
  modified_base 16: mod_base = OTHER; note = 2'-O-methyluridine-3'-phosphate
  modified_base 17: mod_base = OTHER; note = 2'-O-methylguanosine-3'-phosphate
  modified_base 18: mod_base = OTHER; note = 2'-O-methylcytidine-3'-phosphate
  modified_base 19: mod_base = OTHER; note = 2'-O-methylguanosine-3'-phosphate
  modified_base 20: mod_base = OTHER; note = 2'-O-methyluridine-3'-phosphate
  modified_base 21: mod_base = OTHER; note = 2'-O-methyladenosine-3'-phosphate attached to N-[tris(N-acetylgalactosamine-alkyl)-amidodecanoyl)]-4-hydr oxyprolinol Hyp-(N-acetylgalactosamine-alkyl)3
accgtctggatgatgtgcgta

SEQ ID NO: 2045 - RNA, 23 nt, synthetic construct
  misc_feature 1..23: note = Description of Artificial Sequence: Synthetic oligonucleotide
  source 1..23: mol_type = other RNA
  modified_base 1: mod_base = OTHER; note = 2'-O-methyluridine-3'-phosphorothioate
  modified_base 2: mod_base = OTHER; note = 2'-fluoroadenosine-3'-phosphorothioate
  modified_base 3: mod_base = OTHER; note = 2'-O-methylcytidine-3'-phosphate
  modified_base 4: mod_base = OTHER; note = 2'-O-methylguanosine-3'-phosphate
  modified_base 5: mod_base = OTHER; note = 2'-O-methylcytidine-3'-phosphate
  modified_base 6: mod_base = OTHER; note = 2'-fluoroadenosine-3'-phosphate
  modified_base 7: mod_base = OTHER; note = 2'-O-methylcytidine-3'-phosphate
  modified_base 8: mod_base = OTHER; note = 2'-fluoroadenosine-3'-phosphate
  modified_base 9: mod_base = OTHER; note = 2'-fluorouridine-3'-phosphate
  modified_base 10: mod_base = OTHER; note = 2'-O-methylcytidine-3'-phosphate
  modified_base 11: mod_base = OTHER; note = 2'-O-methyladenosine-3'-phosphate
  modified_base 12: mod_base = OTHER; note = 2'-O-methyluridine-3'-phosphate
  modified_base 13: mod_base = OTHER; note = 2'-O-methylcytidine-3'-phosphate
  modified_base 14: mod_base = OTHER; note = 2'-fluorocytidine-3'-phosphate
  modified_base 15: mod_base = OTHER; note = 2'-O-methyladenosine-3'-phosphate
  modified_base 16: mod_base = OTHER; note = 2'-fluoroguanosine-3'-phosphate
  modified_base 17: mod_base = OTHER; note = 2'-O-methyladenosine-3'-phosphate
  modified_base 18: mod_base = OTHER; note = 2'-O-methylcytidine-3'-phosphate
  modified_base 19: mod_base = OTHER; note = 2'-O-methylguanosine-3'-phosphate
  modified_base 20: mod_base = OTHER; note = 2'-O-methylguanosine-3'-phosphate
  modified_base 21: mod_base = OTHER; note = 2'-O-methyluridine-3'-phosphorothioate
  modified_base 22: mod_base = OTHER; note = 2'-O-methyluridine-3'-phosphorothioate
  modified_base 23: mod_base = OTHER; note = 2'-O-methylguanosine-3'-phosphate
tacgcacatcatccagacggttg

SEQ ID NO: 2046 - RNA, 21 nt, synthetic construct
  misc_feature 1..21: note = Description of Artificial Sequence: Synthetic oligonucleotide
  source 1..21: mol_type = other RNA
  modified_base 1: mod_base = OTHER; note = 2'-O-methylguanosine-3'- phosphorothioate
  modified_base 2: mod_base = OTHER; note = 2'-O-methylguanosine-3'- phosphorothioate
  modified_base 3: mod_base = OTHER; note = 2'-O-methylguanosine-3'-phosphate
  modified_base 4: mod_base = OTHER; note = 2'-O-methylcytidine-3'-phosphate
  modified_base 5: mod_base = OTHER; note = 2'-O-methyladenosine-3'-phosphate
  modified_base 6: mod_base = OTHER; note = 2'-O-methyladenosine-3'-phosphate
  modified_base 7: mod_base = OTHER; note = 2'-fluorocytidine-3'-phosphate
  modified_base 8: mod_base = OTHER; note = 2'-O-methylcytidine-3'-phosphate
  modified_base 9: mod_base = OTHER; note = 2'-fluoroguanosine-3'-phosphate
  modified_base 10: mod_base = OTHER; note = 2'-fluorouridine-3'-phosphate
  modified_base 11: mod_base = OTHER; note = 2'-fluorocytidine-3'-phosphate
  modified_base 12: mod_base = OTHER; note = 2'-O-methyluridine-3'-phosphate
  modified_base 13: mod_base = OTHER; note = 2'-O-methylguanosine-3'-phosphate
  modified_base 14: mod_base = OTHER; note = 2'-O-methylguanosine-3'-phosphate
  modified_base 15: mod_base = OTHER; note = 2'-O-methyladenosine-3'-phosphate
  modified_base 16: mod_base = OTHER; note = 2'-O-methyluridine-3'-phosphate
  modified_base 17: mod_base = OTHER; note = 2'-O-methylguanosine-3'-phosphate
  modified_base 18: mod_base = OTHER; note = 2'-O-methyladenosine-3'-phosphate
  modified_base 19: mod_base = OTHER; note = 2'-O-methyluridine-3'-phosphate
  modified_base 20: mod_base = OTHER; note = 2'-O-methylguanosine-3'-phosphate
  modified_base 21: mod_base = OTHER; note = 2'-O-methyluridine-3'-phosphate attached to N-[tris(N-acetylgalactosamine-alkyl)-amidodecanoyl)]-4-hydr oxyprolinol Hyp-(N-acetylgalactosamine-alkyl)3
gggcaaccgtctggatgatgt

SEQ ID NO: 2047 - RNA, 23 nt, synthetic construct
  misc_feature 1..23: note = Description of Artificial Sequence: Synthetic oligonucleotide
  source 1..23: mol_type = other RNA
  modified_base 1: mod_base = OTHER; note = 2'-O-methyladenosine-3'- phosphorothioate
  modified_base 2: mod_base = OTHER; note = 2'-fluorocytidine-3'-phosphorothioate
  modified_base 3: mod_base = OTHER; note = 2'-O-methyladenosine-3'-phosphate
  modified_base 4: mod_base = OTHER; note = 2'-O-methyluridine-3'-phosphate
  modified_base 5: mod_base = OTHER; note = 2'-O-methylcytidine-3'-phosphate
  modified_base 6: mod_base = OTHER; note = 2'-fluoroadenosine-3'-phosphate
  modified_base 7: mod_base = OTHER; note = 2'-O-methyluridine-3'-phosphate
  modified_base 8: mod_base = OTHER; note = 2'-fluorocytidine-3'-phosphate
  modified_base 9: mod_base = OTHER; note = 2'-fluorocytidine-3'-phosphate
  modified_base 10: mod_base = OTHER; note = 2'-O-methyladenosine-3'-phosphate
  modified_base 11: mod_base = OTHER; note = 2'-O-methylguanosine-3'-phosphate
  modified_base 12: mod_base = OTHER; note = 2'-O-methyladenosine-3'-phosphate
  modified_base 13: mod_base = OTHER; note = 2'-O-methylcytidine-3'-phosphate
  modified_base 14: mod_base = OTHER; note = 2'-fluoroguanosine-3'-phosphate
  modified_base 15: mod_base = OTHER; note = 2'-O-methylguanosine-3'-phosphate
  modified_base 16: mod_base = OTHER; note = 2'-fluorouridine-3'-phosphate
  modified_base 17: mod_base = OTHER; note = 2'-O-methyluridine-3'-phosphate
  modified_base 18: mod_base = OTHER; note = 2'-O-methylguanosine-3'-phosphate
  modified_base 19: mod_base = OTHER; note = 2'-O-methylcytidine-3'-phosphate
  modified_base 20: mod_base = OTHER; note = 2'-O-methylcytidine-3'-phosphate
  modified_base 21: mod_base = OTHER; note = 2'-O-methylcytidine-3'- phosphorothioate
  modified_base 22: mod_base = OTHER; note = 2'-O-methyladenosine-3'- phosphorothioate
  modified_base 23: mod_base = OTHER; note = 2'-O-methylguanosine-3'-phosphate
acatcatccagacggttgcccag

SEQ ID NO: 2048 - RNA, 21 nt, synthetic construct
  misc_feature 1..21: note = Description of Artificial Sequence: Synthetic oligonucleotide
  source 1..21: mol_type = other RNA
  modified_base 1: mod_base = OTHER; note = 2'-O-methyluridine-3'-phosphorothioate
  modified_base 2: mod_base = OTHER; note = 2'-O-methylguanosine-3'- phosphorothioate
  modified_base 3: mod_base = OTHER; note = 2'-O-methylguanosine-3'-phosphate
  modified_base 4: mod_base = OTHER; note = 2'-O-methylguanosine-3'-phosphate
  modified_base 5: mod_base = OTHER; note = 2'-O-methylcytidine-3'-phosphate
  modified_base 6: mod_base = OTHER; note = 2'-O-methyladenosine-3'-phosphate
  modified_base 7: mod_base = OTHER; note = 2'-fluoroadenosine-3'-phosphate
  modified_base 8: mod_base = OTHER; note = 2'-O-methylcytidine-3'-phosphate
  modified_base 9: mod_base = OTHER; note = 2'-fluorocytidine-3'-phosphate
  modified_base 10: mod_base = OTHER; note = 2'-fluoroguanosine-3'-phosphate
  modified_base 11: mod_base = OTHER; note = 2'-fluorouridine-3'-phosphate
  modified_base 12: mod_base = OTHER; note = 2'-O-methylcytidine-3'-phosphate
  modified_base 13: mod_base = OTHER; note = 2'-O-methyluridine-3'-phosphate
  modified_base 14: mod_base = OTHER; note = 2'-O-methylguanosine-3'-phosphate
  modified_base 15: mod_base = OTHER; note = 2'-O-methylguanosine-3'-phosphate
  modified_base 16: mod_base = OTHER; note = 2'-O-methyladenosine-3'-phosphate
  modified_base 17: mod_base = OTHER; note = 2'-O-methyluridine-3'-phosphate
  modified_base 18: mod_base = OTHER; note = 2'-O-methylguanosine-3'-phosphate
  modified_base 19: mod_base = OTHER; note = 2'-O-methyladenosine-3'-phosphate
  modified_base 20: mod_base = OTHER; note = 2'-O-methyluridine-3'-phosphate
  modified_base 21: mod_base = OTHER; note = 2'-O-methylguanosine-3'-phosphate attached to N-[tris(N-acetylgalactosamine-alkyl)-amidodecanoyl)]-4-hydr oxyprolinol Hyp-(N-acetylgalactosamine-alkyl)3
tgggcaaccgtctggatgatg

SEQ ID NO: 2049 - RNA, 23 nt, synthetic construct
  misc_feature 1..23: note = Description of Artificial Sequence: Synthetic oligonucleotide
  source 1..23: mol_type = other RNA
  modified_base 1: mod_base = OTHER; note = 2'-O-methylcytidine-3'- phosphorothioate
  modified_base 2: mod_base = OTHER; note = 2'-fluoroadenosine-3'-phosphorothioate
  modified_base 3: mod_base = OTHER; note = 2'-O-methyluridine-3'-phosphate
  modified_base 4: mod_base = OTHER; note = 2'-O-methylcytidine-3'-phosphate
  modified_base 5: mod_base = OTHER; note = 2'-O-methyladenosine-3'-phosphate
  modified_base 6: mod_base = OTHER; note = 2'-fluorouridine-3'-phosphate
  modified_base 7: mod_base = OTHER; note = 2'-O-methylcytidine-3'-phosphate
  modified_base 8: mod_base = OTHER; note = 2'-fluorocytidine-3'-phosphate
  modified_base 9: mod_base = OTHER; note = 2'-fluoroadenosine-3'-phosphate
  modified_base 10: mod_base = OTHER; note = 2'-O-methylguanosine-3'-phosphate
  modified_base 11: mod_base = OTHER; note = 2'-O-methyladenosine-3'-phosphate
  modified_base 12: mod_base = OTHER; note = 2'-O-methylcytidine-3'-phosphate
  modified_base 13: mod_base = OTHER; note = 2'-O-methylguanosine-3'-phosphate
  modified_base 14: mod_base = OTHER; note = 2'-fluoroguanosine-3'-phosphate
  modified_base 15: mod_base = OTHER; note = 2'-O-methyluridine-3'-phosphate
  modified_base 16: mod_base = OTHER; note = 2'-fluorouridine-3'-phosphate
  modified_base 17: mod_base = OTHER; note = 2'-O-methylguanosine-3'-phosphate
  modified_base 18: mod_base = OTHER; note = 2'-O-methylcytidine-3'-phosphate
  modified_base 19: mod_base = OTHER; note = 2'-O-methylcytidine-3'-phosphate
  modified_base 20: mod_base = OTHER; note = 2'-O-methylcytidine-3'-phosphate
  modified_base 21: mod_base = OTHER; note = 2'-O-methyladenosine-3'- phosphorothioate
  modified_base 22: mod_base = OTHER; note = 2'-O-methylguanosine-3'- phosphorothioate
  modified_base 23: mod_base = OTHER; note = 2'-O-methylguanosine-3'-phosphate
catcatccagacggttgcccagg

SEQ ID NO: 2050 - RNA, 21 nt, synthetic construct
  misc_feature 1..21: note = Description of Artificial Sequence: Synthetic oligonucleotide
  source 1..21: mol_type = other RNA
  modified_base 1: mod_base = OTHER; note = 2'-O-methylguanosine-3'- phosphorothioate
  modified_base 2: mod_base = OTHER; note = 2'-O-methyladenosine-3'- phosphorothioate
  modified_base 3: mod_base = OTHER; note = 2'-O-methyladenosine-3'-phosphate
  modified_base 4: mod_base = OTHER; note = 2'-O-methyladenosine-3'-phosphate
  modified_base 5: mod_base = OTHER; note = 2'-O-methylcytidine-3'-phosphate
  modified_base 6: mod_base = OTHER; note = 2'-O-methyluridine-3'-phosphate
  modified_base 7: mod_base = OTHER; note = 2'-fluorouridine-3'-phosphate
  modified_base 8: mod_base = OTHER; note = 2'-O-methyluridine-3'-phosphate
  modified_base 9: mod_base = OTHER; note = 2'-fluoroguanosine-3'-phosphate
  modified_base 10: mod_base = OTHER; note = 2'-fluoroguanosine-3'-phosphate
  modified_base 11: mod_base = OTHER; note = 2'-fluorocytidine-3'-phosphate
  modified_base 12: mod_base = OTHER; note = 2'-O-methyluridine-3'-phosphate
  modified_base 13: mod_base = OTHER; note = 2'-O-methylguanosine-3'-phosphate
  modified_base 14: mod_base = OTHER; note = 2'-O-methyladenosine-3'-phosphate
  modified_base 15: mod_base = OTHER; note = 2'-O-methyluridine-3'-phosphate
  modified_base 16: mod_base = OTHER; note = 2'-O-methyladenosine-3'-phosphate
  modified_base 17: mod_base = OTHER; note = 2'-O-methyladenosine-3'-phosphate
  modified_base 18: mod_base = OTHER; note = 2'-O-methyluridine-3'-phosphate
  modified_base 19: mod_base = OTHER; note = 2'-O-methyladenosine-3'-phosphate
  modified_base 20: mod_base = OTHER; note = 2'-O-methyluridine-3'-phosphate
  modified_base 21: mod_base = OTHER; note = 2'-O-methyluridine-3'-phosphate attached to N-[tris(N-acetylgalactosamine-alkyl)-amidodecanoyl)]-4-hydr oxyprolinol Hyp-(N-acetylgalactosamine-alkyl)3
gaaactttggctgataatatt

SEQ ID NO: 2051 - RNA, 23 nt, synthetic construct
  misc_feature 1..23: note = Description of Artificial Sequence: Synthetic oligonucleotide
  source 1..23: mol_type = other RNA
  modified_base 1: mod_base = OTHER; note = 2'-O-methyladenosine-3'- phosphorothioate
  modified_base 2: mod_base = OTHER; note = 2'-fluoroadenosine-3'-phosphorothioate
  modified_base 3: mod_base = OTHER; note = 2'-O-methyluridine-3'-phosphate
  modified_base 4: mod_base = OTHER; note = 2'-O-methyladenosine-3'-phosphate
  modified_base 5: mod_base = OTHER; note = 2'-O-methyluridine-3'-phosphate
  modified_base 6: mod_base = OTHER; note = 2'-fluorouridine-3'-phosphate
  modified_base 7: mod_base = OTHER; note = 2'-O-methyladenosine-3'-phosphate
  modified_base 8: mod_base = OTHER; note = 2'-fluorouridine-3'-phosphate
  modified_base 9: mod_base = OTHER; note = 2'-fluorocytidine-3'-phosphate
  modified_base 10: mod_base = OTHER; note = 2'-O-methyladenosine-3'-phosphate
  modified_base 11: mod_base = OTHER; note = 2'-O-methylguanosine-3'-phosphate
  modified_base 12: mod_base = OTHER; note = 2'-O-methylcytidine-3'-phosphate
  modified_base 13: mod_base = OTHER; note = 2'-O-methylcytidine-3'-phosphate
  modified_base 14: mod_base = OTHER; note = 2'-fluoroadenosine-3'-phosphate
  modified_base 15: mod_base = OTHER; note = 2'-O-methyladenosine-3'-phosphate
  modified_base 16: mod_base = OTHER; note = 2'-fluoroadenosine-3'-phosphate
  modified_base 17: mod_base = OTHER; note = 2'-O-methylguanosine-3'-phosphate
  modified_base 18: mod_base = OTHER; note = 2'-O-methyluridine-3'-phosphate
  modified_base 19: mod_base = OTHER; note = 2'-O-methyluridine-3'-phosphate
  modified_base 20: mod_base = OTHER; note = 2'-O-methyluridine-3'-phosphate
  modified_base 21: mod_base = OTHER; note = 2'-O-methylcytidine-3'- phosphorothioate
  modified_base 22: mod_base = OTHER; note = 2'-O-methyluridine-3'-phosphorothioate
  modified_base 23: mod_base = OTHER; note = 2'-O-methyluridine-3'-phosphate
aatattatcagccaaagtttctt

SEQ ID NO: 2052 - RNA, 21 nt, synthetic construct
  misc_feature 1..21: note = Description of Artificial Sequence: Synthetic oligonucleotide
  source 1..21: mol_type = other RNA
  modified_base 1: mod_base = OTHER; note = 2'-O-methyladenosine-3'- phosphorothioate
  modified_base 2: mod_base = OTHER; note = 2'-O-methyladenosine-3'- phosphorothioate
  modified_base 3: mod_base = OTHER; note = 2'-O-methyladenosine-3'-phosphate
  modified_base 4: mod_base = OTHER; note = 2'-O-methylcytidine-3'-phosphate
  modified_base 5: mod_base = OTHER; note = 2'-O-methyluridine-3'-phosphate
  modified_base 6: mod_base = OTHER; note = 2'-O-methyluridine-3'-phosphate
  modified_base 7: mod_base = OTHER; note = 2'-fluorouridine-3'-phosphate
  modified_base 8: mod_base = OTHER; note = 2'-O-methylguanosine-3'-phosphate
  modified_base 9: mod_base = OTHER; note = 2'-fluoroguanosine-3'-phosphate
  modified_base 10: mod_base = OTHER; note = 2'-fluorocytidine-3'-phosphate
  modified_base 11: mod_base = OTHER; note = 2'-fluorouridine-3'-phosphate
  modified_base 12: mod_base = OTHER; note = 2'-O-methylguanosine-3'-phosphate
  modified_base 13: mod_base = OTHER; note = 2'-O-methyladenosine-3'-phosphate
  modified_base 14: mod_base = OTHER; note = 2'-O-methyluridine-3'-phosphate
  modified_base 15: mod_base = OTHER; note = 2'-O-methyladenosine-3'-phosphate
  modified_base 16: mod_base = OTHER; note = 2'-O-methyladenosine-3'-phosphate
  modified_base 17: mod_base = OTHER; note = 2'-O-methyluridine-3'-phosphate
  modified_base 18: mod_base = OTHER; note = 2'-O-methyladenosine-3'-phosphate
  modified_base 19: mod_base = OTHER; note = 2'-O-methyluridine-3'-phosphate
  modified_base 20: mod_base = OTHER; note = 2'-O-methyluridine-3'-phosphate
  modified_base 21: mod_base = OTHER; note = 2'-O-methylguanosine-3'-phosphate attached to N-[tris(N-acetylgalactosamine-alkyl)-amidodecanoyl)]-4-hydr oxyprolinol Hyp-(N-acetylgalactosamine-alkyl)3
aaactttggctgataatattg

SEQ ID NO: 2053 - RNA, 23 nt, synthetic construct
  misc_feature 1..23: note = Description of Artificial Sequence: Synthetic oligonucleotide
  source 1..23: mol_type = other RNA
  modified_base 1: mod_base = OTHER; note = 2'-O-methylcytidine-3'- phosphorothioate
  modified_base 2: mod_base = OTHER; note = 2'-fluoroadenosine-3'-phosphorothioate
  modified_base 3: mod_base = OTHER; note = 2'-O-methyladenosine-3'-phosphate
  modified_base 4: mod_base = OTHER; note = 2'-O-methyluridine-3'-phosphate
  modified_base 5: mod_base = OTHER; note = 2'-O-methyladenosine-3'-phosphate
  modified_base 6: mod_base = OTHER; note = 2'-fluorouridine-3'-phosphate
  modified_base 7: mod_base = OTHER; note = 2'-O-methyluridine-3'-phosphate
  modified_base 8: mod_base = OTHER; note = 2'-fluoroadenosine-3'-phosphate
  modified_base 9: mod_base = OTHER; note = 2'-fluorouridine-3'-phosphate
  modified_base 10: mod_base = OTHER; note = 2'-O-methylcytidine-3'-phosphate
  modified_base 11: mod_base = OTHER; note = 2'-O-methyladenosine-3'-phosphate
  modified_base 12: mod_base = OTHER; note = 2'-O-methylguanosine-3'-phosphate
  modified_base 13: mod_base = OTHER; note = 2'-O-methylcytidine-3'-phosphate
  modified_base 14: mod_base = OTHER; note = 2'-fluorocytidine-3'-phosphate
  modified_base 15: mod_base = OTHER; note = 2'-O-methyladenosine-3'-phosphate
  modified_base 16: mod_base = OTHER; note = 2'-fluoroadenosine-3'-phosphate
  modified_base 17: mod_base = OTHER; note = 2'-O-methyladenosine-3'-phosphate
  modified_base 18: mod_base = OTHER; note = 2'-O-methylguanosine-3'-phosphate
  modified_base 19: mod_base = OTHER; note = 2'-O-methyluridine-3'-phosphate
  modified_base 20: mod_base = OTHER; note = 2'-O-methyluridine-3'-phosphate
  modified_base 21: mod_base = OTHER; note = 2'-O-methyluridine-3'-phosphorothioate
  modified_base 22: mod_base = OTHER; note = 2'-O-methylcytidine-3'- phosphorothioate
  modified_base 23: mod_base = OTHER; note = 2'-O-methyluridine-3'-phosphate
caatattatcagccaaagtttct

SEQ ID NO: 2054 - RNA, 21 nt, synthetic construct
  misc_feature 1..21: note = Description of Artificial Sequence: Synthetic oligonucleotide
  source 1..21: mol_type = other RNA
  modified_base 1: mod_base = OTHER; note = 2'-O-methyluridine-3'-phosphorothioate
  modified_base 2: mod_base = OTHER; note = 2'-O-methylguanosine-3'- phosphorothioate
  modified_base 3: mod_base = OTHER; note = 2'-O-methyladenosine-3'-phosphate
  modified_base 4: mod_base = OTHER; note = 2'-O-methyladenosine-3'-phosphate
  modified_base 5: mod_base = OTHER; note = 2'-O-methylguanosine-3'-phosphate
  modified_base 6: mod_base = OTHER; note = 2'-O-methyladenosine-3'-phosphate
  modified_base 7: mod_base = OTHER; note = 2'-fluoroadenosine-3'-phosphate
  modified_base 8: mod_base = OTHER; note = 2'-O-methyladenosine-3'-phosphate
  modified_base 9: mod_base = OTHER; note = 2'-fluorocytidine-3'-phosphate
  modified_base 10: mod_base = OTHER; note = 2'-fluorouridine-3'-phosphate
  modified_base 11: mod_base = OTHER; note = 2'-fluorouridine-3'-phosphate
  modified_base 12: mod_base = OTHER; note = 2'-O-methyluridine-3'-phosphate
  modified_base 13: mod_base = OTHER; note = 2'-O-methylguanosine-3'-phosphate
  modified_base 14: mod_base = OTHER; note = 2'-O-methylguanosine-3'-phosphate
  modified_base 15: mod_base = OTHER; note = 2'-O-methylcytidine-3'-phosphate
  modified_base 16: mod_base = OTHER; note = 2'-O-methyluridine-3'-phosphate
  modified_base 17: mod_base = OTHER; note = 2'-O-methylguanosine-3'-phosphate
  modified_base 18: mod_base = OTHER; note = 2'-O-methyladenosine-3'-phosphate
  modified_base 19: mod_base = OTHER; note = 2'-O-methyluridine-3'-phosphate
  modified_base 20: mod_base = OTHER; note = 2'-O-methyladenosine-3'-phosphate
  modified_base 21: mod_base = OTHER; note = 2'-O-methyladenosine-3'-phosphate attached to N-[tris(N-acetylgalactosamine-alkyl)-amidodecanoyl)]-4-hydr oxyprolinol Hyp-(N-acetylgalactosamine-alkyl)3
tgaagaaactttggctgataa

SEQ ID NO: 2055 - RNA, 23 nt, synthetic construct
  misc_feature 1..23: note = Description of Artificial Sequence: Synthetic oligonucleotide
  source 1..23: mol_type = other RNA
  modified_base 1: mod_base = OTHER; note = 2'-O-methyluridine-3'-phosphorothioate
  modified_base 2: mod_base = OTHER; note = 2'-fluorouridine -3'-phosphorothioate
  modified_base 3: mod_base = OTHER; note = 2'-O-methyladenosine-3'-phosphate
  modified_base 4: mod_base = OTHER; note = 2'-O-methyluridine-3'-phosphate
  modified_base 5: mod_base = OTHER; note = 2'-O-methylcytidine-3'-phosphate
  modified_base 6: mod_base = OTHER; note = 2'-fluoroadenosine-3'-phosphate
  modified_base 7: mod_base = OTHER; note = 2'-O-methylguanosine-3'-phosphate
  modified_base 8: mod_base = OTHER; note = 2'-fluorocytidine-3'-phosphate
  modified_base 9: mod_base = OTHER; note = 2'-fluorocytidine-3'-phosphate
  modified_base 10: mod_base = OTHER; note = 2'-O-methyladenosine-3'-phosphate
  modified_base 11: mod_base = OTHER; note = 2'-O-methyladenosine-3'-phosphate
  modified_base 12: mod_base = OTHER; note = 2'-O-methyladenosine-3'-phosphate
  modified_base 13: mod_base = OTHER; note = 2'-O-methylguanosine-3'-phosphate
  modified_base 14: mod_base = OTHER; note = 2'-fluorouridine-3'-phosphate
  modified_base 15: mod_base = OTHER; note = 2'-O-methyluridine-3'-phosphate
  modified_base 16: mod_base = OTHER; note = 2'-fluorouridine-3'-phosphate
  modified_base 17: mod_base = OTHER; note = 2'-O-methylcytidine-3'-phosphate
  modified_base 18: mod_base = OTHER; note = 2'-O-methyluridine-3'-phosphate
  modified_base 19: mod_base = OTHER; note = 2'-O-methyluridine-3'-phosphate
  modified_base 20: mod_base = OTHER; note = 2'-O-methylcytidine-3'-phosphate
  modified_base 21: mod_base = OTHER; note = 2'-O-methyladenosine-3'- phosphorothioate
  modified_base 22: mod_base = OTHER; note = 2'-O-methyluridine-3'-phosphorothioate
  modified_base 23: mod_base = OTHER; note = 2'-O-methylcytidine-3'-phosphate
ttatcagccaaagtttcttcatc

SEQ ID NO: 2056 - RNA, 21 nt, synthetic construct
  misc_feature 1..21: note = Description of Artificial Sequence: Synthetic oligonucleotide
  source 1..21: mol_type = other RNA
  modified_base 1: mod_base = OTHER; note = 2'-O-methyladenosine-3'- phosphorothioate
  modified_base 2: mod_base = OTHER; note = 2'-O-methyluridine-3'-phosphorothioate
  modified_base 3: mod_base = OTHER; note = 2'-O-methylguanosine-3'-phosphate
  modified_base 4: mod_base = OTHER; note = 2'-O-methyladenosine-3'-phosphate
  modified_base 5: mod_base = OTHER; note = 2'-O-methyladenosine-3'-phosphate
  modified_base 6: mod_base = OTHER; note = 2'-O-methylguanosine-3'-phosphate
  modified_base 7: mod_base = OTHER; note = 2'-fluoroadenosine-3'-phosphate
  modified_base 8: mod_base = OTHER; note = 2'-O-methyladenosine-3'-phosphate
  modified_base 9: mod_base = OTHER; note = 2'-fluoroadenosine-3'-phosphate
  modified_base 10: mod_base = OTHER; note = 2'-fluorocytidine-3'-phosphate
  modified_base 11: mod_base = OTHER; note = 2'-fluorouridine-3'-phosphate
  modified_base 12: mod_base = OTHER; note = 2'-O-methyluridine-3'-phosphate
  modified_base 13: mod_base = OTHER; note = 2'-O-methyluridine-3'-phosphate
  modified_base 14: mod_base = OTHER; note = 2'-O-methylguanosine-3'-phosphate
  modified_base 15: mod_base = OTHER; note = 2'-O-methylguanosine-3'-phosphate
  modified_base 16: mod_base = OTHER; note = 2'-O-methylcytidine-3'-phosphate
  modified_base 17: mod_base = OTHER; note = 2'-O-methyluridine-3'-phosphate
  modified_base 18: mod_base = OTHER; note = 2'-O-methylguanosine-3'-phosphate
  modified_base 19: mod_base = OTHER; note = 2'-O-methyladenosine-3'-phosphate
  modified_base 20: mod_base = OTHER; note = 2'-O-methyluridine-3'-phosphate
  modified_base 21: mod_base = OTHER; note = 2'-O-methyladenosine-3'-phosphate attached to N-[tris(N-acetylgalactosamine-alkyl)-amidodecanoyl)]-4-hydr oxyprolinol Hyp-(N-acetylgalactosamine-alkyl)3
atgaagaaactttggctgata

SEQ ID NO: 2057 - RNA, 23 nt, synthetic construct
  misc_feature 1..23: note = Description of Artificial Sequence: Synthetic oligonucleotide
  source 1..23: mol_type = other RNA
  modified_base 1: mod_base = OTHER; note = 2'-O-methyluridine-3'-phosphorothioate
  modified_base 2: mod_base = OTHER; note = 2'-fluoroadenosine-3'-phosphorothioate
  modified_base 3: mod_base = OTHER; note = 2'-O-methyluridine-3'-phosphate
  modified_base 4: mod_base = OTHER; note = 2'-O-methylcytidine-3'-phosphate
  modified_base 5: mod_base = OTHER; note = 2'-O-methyladenosine-3'-phosphate
  modified_base 6: mod_base = OTHER; note = 2'-fluoroguanosine-3'-phosphate
  modified_base 7: mod_base = OTHER; note = 2'-O-methylcytidine-3'-phosphate
  modified_base 8: mod_base = OTHER; note = 2'-fluorocytidine-3'-phosphate
  modified_base 9: mod_base = OTHER; note = 2'-fluoroadenosine-3'-phosphate
  modified_base 10: mod_base = OTHER; note = 2'-O-methyladenosine-3'-phosphate
  modified_base 11: mod_base = OTHER; note = 2'-O-methyladenosine-3'-phosphate
  modified_base 12: mod_base = OTHER; note = 2'-O-methylguanosine-3'-phosphate
  modified_base 13: mod_base = OTHER; note = 2'-O-methyluridine-3'-phosphate
  modified_base 14: mod_base = OTHER; note = 2'-fluorouridine-3'-phosphate
  modified_base 15: mod_base = OTHER; note = 2'-O-methyluridine-3'-phosphate
  modified_base 16: mod_base = OTHER; note = 2'-fluorocytidine-3'-phosphate
  modified_base 17: mod_base = OTHER; note = 2'-O-methyluridine-3'-phosphate
  modified_base 18: mod_base = OTHER; note = 2'-O-methyluridine-3'-phosphate
  modified_base 19: mod_base = OTHER; note = 2'-O-methylcytidine-3'-phosphate
  modified_base 20: mod_base = OTHER; note = 2'-O-methyladenosine-3'-phosphate
  modified_base 21: mod_base = OTHER; note = 2'-O-methyluridine-3'-phosphorothioate
  modified_base 22: mod_base = OTHER; note = 2'-O-methylcytidine-3'- phosphorothioate
  modified_base 23: mod_base = OTHER; note = 2'-O-methyladenosine-3'-phosphate
tatcagccaaagtttcttcatca

SEQ ID NO: 2058 - RNA, 21 nt, synthetic construct
  misc_feature 1..21: note = Description of Artificial Sequence: Synthetic oligonucleotide
  source 1..21: mol_type = other RNA
  modified_base 1: mod_base = OTHER; note = 2'-O-methyladenosine-3'- phosphorothioate
  modified_base 2: mod_base = OTHER; note = 2'-O-methyladenosine-3'- phosphorothioate
  modified_base 3: mod_base = OTHER; note = 2'-O-methyladenosine-3'-phosphate
  modified_base 4: mod_base = OTHER; note = 2'-O-methylguanosine-3'-phosphate
  modified_base 5: mod_base = OTHER; note = 2'-O-methylguanosine-3'-phosphate
  modified_base 6: mod_base = OTHER; note = 2'-O-methyluridine-3'-phosphate
  modified_base 7: mod_base = OTHER; note = 2'-fluoroguanosine-3'-phosphate
  modified_base 8: mod_base = OTHER; note = 2'-O-methyluridine-3'-phosphate
  modified_base 9: mod_base = OTHER; note = 2'-fluorouridine-3'-phosphate
  modified_base 10: mod_base = OTHER; note = 2'-fluorocytidine-3'-phosphate
  modified_base 11: mod_base = OTHER; note = 2'-fluoroadenosine-3'-phosphate
  modified_base 12: mod_base = OTHER; note = 2'-O-methyladenosine-3'-phosphate
  modified_base 13: mod_base = OTHER; note = 2'-O-methylguanosine-3'-phosphate
  modified_base 14: mod_base = OTHER; note = 2'-O-methyladenosine-3'-phosphate
  modified_base 15: mod_base = OTHER; note = 2'-O-methyluridine-3'-phosphate
  modified_base 16: mod_base = OTHER; note = 2'-O-methylguanosine-3'-phosphate
  modified_base 17: mod_base = OTHER; note = 2'-O-methyluridine-3'-phosphate
  modified_base 18: mod_base = OTHER; note = 2'-O-methylcytidine-3'-phosphate
  modified_base 19: mod_base = OTHER; note = 2'-O-methylcytidine-3'-phosphate
  modified_base 20: mod_base = OTHER; note = 2'-O-methyluridine-3'-phosphate
  modified_base 21: mod_base = OTHER; note = 2'-O-methylcytidine-3'-phosphate attached to N-[tris(N-acetylgalactosamine-alkyl)-amidodecanoyl)]-4-hydr oxyprolinol Hyp-(N-acetylgalactosamine-alkyl)3
aaaggtgttcaagatgtcctc

SEQ ID NO: 2059 - RNA, 23 nt, synthetic construct
  misc_feature 1..23: note = Description of Artificial Sequence: Synthetic oligonucleotide
  source 1..23: mol_type = other RNA
  modified_base 1: mod_base = OTHER; note = 2'-O-methylguanosine-3'- phosphorothioate
  modified_base 2: mod_base = OTHER; note = 2'-fluoroadenosine-3'-phosphorothioate
  modified_base 3: mod_base = OTHER; note = 2'-O-methylguanosine-3'-phosphate
  modified_base 4: mod_base = OTHER; note = 2'-O-methylguanosine-3'-phosphate
  modified_base 5: mod_base = OTHER; note = 2'-O-methyladenosine-3'-phosphate
  modified_base 6: mod_base = OTHER; note = 2'-fluorocytidine-3'-phosphate
  modified_base 7: mod_base = OTHER; note = 2'-O-methyladenosine-3'-phosphate
  modified_base 8: mod_base = OTHER; note = 2'-fluorouridine-3'-phosphate
  modified_base 9: mod_base = OTHER; note = 2'-fluorocytidine-3'-phosphate
  modified_base 10: mod_base = OTHER; note = 2'-O-methyluridine-3'-phosphate
  modified_base 11: mod_base = OTHER; note = 2'-O-methyluridine-3'-phosphate
  modified_base 12: mod_base = OTHER; note = 2'-O-methylguanosine-3'-phosphate
  modified_base 13: mod_base = OTHER; note = 2'-O-methyladenosine-3'-phosphate
  modified_base 14: mod_base = OTHER; note = 2'-fluoroadenosine-3'-phosphate
  modified_base 15: mod_base = OTHER; note = 2'-O-methylcytidine-3'-phosphate
  modified_base 16: mod_base = OTHER; note = 2'-fluoroadenosine-3'-phosphate
  modified_base 17: mod_base = OTHER; note = 2'-O-methylcytidine-3'-phosphate
  modified_base 18: mod_base = OTHER; note = 2'-O-methylcytidine-3'-phosphate
  modified_base 19: mod_base = OTHER; note = 2'-O-methyluridine-3'-phosphate
  modified_base 20: mod_base = OTHER; note = 2'-O-methyluridine-3'-phosphate
  modified_base 21: mod_base = OTHER; note = 2'-O-methyluridine-3'-phosphorothioate
  modified_base 22: mod_base = OTHER; note = 2'-O-methylcytidine-3'- phosphorothioate
  modified_base 23: mod_base = OTHER; note = 2'-O-methyluridine-3'-phosphate
gaggacatcttgaacacctttct

SEQ ID NO: 2060 - RNA, 21 nt, synthetic construct
  misc_feature 1..21: note = Description of Artificial Sequence: Synthetic oligonucleotide
  source 1..21: mol_type = other RNA
  modified_base 1: mod_base = OTHER; note = 2'-O-methyladenosine-3'- phosphorothioate
  modified_base 2: mod_base = OTHER; note = 2'-O-methyladenosine-3'- phosphorothioate
  modified_base 3: mod_base = OTHER; note = 2'-O-methylguanosine-3'-phosphate
  modified_base 4: mod_base = OTHER; note = 2'-O-methylguanosine-3'-phosphate
  modified_base 5: mod_base = OTHER; note = 2'-O-methyluridine-3'-phosphate
  modified_base 6: mod_base = OTHER; note = 2'-O-methylguanosine-3'-phosphate
  modified_base 7: mod_base = OTHER; note = 2'-fluorouridine-3'-phosphate
  modified_base 8: mod_base = OTHER; note = 2'-O-methyluridine-3'-phosphate
  modified_base 9: mod_base = OTHER; note = 2'-fluorocytidine-3'-phosphate
  modified_base 10: mod_base = OTHER; note = 2'-fluoroadenosine-3'-phosphate
  modified_base 11: mod_base = OTHER; note = 2'-fluoroadenosine-3'-phosphate
  modified_base 12: mod_base = OTHER; note = 2'-O-methylguanosine-3'-phosphate
  modified_base 13: mod_base = OTHER; note = 2'-O-methyladenosine-3'-phosphate
  modified_base 14: mod_base = OTHER; note = 2'-O-methyluridine-3'-phosphate
  modified_base 15: mod_base = OTHER; note = 2'-O-methylguanosine-3'-phosphate
  modified_base 16: mod_base = OTHER; note = 2'-O-methyluridine-3'-phosphate
  modified_base 17: mod_base = OTHER; note = 2'-O-methylcytidine-3'-phosphate
  modified_base 18: mod_base = OTHER; note = 2'-O-methylcytidine-3'-phosphate
  modified_base 19: mod_base = OTHER; note = 2'-O-methyluridine-3'-phosphate
  modified_base 20: mod_base = OTHER; note = 2'-O-methylcytidine-3'-phosphate
  modified_base 21: mod_base = OTHER; note = 2'-O-methylguanosine-3'-phosphate attached to N-[tris(N-acetylgalactosamine-alkyl)-amidodecanoyl)]-4-hydr oxyprolinol Hyp-(N-acetylgalactosamine-alkyl)3
aaggtgttcaagatgtcctcg

SEQ ID NO: 2061 - RNA, 23 nt, synthetic construct
  misc_feature 1..23: note = Description of Artificial Sequence: Synthetic oligonucleotide
  source 1..23: mol_type = other RNA
  modified_base 1: mod_base = OTHER; note = 2'-O-methylcytidine-3'- phosphorothioate
  modified_base 2: mod_base = OTHER; note = 2'-fluoroguanosine-3'-phosphorothioate
  modified_base 3: mod_base = OTHER; note = 2'-O-methyladenosine-3'-phosphate
  modified_base 4: mod_base = OTHER; note = 2'-O-methylguanosine-3'-phosphate
  modified_base 5: mod_base = OTHER; note = 2'-O-methylguanosine-3'-phosphate
  modified_base 6: mod_base = OTHER; note = 2'-fluoroadenosine-3'-phosphate
  modified_base 7: mod_base = OTHER; note = 2'-O-methylcytidine-3'-phosphate
  modified_base 8: mod_base = OTHER; note = 2'-fluoroadenosine-3'-phosphate
  modified_base 9: mod_base = OTHER; note = 2'-fluorouridine-3'-phosphate
  modified_base 10: mod_base = OTHER; note = 2'-O-methylcytidine-3'-phosphate
  modified_base 11: mod_base = OTHER; note = 2'-O-methyluridine-3'-phosphate
  modified_base 12: mod_base = OTHER; note = 2'-O-methyluridine-3'-phosphate
  modified_base 13: mod_base = OTHER; note = 2'-O-methylguanosine-3'-phosphate
  modified_base 14: mod_base = OTHER; note = 2'-fluoroadenosine-3'-phosphate
  modified_base 15: mod_base = OTHER; note = 2'-O-methyladenosine-3'-phosphate
  modified_base 16: mod_base = OTHER; note = 2'-fluorocytidine-3'-phosphate
  modified_base 17: mod_base = OTHER; note = 2'-O-methyladenosine-3'-phosphate
  modified_base 18: mod_base = OTHER; note = 2'-O-methylcytidine-3'-phosphate
  modified_base 19: mod_base = OTHER; note = 2'-O-methylcytidine-3'-phosphate
  modified_base 20: mod_base = OTHER; note = 2'-O-methyluridine-3'-phosphate
  modified_base 21: mod_base = OTHER; note = 2'-O-methyluridine-3'-phosphorothioate
  modified_base 22: mod_base = OTHER; note = 2'-O-methyluridine-3'-phosphorothioate
  modified_base 23: mod_base = OTHER; note = 2'-O-methylcytidine-3'-phosphate
cgaggacatcttgaacacctttc

SEQ ID NO: 2062 - RNA, 21 nt, synthetic construct
  misc_feature 1..21: note = Description of Artificial Sequence: Synthetic oligonucleotide
  source 1..21: mol_type = other RNA
  modified_base 1: mod_base = OTHER; note = 2'-O-methylguanosine-3'- phosphorothioate
  modified_base 2: mod_base = OTHER; note = 2'-O-methylguanosine-3'- phosphorothioate
  modified_base 3: mod_base = OTHER; note = 2'-O-methyladenosine-3'-phosphate
  modified_base 4: mod_base = OTHER; note = 2'-O-methylguanosine-3'-phosphate
  modified_base 5: mod_base = OTHER; note = 2'-O-methyladenosine-3'-phosphate
  modified_base 6: mod_base = OTHER; note = 2'-O-methyladenosine-3'-phosphate
  modified_base 7: mod_base = OTHER; note = 2'-fluoroadenosine-3'-phosphate
  modified_base 8: mod_base = OTHER; note = 2'-O-methylguanosine-3'-phosphate
  modified_base 9: mod_base = OTHER; note = 2'-fluoroguanosine-3'-phosphate
  modified_base 10: mod_base = OTHER; note = 2'-fluorouridine-3'-phosphate
  modified_base 11: mod_base = OTHER; note = 2'-fluoroguanosine-3'-phosphate
  modified_base 12: mod_base = OTHER; note = 2'-O-methyluridine-3'-phosphate
  modified_base 13: mod_base = OTHER; note = 2'-O-methyluridine-3'-phosphate
  modified_base 14: mod_base = OTHER; note = 2'-O-methylcytidine-3'-phosphate
  modified_base 15: mod_base = OTHER; note = 2'-O-methyladenosine-3'-phosphate
  modified_base 16: mod_base = OTHER; note = 2'-O-methyladenosine-3'-phosphate
  modified_base 17: mod_base = OTHER; note = 2'-O-methylguanosine-3'-phosphate
  modified_base 18: mod_base = OTHER; note = 2'-O-methyladenosine-3'-phosphate
  modified_base 19: mod_base = OTHER; note = 2'-O-methyluridine-3'-phosphate
  modified_base 20: mod_base = OTHER; note = 2'-O-methylguanosine-3'-phosphate
  modified_base 21: mod_base = OTHER; note = 2'-O-methyluridine-3'-phosphate attached to N-[tris(N-acetylgalactosamine-alkyl)-amidodecanoyl)]-4-hydr oxyprolinol Hyp-(N-acetylgalactosamine-alkyl)3
ggagaaaggtgttcaagatgt

SEQ ID NO: 2063 - RNA, 23 nt, synthetic construct
  misc_feature 1..23: note = Description of Artificial Sequence: Synthetic oligonucleotide
  source 1..23: mol_type = other RNA
  modified_base 1: mod_base = OTHER; note = 2'-O-methyladenosine-3'- phosphorothioate
  modified_base 2: mod_base = OTHER; note = 2'-fluorocytidine-3'-phosphorothioate
  modified_base 3: mod_base = OTHER; note = 2'-O-methyladenosine-3'-phosphate
  modified_base 4: mod_base = OTHER; note = 2'-O-methyluridine-3'-phosphate
  modified_base 5: mod_base = OTHER; note = 2'-O-methylcytidine-3'-phosphate
  modified_base 6: mod_base = OTHER; note = 2'-fluorouridine-3'-phosphate
  modified_base 7: mod_base = OTHER; note = 2'-O-methyluridine-3'-phosphate
  modified_base 8: mod_base = OTHER; note = 2'-fluoroguanosine-3'-phosphate
  modified_base 9: mod_base = OTHER; note = 2'-fluoroadenosine-3'-phosphate
  modified_base 10: mod_base = OTHER; note = 2'-O-methyladenosine-3'-phosphate
  modified_base 11: mod_base = OTHER; note = 2'-O-methylcytidine-3'-phosphate
  modified_base 12: mod_base = OTHER; note = 2'-O-methyladenosine-3'-phosphate
  modified_base 13: mod_base = OTHER; note = 2'-O-methylcytidine-3'-phosphate
  modified_base 14: mod_base = OTHER; note = 2'-fluorocytidine-3'-phosphate
  modified_base 15: mod_base = OTHER; note = 2'-O-methyluridine-3'-phosphate
  modified_base 16: mod_base = OTHER; note = 2'-fluorouridine-3'-phosphate
  modified_base 17: mod_base = OTHER; note = 2'-O-methyluridine-3'-phosphate
  modified_base 18: mod_base = OTHER; note = 2'-O-methylcytidine-3'-phosphate
  modified_base 19: mod_base = OTHER; note = 2'-O-methyluridine-3'-phosphate
  modified_base 20: mod_base = OTHER; note = 2'-O-methylcytidine-3'-phosphate
  modified_base 21: mod_base = OTHER; note = 2'-O-methylcytidine-3'- phosphorothioate
  modified_base 22: mod_base = OTHER; note = 2'-O-methylcytidine-3'- phosphorothioate
  modified_base 23: mod_base = OTHER; note = 2'-O-methylcytidine-3'-phosphate
acatcttgaacacctttctcccc

SEQ ID NO: 2064 - RNA, 21 nt, synthetic construct
  misc_feature 1..21: note = Description of Artificial Sequence: Synthetic oligonucleotide
  source 1..21: mol_type = other RNA
  modified_base 1: mod_base = OTHER; note = 2'-O-methylguanosine-3'- phosphorothioate
  modified_base 2: mod_base = OTHER; note = 2'-O-methylguanosine-3'- phosphorothioate
  modified_base 3: mod_base = OTHER; note = 2'-O-methylguanosine-3'-phosphate
  modified_base 4: mod_base = OTHER; note = 2'-O-methyladenosine-3'-phosphate
  modified_base 5: mod_base = OTHER; note = 2'-O-methylguanosine-3'-phosphate
  modified_base 6: mod_base = OTHER; note = 2'-O-methyladenosine-3'-phosphate
  modified_base 7: mod_base = OTHER; note = 2'-fluoroadenosine-3'-phosphate
  modified_base 8: mod_base = OTHER; note = 2'-O-methyladenosine-3'-phosphate
  modified_base 9: mod_base = OTHER; note = 2'-fluoroguanosine-3'-phosphate
  modified_base 10: mod_base = OTHER; note = 2'-fluoroguanosine-3'-phosphate
  modified_base 11: mod_base = OTHER; note = 2'-fluorouridine-3'-phosphate
  modified_base 12: mod_base = OTHER; note = 2'-O-methylguanosine-3'-phosphate
  modified_base 13: mod_base = OTHER; note = 2'-O-methyluridine-3'-phosphate
  modified_base 14: mod_base = OTHER; note = 2'-O-methyluridine-3'-phosphate
  modified_base 15: mod_base = OTHER; note = 2'-O-methylcytidine-3'-phosphate
  modified_base 16: mod_base = OTHER; note = 2'-O-methyladenosine-3'-phosphate
  modified_base 17: mod_base = OTHER; note = 2'-O-methyladenosine-3'-phosphate
  modified_base 18: mod_base = OTHER; note = 2'-O-methylguanosine-3'-phosphate
  modified_base 19: mod_base = OTHER; note = 2'-O-methyladenosine-3'-phosphate
  modified_base 20: mod_base = OTHER; note = 2'-O-methyluridine-3'-phosphate
  modified_base 21: mod_base = OTHER; note = 2'-O-methylguanosine-3'-phosphate attached to N-[tris(N-acetylgalactosamine-alkyl)-amidodecanoyl)]-4-hydr oxyprolinol Hyp-(N-acetylgalactosamine-alkyl)3
gggagaaaggtgttcaagatg

SEQ ID NO: 2065 - RNA, 23 nt, synthetic construct
  misc_feature 1..23: note = Description of Artificial Sequence: Synthetic oligonucleotide
  source 1..23: mol_type = other RNA
  modified_base 1: mod_base = OTHER; note = 2'-O-methylcytidine-3'- phosphorothioate
  modified_base 2: mod_base = OTHER; note = 2'-fluoroadenosine-3'-phosphorothioate
  modified_base 3: mod_base = OTHER; note = 2'-O-methyluridine-3'-phosphate
  modified_base 4: mod_base = OTHER; note = 2'-O-methylcytidine-3'-phosphate
  modified_base 5: mod_base = OTHER; note = 2'-O-methyluridine-3'-phosphate
  modified_base 6: mod_base = OTHER; note = 2'-fluorouridine-3'-phosphate
  modified_base 7: mod_base = OTHER; note = 2'-O-methylguanosine-3'-phosphate
  modified_base 8: mod_base = OTHER; note = 2'-fluoroadenosine-3'-phosphate
  modified_base 9: mod_base = OTHER; note = 2'-fluoroadenosine-3'-phosphate
  modified_base 10: mod_base = OTHER; note = 2'-O-methylcytidine-3'-phosphate
  modified_base 11: mod_base = OTHER; note = 2'-O-methyladenosine-3'-phosphate
  modified_base 12: mod_base = OTHER; note = 2'-O-methylcytidine-3'-phosphate
  modified_base 13: mod_base = OTHER; note = 2'-O-methylcytidine-3'-phosphate
  modified_base 14: mod_base = OTHER; note = 2'-fluorouridine-3'-phosphate
  modified_base 15: mod_base = OTHER; note = 2'-O-methyluridine-3'-phosphate
  modified_base 16: mod_base = OTHER; note = 2'-fluorouridine-3'-phosphate
  modified_base 17: mod_base = OTHER; note = 2'-O-methylcytidine-3'-phosphate
  modified_base 18: mod_base = OTHER; note = 2'-O-methyluridine-3'-phosphate
  modified_base 19: mod_base = OTHER; note = 2'-O-methylcytidine-3'-phosphate
  modified_base 20: mod_base = OTHER; note = 2'-O-methylcytidine-3'-phosphate
  modified_base 21: mod_base = OTHER; note = 2'-O-methylcytidine-3'- phosphorothioate
  modified_base 22: mod_base = OTHER; note = 2'-O-methylcytidine-3'- phosphorothioate
  modified_base 23: mod_base = OTHER; note = 2'-O-methylcytidine-3'-phosphate
catcttgaacacctttctccccc

SEQ ID NO: 2066 - RNA, 21 nt, synthetic construct
  misc_feature 1..21: note = Description of Artificial Sequence: Synthetic oligonucleotide
  source 1..21: mol_type = other RNA
  modified_base 1: mod_base = OTHER; note = 2'-O-methyladenosine-3'- phosphorothioate
  modified_base 2: mod_base = OTHER; note = 2'-O-methyladenosine-3'- phosphorothioate
  modified_base 3: mod_base = OTHER; note = 2'-O-methyladenosine-3'-phosphate
  modified_base 4: mod_base = OTHER; note = 2'-O-methyluridine-3'-phosphate
  modified_base 5: mod_base = OTHER; note = 2'-O-methylcytidine-3'-phosphate
  modified_base 6: mod_base = OTHER; note = 2'-O-methyladenosine-3'-phosphate
  modified_base 7: mod_base = OTHER; note = 2'-fluoroguanosine-3'-phosphate
  modified_base 8: mod_base = OTHER; note = 2'-O-methyluridine-3'-phosphate
  modified_base 9: mod_base = OTHER; note = 2'-fluoroadenosine-3'-phosphate
  modified_base 10: mod_base = OTHER; note = 2'-fluorocytidine-3'-phosphate
  modified_base 11: mod_base = OTHER; note = 2'-fluorouridine-3'-phosphate
  modified_base 12: mod_base = OTHER; note = 2'-O-methyluridine-3'-phosphate
  modified_base 13: mod_base = OTHER; note = 2'-O-methylcytidine-3'-phosphate
  modified_base 14: mod_base = OTHER; note = 2'-O-methylcytidine-3'-phosphate
  modified_base 15: mod_base = OTHER; note = 2'-O-methyladenosine-3'-phosphate
  modified_base 16: mod_base = OTHER; note = 2'-O-methyladenosine-3'-phosphate
  modified_base 17: mod_base = OTHER; note = 2'-O-methyladenosine-3'-phosphate
  modified_base 18: mod_base = OTHER; note = 2'-O-methylguanosine-3'-phosphate
  modified_base 19: mod_base = OTHER; note = 2'-O-methyluridine-3'-phosphate
  modified_base 20: mod_base = OTHER; note = 2'-O-methylcytidine-3'-phosphate
  modified_base 21: mod_base = OTHER; note = 2'-O-methyluridine-3'-phosphate attached to N-[tris(N-acetylgalactosamine-alkyl)-amidodecanoyl)]-4-hydr oxyprolinol Hyp-(N-acetylgalactosamine-alkyl)3
aaatcagtacttccaaagtct

SEQ ID NO: 2067 - RNA, 23 nt, synthetic construct
  misc_feature 1..23: note = Description of Artificial Sequence: Synthetic oligonucleotide
  source 1..23: mol_type = other RNA
  modified_base 1: mod_base = OTHER; note = 2'-O-methyladenosine-3'- phosphorothioate
  modified_base 2: mod_base = OTHER; note = 2'-fluoroguanosine-3'-phosphorothioate
  modified_base 3: mod_base = OTHER; note = 2'-O-methyladenosine-3'-phosphate
  modified_base 4: mod_base = OTHER; note = 2'-O-methylcytidine-3'-phosphate
  modified_base 5: mod_base = OTHER; note = 2'-O-methyluridine-3'-phosphate
  modified_base 6: mod_base = OTHER; note = 2'-fluorouridine-3'-phosphate
  modified_base 7: mod_base = OTHER; note = 2'-O-methyluridine-3'-phosphate
  modified_base 8: mod_base = OTHER; note = 2'-fluoroguanosine-3'-phosphate
  modified_base 9: mod_base = OTHER; note = 2'-fluoroguanosine-3'-phosphate
  modified_base 10: mod_base = OTHER; note = 2'-O-methyladenosine-3'-phosphate
  modified_base 11: mod_base = OTHER; note = 2'-O-methyladenosine-3'-phosphate
  modified_base 12: mod_base = OTHER; note = 2'-O-methylguanosine-3'-phosphate
  modified_base 13: mod_base = OTHER; note = 2'-O-methyluridine-3'-phosphate
  modified_base 14: mod_base = OTHER; note = 2'-fluoroadenosine-3'-phosphate
  modified_base 15: mod_base = OTHER; note = 2'-O-methylcytidine-3'-phosphate
  modified_base 16: mod_base = OTHER; note = 2'-fluorouridine-3'-phosphate
  modified_base 17: mod_base = OTHER; note = 2'-O-methylguanosine-3'-phosphate
  modified_base 18: mod_base = OTHER; note = 2'-O-methyladenosine-3'-phosphate
  modified_base 19: mod_base = OTHER; note = 2'-O-methyluridine-3'-phosphate
  modified_base 20: mod_base = OTHER; note = 2'-O-methyluridine-3'-phosphate
  modified_base 21: mod_base = OTHER; note = 2'-O-methyluridine-3'-phosphorothioate
  modified_base 22: mod_base = OTHER; note = 2'-O-methyladenosine-3'- phosphorothioate
  modified_base 23: mod_base = OTHER; note = 2'-O-methylguanosine-3'-phosphate
agactttggaagtactgatttag

SEQ ID NO: 2068 - RNA, 21 nt, synthetic construct
  misc_feature 1..21: note = Description of Artificial Sequence: Synthetic oligonucleotide
  source 1..21: mol_type = other RNA
  modified_base 1: mod_base = OTHER; note = 2'-O-methyladenosine-3'- phosphorothioate
  modified_base 2: mod_base = OTHER; note = 2'-O-methyladenosine-3'- phosphorothioate
  modified_base 3: mod_base = OTHER; note = 2'-O-methyluridine-3'-phosphate
  modified_base 4: mod_base = OTHER; note = 2'-O-methylcytidine-3'-phosphate
  modified_base 5: mod_base = OTHER; note = 2'-O-methyladenosine-3'-phosphate
  modified_base 6: mod_base = OTHER; note = 2'-O-methylguanosine-3'-phosphate
  modified_base 7: mod_base = OTHER; note = 2'-fluorouridine-3'-phosphate
  modified_base 8: mod_base = OTHER; note = 2'-O-methyladenosine-3'-phosphate
  modified_base 9: mod_base = OTHER; note = 2'-fluorocytidine-3'-phosphate
  modified_base 10: mod_base = OTHER; note = 2'-fluorouridine-3'-phosphate
  modified_base 11: mod_base = OTHER; note = 2'-fluorouridine-3'-phosphate
  modified_base 12: mod_base = OTHER; note = 2'-O-methylcytidine-3'-phosphate
  modified_base 13: mod_base = OTHER; note = 2'-O-methylcytidine-3'-phosphate
  modified_base 14: mod_base = OTHER; note = 2'-O-methyladenosine-3'-phosphate
  modified_base 15: mod_base = OTHER; note = 2'-O-methyladenosine-3'-phosphate
  modified_base 16: mod_base = OTHER; note = 2'-O-methyladenosine-3'-phosphate
  modified_base 17: mod_base = OTHER; note = 2'-O-methylguanosine-3'-phosphate
  modified_base 18: mod_base = OTHER; note = 2'-O-methyluridine-3'-phosphate
  modified_base 19: mod_base = OTHER; note = 2'-O-methylcytidine-3'-phosphate
  modified_base 20: mod_base = OTHER; note = 2'-O-methyluridine-3'-phosphate
  modified_base 21: mod_base = OTHER; note = 2'-O-methyladenosine-3'-phosphate attached to N-[tris(N-acetylgalactosamine-alkyl)-amidodecanoyl)]-4-hydr oxyprolinol Hyp-(N-acetylgalactosamine-alkyl)3
aatcagtacttccaaagtcta

SEQ ID NO: 2069 - RNA, 23 nt, synthetic construct
  misc_feature 1..23: note = Description of Artificial Sequence: Synthetic oligonucleotide
  source 1..23: mol_type = other RNA
  modified_base 1: mod_base = OTHER; note = 2'-O-methyluridine-3'-phosphorothioate
  modified_base 2: mod_base = OTHER; note = 2'-fluoroadenosine-3'-phosphorothioate
  modified_base 3: mod_base = OTHER; note = 2'-O-methylguanosine-3'-phosphate
  modified_base 4: mod_base = OTHER; note = 2'-O-methyladenosine-3'-phosphate
  modified_base 5: mod_base = OTHER; note = 2'-O-methylcytidine-3'-phosphate
  modified_base 6: mod_base = OTHER; note = 2'-fluorouridine-3'-phosphate
  modified_base 7: mod_base = OTHER; note = 2'-O-methyluridine-3'-phosphate
  modified_base 8: mod_base = OTHER; note = 2'-fluorouridine-3'-phosphate
  modified_base 9: mod_base = OTHER; note = 2'-fluoroguanosine-3'-phosphate
  modified_base 10: mod_base = OTHER; note = 2'-O-methylguanosine-3'-phosphate
  modified_base 11: mod_base = OTHER; note = 2'-O-methyladenosine-3'-phosphate
  modified_base 12: mod_base = OTHER; note = 2'-O-methyladenosine-3'-phosphate
  modified_base 13: mod_base = OTHER; note = 2'-O-methylguanosine-3'-phosphate
  modified_base 14: mod_base = OTHER; note = 2'-fluorouridine-3'-phosphate
  modified_base 15: mod_base = OTHER; note = 2'-O-methyladenosine-3'-phosphate
  modified_base 16: mod_base = OTHER; note = 2'-fluorocytidine-3'-phosphate
  modified_base 17: mod_base = OTHER; note = 2'-O-methyluridine-3'-phosphate
  modified_base 18: mod_base = OTHER; note = 2'-O-methylguanosine-3'-phosphate
  modified_base 19: mod_base = OTHER; note = 2'-O-methyladenosine-3'-phosphate
  modified_base 20: mod_base = OTHER; note = 2'-O-methyluridine-3'-phosphate
  modified_base 21: mod_base = OTHER; note = 2'-O-methyluridine-3'-phosphorothioate
  modified_base 22: mod_base = OTHER; note = 2'-O-methyluridine-3'-phosphorothioate
  modified_base 23: mod_base = OTHER; note = 2'-O-methyladenosine-3'-phosphate
tagactttggaagtactgattta

SEQ ID NO: 2070 - RNA, 21 nt, synthetic construct
  misc_feature 1..21: note = Description of Artificial Sequence: Synthetic oligonucleotide
  source 1..21: mol_type = other RNA
  modified_base 1: mod_base = OTHER; note = 2'-O-methyluridine-3'-phosphorothioate
  modified_base 2: mod_base = OTHER; note = 2'-O-methylguanosine-3'- phosphorothioate
  modified_base 3: mod_base = OTHER; note = 2'-O-methylcytidine-3'-phosphate
  modified_base 4: mod_base = OTHER; note = 2'-O-methyluridine-3'-phosphate
  modified_base 5: mod_base = OTHER; note = 2'-O-methyladenosine-3'-phosphate
  modified_base 6: mod_base = OTHER; note = 2'-O-methyladenosine-3'-phosphate
  modified_base 7: mod_base = OTHER; note = 2'-fluoroadenosine-3'-phosphate
  modified_base 8: mod_base = OTHER; note = 2'-O-methyluridine-3'-phosphate
  modified_base 9: mod_base = OTHER; note = 2'-fluorocytidine-3'-phosphate
  modified_base 10: mod_base = OTHER; note = 2'-fluoroadenosine-3'-phosphate
  modified_base 11: mod_base = OTHER; note = 2'-fluoroguanosine-3'-phosphate
  modified_base 12: mod_base = OTHER; note = 2'-O-methyluridine-3'-phosphate
  modified_base 13: mod_base = OTHER; note = 2'-O-methyladenosine-3'-phosphate
  modified_base 14: mod_base = OTHER; note = 2'-O-methylcytidine-3'-phosphate
  modified_base 15: mod_base = OTHER; note = 2'-O-methyluridine-3'-phosphate
  modified_base 16: mod_base = OTHER; note = 2'-O-methyluridine-3'-phosphate
  modified_base 17: mod_base = OTHER; note = 2'-O-methylcytidine-3'-phosphate
  modified_base 18: mod_base = OTHER; note = 2'-O-methylcytidine-3'-phosphate
  modified_base 19: mod_base = OTHER; note = 2'-O-methyladenosine-3'-phosphate
  modified_base 20: mod_base = OTHER; note = 2'-O-methyladenosine-3'-phosphate
  modified_base 21: mod_base = OTHER; note = 2'-O-methyladenosine-3'-phosphate attached to N-[tris(N-acetylgalactosamine-alkyl)-amidodecanoyl)]-4-hydr oxyprolinol Hyp-(N-acetylgalactosamine-alkyl)3
tgctaaatcagtacttccaaa

SEQ ID NO: 2071 - RNA, 23 nt, synthetic construct
  misc_feature 1..23: note = Description of Artificial Sequence: Synthetic oligonucleotide
  source 1..23: mol_type = other RNA
  modified_base 1: mod_base = OTHER; note = 2'-O-methyluridine-3'-phosphorothioate
  modified_base 2: mod_base = OTHER; note = 2'-fluorouridine -3'-phosphorothioate
  modified_base 3: mod_base = OTHER; note = 2'-O-methyluridine-3'-phosphate
  modified_base 4: mod_base = OTHER; note = 2'-O-methylguanosine-3'-phosphate
  modified_base 5: mod_base = OTHER; note = 2'-O-methylguanosine-3'-phosphate
  modified_base 6: mod_base = OTHER; note = 2'-fluoroadenosine-3'-phosphate
  modified_base 7: mod_base = OTHER; note = 2'-O-methyladenosine-3'-phosphate
  modified_base 8: mod_base = OTHER; note = 2'-fluoroguanosine-3'-phosphate
  modified_base 9: mod_base = OTHER; note = 2'-fluorouridine-3'-phosphate
  modified_base 10: mod_base = OTHER; note = 2'-O-methyladenosine-3'-phosphate
  modified_base 11: mod_base = OTHER; note = 2'-O-methylcytidine-3'-phosphate
  modified_base 12: mod_base = OTHER; note = 2'-O-methyluridine-3'-phosphate
  modified_base 13: mod_base = OTHER; note = 2'-O-methylguanosine-3'-phosphate
  modified_base 14: mod_base = OTHER; note = 2'-fluoroadenosine-3'-phosphate
  modified_base 15: mod_base = OTHER; note = 2'-O-methyluridine-3'-phosphate
  modified_base 16: mod_base = OTHER; note = 2'-fluorouridine-3'-phosphate
  modified_base 17: mod_base = OTHER; note = 2'-O-methyluridine-3'-phosphate
  modified_base 18: mod_base = OTHER; note = 2'-O-methyladenosine-3'-phosphate
  modified_base 19: mod_base = OTHER; note = 2'-O-methylguanosine-3'-phosphate
  modified_base 20: mod_base = OTHER; note = 2'-O-methylcytidine-3'-phosphate
  modified_base 21: mod_base = OTHER; note = 2'-O-methyladenosine-3'- phosphorothioate
  modified_base 22: mod_base = OTHER; note = 2'-O-methyluridine-3'-phosphorothioate
  modified_base 23: mod_base = OTHER; note = 2'-O-methylguanosine-3'-phosphate
tttggaagtactgatttagcatg

SEQ ID NO: 2072 - RNA, 21 nt, synthetic construct
  misc_feature 1..21: note = Description of Artificial Sequence: Synthetic oligonucleotide
  source 1..21: mol_type = other RNA
  modified_base 1: mod_base = OTHER; note = 2'-O-methyladenosine-3'- phosphorothioate
  modified_base 2: mod_base = OTHER; note = 2'-O-methyluridine-3'-phosphorothioate
  modified_base 3: mod_base = OTHER; note = 2'-O-methylguanosine-3'-phosphate
  modified_base 4: mod_base = OTHER; note = 2'-O-methylcytidine-3'-phosphate
  modified_base 5: mod_base = OTHER; note = 2'-O-methyluridine-3'-phosphate
  modified_base 6: mod_base = OTHER; note = 2'-O-methyladenosine-3'-phosphate
  modified_base 7: mod_base = OTHER; note = 2'-fluoroadenosine-3'-phosphate
  modified_base 8: mod_base = OTHER; note = 2'-O-methyladenosine-3'-phosphate
  modified_base 9: mod_base = OTHER; note = 2'-fluorouridine-3'-phosphate
  modified_base 10: mod_base = OTHER; note = 2'-fluorocytidine-3'-phosphate
  modified_base 11: mod_base = OTHER; note = 2'-fluoroadenosine-3'-phosphate
  modified_base 12: mod_base = OTHER; note = 2'-O-methylguanosine-3'-phosphate
  modified_base 13: mod_base = OTHER; note = 2'-O-methyluridine-3'-phosphate
  modified_base 14: mod_base = OTHER; note = 2'-O-methyladenosine-3'-phosphate
  modified_base 15: mod_base = OTHER; note = 2'-O-methylcytidine-3'-phosphate
  modified_base 16: mod_base = OTHER; note = 2'-O-methyluridine-3'-phosphate
  modified_base 17: mod_base = OTHER; note = 2'-O-methyluridine-3'-phosphate
  modified_base 18: mod_base = OTHER; note = 2'-O-methylcytidine-3'-phosphate
  modified_base 19: mod_base = OTHER; note = 2'-O-methylcytidine-3'-phosphate
  modified_base 20: mod_base = OTHER; note = 2'-O-methyladenosine-3'-phosphate
  modified_base 21: mod_base = OTHER; note = 2'-O-methyladenosine-3'-phosphate attached to N-[tris(N-acetylgalactosamine-alkyl)-amidodecanoyl)]-4-hydr oxyprolinol Hyp-(N-acetylgalactosamine-alkyl)3
atgctaaatcagtacttccaa

SEQ ID NO: 2073 - RNA, 23 nt, synthetic construct
  misc_feature 1..23: note = Description of Artificial Sequence: Synthetic oligonucleotide
  source 1..23: mol_type = other RNA
  modified_base 1: mod_base = OTHER; note = 2'-O-methyluridine-3'-phosphorothioate
  modified_base 2: mod_base = OTHER; note = 2'-fluorouridine -3'-phosphorothioate
  modified_base 3: mod_base = OTHER; note = 2'-O-methylguanosine-3'-phosphate
  modified_base 4: mod_base = OTHER; note = 2'-O-methylguanosine-3'-phosphate
  modified_base 5: mod_base = OTHER; note = 2'-O-methyladenosine-3'-phosphate
  modified_base 6: mod_base = OTHER; note = 2'-fluoroadenosine-3'-phosphate
  modified_base 7: mod_base = OTHER; note = 2'-O-methylguanosine-3'-phosphate
  modified_base 8: mod_base = OTHER; note = 2'-fluorouridine-3'-phosphate
  modified_base 9: mod_base = OTHER; note = 2'-fluoroadenosine-3'-phosphate
  modified_base 10: mod_base = OTHER; note = 2'-O-methylcytidine-3'-phosphate
  modified_base 11: mod_base = OTHER; note = 2'-O-methyluridine-3'-phosphate
  modified_base 12: mod_base = OTHER; note = 2'-O-methylguanosine-3'-phosphate
  modified_base 13: mod_base = OTHER; note = 2'-O-methyladenosine-3'-phosphate
  modified_base 14: mod_base = OTHER; note = 2'-fluorouridine-3'-phosphate
  modified_base 15: mod_base = OTHER; note = 2'-O-methyluridine-3'-phosphate
  modified_base 16: mod_base = OTHER; note = 2'-fluorouridine-3'-phosphate
  modified_base 17: mod_base = OTHER; note = 2'-O-methyladenosine-3'-phosphate
  modified_base 18: mod_base = OTHER; note = 2'-O-methylguanosine-3'-phosphate
  modified_base 19: mod_base = OTHER; note = 2'-O-methylcytidine-3'-phosphate
  modified_base 20: mod_base = OTHER; note = 2'-O-methyladenosine-3'-phosphate
  modified_base 21: mod_base = OTHER; note = 2'-O-methyluridine-3'-phosphorothioate
  modified_base 22: mod_base = OTHER; note = 2'-O-methylguanosine-3'- phosphorothioate
  modified_base 23: mod_base = OTHER; note = 2'-O-methyluridine-3'-phosphate
ttggaagtactgatttagcatgt

SEQ ID NO: 2074 - RNA, 21 nt, synthetic construct
  misc_feature 1..21: note = Description of Artificial Sequence: Synthetic oligonucleotide
  source 1..21: mol_type = other RNA
  modified_base 1: mod_base = OTHER; note = 2'-O-methyladenosine-3'- phosphorothioate
  modified_base 2: mod_base = OTHER; note = 2'-O-methylcytidine-3'- phosphorothioate
  modified_base 3: mod_base = OTHER; note = 2'-O-methyladenosine-3'-phosphate
  modified_base 4: mod_base = OTHER; note = 2'-O-methyluridine-3'-phosphate
  modified_base 5: mod_base = OTHER; note = 2'-O-methylcytidine-3'-phosphate
  modified_base 6: mod_base = OTHER; note = 2'-O-methyluridine-3'-phosphate
  modified_base 7: mod_base = OTHER; note = 2'-fluorouridine-3'-phosphate
  modified_base 8: mod_base = OTHER; note = 2'-O-methyluridine-3'-phosphate
  modified_base 9: mod_base = OTHER; note = 2'-fluoroadenosine-3'-phosphate
  modified_base 10: mod_base = OTHER; note = 2'-fluoroguanosine-3'-phosphate
  modified_base 11: mod_base = OTHER; note = 2'-fluorouridine-3'-phosphate
  modified_base 12: mod_base = OTHER; note = 2'-O-methylguanosine-3'-phosphate
  modified_base 13: mod_base = OTHER; note = 2'-O-methyluridine-3'-phosphate
  modified_base 14: mod_base = OTHER; note = 2'-O-methylcytidine-3'-phosphate
  modified_base 15: mod_base = OTHER; note = 2'-O-methyluridine-3'-phosphate
  modified_base 16: mod_base = OTHER; note = 2'-O-methylguanosine-3'-phosphate
  modified_base 17: mod_base = OTHER; note = 2'-O-methyladenosine-3'-phosphate
  modified_base 18: mod_base = OTHER; note = 2'-O-methyladenosine-3'-phosphate
  modified_base 19: mod_base = OTHER; note = 2'-O-methyluridine-3'-phosphate
  modified_base 20: mod_base = OTHER; note = 2'-O-methyladenosine-3'-phosphate
  modified_base 21: mod_base = OTHER; note = 2'-O-methyluridine-3'-phosphate attached to N-[tris(N-acetylgalactosamine-alkyl)-amidodecanoyl)]-4-hydr oxyprolinol Hyp-(N-acetylgalactosamine-alkyl)3
acatctttagtgtctgaatat

SEQ ID NO: 2075 - RNA, 23 nt, synthetic construct
  misc_feature 1..23: note = Description of Artificial Sequence: Synthetic oligonucleotide
  source 1..23: mol_type = other RNA
  modified_base 1: mod_base = OTHER; note = 2'-O-methyladenosine-3'- phosphorothioate
  modified_base 2: mod_base = OTHER; note = 2'-fluorouridine -3'-phosphorothioate
  modified_base 3: mod_base = OTHER; note = 2'-O-methyladenosine-3'-phosphate
  modified_base 4: mod_base = OTHER; note = 2'-O-methyluridine-3'-phosphate
  modified_base 5: mod_base = OTHER; note = 2'-O-methyluridine-3'-phosphate
  modified_base 6: mod_base = OTHER; note = 2'-fluorocytidine-3'-phosphate
  modified_base 7: mod_base = OTHER; note = 2'-O-methyladenosine-3'-phosphate
  modified_base 8: mod_base = OTHER; note = 2'-fluoroguanosine-3'-phosphate
  modified_base 9: mod_base = OTHER; note = 2'-fluoroadenosine-3'-phosphate
  modified_base 10: mod_base = OTHER; note = 2'-O-methylcytidine-3'-phosphate
  modified_base 11: mod_base = OTHER; note = 2'-O-methyladenosine-3'-phosphate
  modified_base 12: mod_base = OTHER; note = 2'-O-methylcytidine-3'-phosphate
  modified_base 13: mod_base = OTHER; note = 2'-O-methyluridine-3'-phosphate
  modified_base 14: mod_base = OTHER; note = 2'-fluoroadenosine-3'-phosphate
  modified_base 15: mod_base = OTHER; note = 2'-O-methyladenosine-3'-phosphate
  modified_base 16: mod_base = OTHER; note = 2'-fluoroadenosine-3'-phosphate
  modified_base 17: mod_base = OTHER; note = 2'-O-methylguanosine-3'-phosphate
  modified_base 18: mod_base = OTHER; note = 2'-O-methyladenosine-3'-phosphate
  modified_base 19: mod_base = OTHER; note = 2'-O-methyluridine-3'-phosphate
  modified_base 20: mod_base = OTHER; note = 2'-O-methylguanosine-3'-phosphate
  modified_base 21: mod_base = OTHER; note = 2'-O-methyluridine-3'-phosphorothioate
  modified_base 22: mod_base = OTHER; note = 2'-O-methylguanosine-3'- phosphorothioate
  modified_base 23: mod_base = OTHER; note = 2'-O-methyladenosine-3'-phosphate
atattcagacactaaagatgtga

SEQ ID NO: 2076 - RNA, 21 nt, synthetic construct
  misc_feature 1..21: note = Description of Artificial Sequence: Synthetic oligonucleotide
  source 1..21: mol_type = other RNA
  modified_base 1: mod_base = OTHER; note = 2'-O-methylcytidine-3'- phosphorothioate
  modified_base 2: mod_base = OTHER; note = 2'-O-methyladenosine-3'- phosphorothioate
  modified_base 3: mod_base = OTHER; note = 2'-O-methyluridine-3'-phosphate
  modified_base 4: mod_base = OTHER; note = 2'-O-methylcytidine-3'-phosphate
  modified_base 5: mod_base = OTHER; note = 2'-O-methyluridine-3'-phosphate
  modified_base 6: mod_base = OTHER; note = 2'-O-methyluridine-3'-phosphate
  modified_base 7: mod_base = OTHER; note = 2'-fluorouridine-3'-phosphate
  modified_base 8: mod_base = OTHER; note = 2'-O-methyladenosine-3'-phosphate
  modified_base 9: mod_base = OTHER; note = 2'-fluoroguanosine-3'-phosphate
  modified_base 10: mod_base = OTHER; note = 2'-fluorouridine-3'-phosphate
  modified_base 11: mod_base = OTHER; note = 2'-fluoroguanosine-3'-phosphate
  modified_base 12: mod_base = OTHER; note = 2'-O-methyluridine-3'-phosphate
  modified_base 13: mod_base = OTHER; note = 2'-O-methylcytidine-3'-phosphate
  modified_base 14: mod_base = OTHER; note = 2'-O-methyluridine-3'-phosphate
  modified_base 15: mod_base = OTHER; note = 2'-O-methylguanosine-3'-phosphate
  modified_base 16: mod_base = OTHER; note = 2'-O-methyladenosine-3'-phosphate
  modified_base 17: mod_base = OTHER; note = 2'-O-methyladenosine-3'-phosphate
  modified_base 18: mod_base = OTHER; note = 2'-O-methyluridine-3'-phosphate
  modified_base 19: mod_base = OTHER; note = 2'-O-methyladenosine-3'-phosphate
  modified_base 20: mod_base = OTHER; note = 2'-O-methyluridine-3'-phosphate
  modified_base 21: mod_base = OTHER; note = 2'-O-methyladenosine-3'-phosphate attached to N-[tris(N-acetylgalactosamine-alkyl)-amidodecanoyl)]-4-hydr oxyprolinol Hyp-(N-acetylgalactosamine-alkyl)3
catctttagtgtctgaatata

SEQ ID NO: 2077 - RNA, 23 nt, synthetic construct
  misc_feature 1..23: note = Description of Artificial Sequence: Synthetic oligonucleotide
  source 1..23: mol_type = other RNA
  modified_base 1: mod_base = OTHER; note = 2'-O-methyluridine-3'-phosphorothioate
  modified_base 2: mod_base = OTHER; note = 2'-fluoroadenosine-3'-phosphorothioate
  modified_base 3: mod_base = OTHER; note = 2'-O-methyluridine-3'-phosphate
  modified_base 4: mod_base = OTHER; note = 2'-O-methyladenosine-3'-phosphate
  modified_base 5: mod_base = OTHER; note = 2'-O-methyluridine-3'-phosphate
  modified_base 6: mod_base = OTHER; note = 2'-fluorouridine-3'-phosphate
  modified_base 7: mod_base = OTHER; note = 2'-O-methylcytidine-3'-phosphate
  modified_base 8: mod_base = OTHER; note = 2'-fluoroadenosine-3'-phosphate
  modified_base 9: mod_base = OTHER; note = 2'-fluoroguanosine-3'-phosphate
  modified_base 10: mod_base = OTHER; note = 2'-O-methyladenosine-3'-phosphate
  modified_base 11: mod_base = OTHER; note = 2'-O-methylcytidine-3'-phosphate
  modified_base 12: mod_base = OTHER; note = 2'-O-methyladenosine-3'-phosphate
  modified_base 13: mod_base = OTHER; note = 2'-O-methylcytidine-3'-phosphate
  modified_base 14: mod_base = OTHER; note = 2'-fluorouridine-3'-phosphate
  modified_base 15: mod_base = OTHER; note = 2'-O-methyladenosine-3'-phosphate
  modified_base 16: mod_base = OTHER; note = 2'-fluoroadenosine-3'-phosphate
  modified_base 17: mod_base = OTHER; note = 2'-O-methyladenosine-3'-phosphate
  modified_base 18: mod_base = OTHER; note = 2'-O-methylguanosine-3'-phosphate
  modified_base 19: mod_base = OTHER; note = 2'-O-methyladenosine-3'-phosphate
  modified_base 20: mod_base = OTHER; note = 2'-O-methyluridine-3'-phosphate
  modified_base 21: mod_base = OTHER; note = 2'-O-methylguanosine-3'- phosphorothioate
  modified_base 22: mod_base = OTHER; note = 2'-O-methyluridine-3'-phosphorothioate
  modified_base 23: mod_base = OTHER; note = 2'-O-methylguanosine-3'-phosphate
tatattcagacactaaagatgtg

SEQ ID NO: 2078 - RNA, 21 nt, synthetic construct
  misc_feature 1..21: note = Description of Artificial Sequence: Synthetic oligonucleotide
  source 1..21: mol_type = other RNA
  modified_base 1: mod_base = OTHER; note = 2'-O-methyladenosine-3'- phosphorothioate
  modified_base 2: mod_base = OTHER; note = 2'-O-methyladenosine-3'- phosphorothioate
  modified_base 3: mod_base = OTHER; note = 2'-O-methyluridine-3'-phosphate
  modified_base 4: mod_base = OTHER; note = 2'-O-methylcytidine-3'-phosphate
  modified_base 5: mod_base = OTHER; note = 2'-O-methyladenosine-3'-phosphate
  modified_base 6: mod_base = OTHER; note = 2'-O-methylcytidine-3'-phosphate
  modified_base 7: mod_base = OTHER; note = 2'-fluoroadenosine-3'-phosphate
  modified_base 8: mod_base = OTHER; note = 2'-O-methyluridine-3'-phosphate
  modified_base 9: mod_base = OTHER; note = 2'-fluorocytidine-3'-phosphate
  modified_base 10: mod_base = OTHER; note = 2'-fluorouridine-3'-phosphate
  modified_base 11: mod_base = OTHER; note = 2'-fluorouridine-3'-phosphate
  modified_base 12: mod_base = OTHER; note = 2'-O-methyluridine-3'-phosphate
  modified_base 13: mod_base = OTHER; note = 2'-O-methyladenosine-3'-phosphate
  modified_base 14: mod_base = OTHER; note = 2'-O-methylguanosine-3'-phosphate
  modified_base 15: mod_base = OTHER; note = 2'-O-methyluridine-3'-phosphate
  modified_base 16: mod_base = OTHER; note = 2'-O-methylguanosine-3'-phosphate
  modified_base 17: mod_base = OTHER; note = 2'-O-methyluridine-3'-phosphate
  modified_base 18: mod_base = OTHER; note = 2'-O-methylcytidine-3'-phosphate
  modified_base 19: mod_base = OTHER; note = 2'-O-methyluridine-3'-phosphate
  modified_base 20: mod_base = OTHER; note = 2'-O-methylguanosine-3'-phosphate
  modified_base 21: mod_base = OTHER; note = 2'-O-methyladenosine-3'-phosphate attached to N-[tris(N-acetylgalactosamine-alkyl)-amidodecanoyl)]-4-hydr oxyprolinol Hyp-(N-acetylgalactosamine-alkyl)3
aatcacatctttagtgtctga

SEQ ID NO: 2079 - RNA, 23 nt, synthetic construct
  misc_feature 1..23: note = Description of Artificial Sequence: Synthetic oligonucleotide
  source 1..23: mol_type = other RNA
  modified_base 1: mod_base = OTHER; note = 2'-O-methyluridine-3'-phosphorothioate
  modified_base 2: mod_base = OTHER; note = 2'-fluorocytidine-3'-phosphorothioate
  modified_base 3: mod_base = OTHER; note = 2'-O-methyladenosine-3'-phosphate
  modified_base 4: mod_base = OTHER; note = 2'-O-methylguanosine-3'-phosphate
  modified_base 5: mod_base = OTHER; note = 2'-O-methyladenosine-3'-phosphate
  modified_base 6: mod_base = OTHER; note = 2'-fluorocytidine-3'-phosphate
  modified_base 7: mod_base = OTHER; note = 2'-O-methyladenosine-3'-phosphate
  modified_base 8: mod_base = OTHER; note = 2'-fluorocytidine-3'-phosphate
  modified_base 9: mod_base = OTHER; note = 2'-fluorouridine-3'-phosphate
  modified_base 10: mod_base = OTHER; note = 2'-O-methyladenosine-3'-phosphate
  modified_base 11: mod_base = OTHER; note = 2'-O-methyladenosine-3'-phosphate
  modified_base 12: mod_base = OTHER; note = 2'-O-methyladenosine-3'-phosphate
  modified_base 13: mod_base = OTHER; note = 2'-O-methylguanosine-3'-phosphate
  modified_base 14: mod_base = OTHER; note = 2'-fluoroadenosine-3'-phosphate
  modified_base 15: mod_base = OTHER; note = 2'-O-methyluridine-3'-phosphate
  modified_base 16: mod_base = OTHER; note = 2'-fluoroguanosine-3'-phosphate
  modified_base 17: mod_base = OTHER; note = 2'-O-methyluridine-3'-phosphate
  modified_base 18: mod_base = OTHER; note = 2'-O-methylguanosine-3'-phosphate
  modified_base 19: mod_base = OTHER; note = 2'-O-methyladenosine-3'-phosphate
  modified_base 20: mod_base = OTHER; note = 2'-O-methyluridine-3'-phosphate
  modified_base 21: mod_base = OTHER; note = 2'-O-methyluridine-3'-phosphorothioate
  modified_base 22: mod_base = OTHER; note = 2'-O-methylguanosine-3'- phosphorothioate
  modified_base 23: mod_base = OTHER; note = 2'-O-methylguanosine-3'-phosphate
tcagacactaaagatgtgattgg

SEQ ID NO: 2080 - RNA, 21 nt, synthetic construct
  misc_feature 1..21: note = Description of Artificial Sequence: Synthetic oligonucleotide
  source 1..21: mol_type = other RNA
  modified_base 1: mod_base = OTHER; note = 2'-O-methylcytidine-3'- phosphorothioate
  modified_base 2: mod_base = OTHER; note = 2'-O-methyladenosine-3'- phosphorothioate
  modified_base 3: mod_base = OTHER; note = 2'-O-methyladenosine-3'-phosphate
  modified_base 4: mod_base = OTHER; note = 2'-O-methyluridine-3'-phosphate
  modified_base 5: mod_base = OTHER; note = 2'-O-methylcytidine-3'-phosphate
  modified_base 6: mod_base = OTHER; note = 2'-O-methyladenosine-3'-phosphate
  modified_base 7: mod_base = OTHER; note = 2'-fluorocytidine-3'-phosphate
  modified_base 8: mod_base = OTHER; note = 2'-O-methyladenosine-3'-phosphate
  modified_base 9: mod_base = OTHER; note = 2'-fluorouridine-3'-phosphate
  modified_base 10: mod_base = OTHER; note = 2'-fluorocytidine-3'-phosphate
  modified_base 11: mod_base = OTHER; note = 2'-fluorouridine-3'-phosphate
  modified_base 12: mod_base = OTHER; note = 2'-O-methyluridine-3'-phosphate
  modified_base 13: mod_base = OTHER; note = 2'-O-methyluridine-3'-phosphate
  modified_base 14: mod_base = OTHER; note = 2'-O-methyladenosine-3'-phosphate
  modified_base 15: mod_base = OTHER; note = 2'-O-methylguanosine-3'-phosphate
  modified_base 16: mod_base = OTHER; note = 2'-O-methyluridine-3'-phosphate
  modified_base 17: mod_base = OTHER; note = 2'-O-methylguanosine-3'-phosphate
  modified_base 18: mod_base = OTHER; note = 2'-O-methyluridine-3'-phosphate
  modified_base 19: mod_base = OTHER; note = 2'-O-methylcytidine-3'-phosphate
  modified_base 20: mod_base = OTHER; note = 2'-O-methyluridine-3'-phosphate
  modified_base 21: mod_base = OTHER; note = 2'-O-methylguanosine-3'-phosphate attached to N-[tris(N-acetylgalactosamine-alkyl)-amidodecanoyl)]-4-hydr oxyprolinol Hyp-(N-acetylgalactosamine-alkyl)3
caatcacatctttagtgtctg

SEQ ID NO: 2081 - RNA, 23 nt, synthetic construct
  misc_feature 1..23: note = Description of Artificial Sequence: Synthetic oligonucleotide
  source 1..23: mol_type = other RNA
  modified_base 1: mod_base = OTHER; note = 2'-O-methylcytidine-3'- phosphorothioate
  modified_base 2: mod_base = OTHER; note = 2'-fluoroadenosine-3'-phosphorothioate
  modified_base 3: mod_base = OTHER; note = 2'-O-methylguanosine-3'-phosphate
  modified_base 4: mod_base = OTHER; note = 2'-O-methyladenosine-3'-phosphate
  modified_base 5: mod_base = OTHER; note = 2'-O-methylcytidine-3'-phosphate
  modified_base 6: mod_base = OTHER; note = 2'-fluoroadenosine-3'-phosphate
  modified_base 7: mod_base = OTHER; note = 2'-O-methylcytidine-3'-phosphate
  modified_base 8: mod_base = OTHER; note = 2'-fluorouridine-3'-phosphate
  modified_base 9: mod_base = OTHER; note = 2'-fluoroadenosine-3'-phosphate
  modified_base 10: mod_base = OTHER; note = 2'-O-methyladenosine-3'-phosphate
  modified_base 11: mod_base = OTHER; note = 2'-O-methyladenosine-3'-phosphate
  modified_base 12: mod_base = OTHER; note = 2'-O-methylguanosine-3'-phosphate
  modified_base 13: mod_base = OTHER; note = 2'-O-methyladenosine-3'-phosphate
  modified_base 14: mod_base = OTHER; note = 2'-fluorouridine-3'-phosphate
  modified_base 15: mod_base = OTHER; note = 2'-O-methylguanosine-3'-phosphate
  modified_base 16: mod_base = OTHER; note = 2'-fluorouridine-3'-phosphate
  modified_base 17: mod_base = OTHER; note = 2'-O-methylguanosine-3'-phosphate
  modified_base 18: mod_base = OTHER; note = 2'-O-methyladenosine-3'-phosphate
  modified_base 19: mod_base = OTHER; note = 2'-O-methyluridine-3'-phosphate
  modified_base 20: mod_base = OTHER; note = 2'-O-methyluridine-3'-phosphate
  modified_base 21: mod_base = OTHER; note = 2'-O-methylguanosine-3'- phosphorothioate
  modified_base 22: mod_base = OTHER; note = 2'-O-methylguanosine-3'- phosphorothioate
  modified_base 23: mod_base = OTHER; note = 2'-O-methyladenosine-3'-phosphate
cagacactaaagatgtgattgga

SEQ ID NO: 2082 - RNA, 21 nt, synthetic construct
  misc_feature 1..21: note = Description of Artificial Sequence: Synthetic oligonucleotide
  source 1..21: mol_type = other RNA
  modified_base 1: mod_base = OTHER; note = 2'-O-methylguanosine-3'- phosphorothioate
  modified_base 2: mod_base = OTHER; note = 2'-O-methylcytidine-3'- phosphorothioate
  modified_base 3: mod_base = OTHER; note = 2'-O-methyladenosine-3'-phosphate
  modified_base 4: mod_base = OTHER; note = 2'-O-methyluridine-3'-phosphate
  modified_base 5: mod_base = OTHER; note = 2'-O-methylguanosine-3'-phosphate
  modified_base 6: mod_base = OTHER; note = 2'-O-methyluridine-3'-phosphate
  modified_base 7: mod_base = OTHER; note = 2'-fluoroadenosine-3'-phosphate
  modified_base 8: mod_base = OTHER; note = 2'-O-methyluridine-3'-phosphate
  modified_base 9: mod_base = OTHER; note = 2'-fluorouridine-3'-phosphate
  modified_base 10: mod_base = OTHER; note = 2'-fluoroadenosine-3'-phosphate
  modified_base 11: mod_base = OTHER; note = 2'-fluorocytidine-3'-phosphate
  modified_base 12: mod_base = OTHER; note = 2'-O-methyluridine-3'-phosphate
  modified_base 13: mod_base = OTHER; note = 2'-O-methyluridine-3'-phosphate
  modified_base 14: mod_base = OTHER; note = 2'-O-methylguanosine-3'-phosphate
  modified_base 15: mod_base = OTHER; note = 2'-O-methyladenosine-3'-phosphate
  modified_base 16: mod_base = OTHER; note = 2'-O-methylcytidine-3'-phosphate
  modified_base 17: mod_base = OTHER; note = 2'-O-methyladenosine-3'-phosphate
  modified_base 18: mod_base = OTHER; note = 2'-O-methyladenosine-3'-phosphate
  modified_base 19: mod_base = OTHER; note = 2'-O-methyladenosine-3'-phosphate
  modified_base 20: mod_base = OTHER; note = 2'-O-methylguanosine-3'-phosphate
  modified_base 21: mod_base = OTHER; note = 2'-O-methyladenosine-3'-phosphate attached to N-[tris(N-acetylgalactosamine-alkyl)-amidodecanoyl)]-4-hydr oxyprolinol Hyp-(N-acetylgalactosamine-alkyl)3
gcatgtattacttgacaaaga

SEQ ID NO: 2083 - RNA, 23 nt, synthetic construct
  misc_feature 1..23: note = Description of Artificial Sequence: Synthetic oligonucleotide
  source 1..23: mol_type = other RNA
  modified_base 1: mod_base = OTHER; note = 2'-O-methyluridine-3'-phosphorothioate
  modified_base 2: mod_base = OTHER; note = 2'-fluorocytidine-3'-phosphorothioate
  modified_base 3: mod_base = OTHER; note = 2'-O-methyluridine-3'-phosphate
  modified_base 4: mod_base = OTHER; note = 2'-O-methyluridine-3'-phosphate
  modified_base 5: mod_base = OTHER; note = 2'-O-methyluridine-3'-phosphate
  modified_base 6: mod_base = OTHER; note = 2'-fluoroguanosine-3'-phosphate
  modified_base 7: mod_base = OTHER; note = 2'-O-methyluridine-3'-phosphate
  modified_base 8: mod_base = OTHER; note = 2'-fluorocytidine-3'-phosphate
  modified_base 9: mod_base = OTHER; note = 2'-fluoroadenosine-3'-phosphate
  modified_base 10: mod_base = OTHER; note = 2'-O-methyladenosine-3'-phosphate
  modified_base 11: mod_base = OTHER; note = 2'-O-methylguanosine-3'-phosphate
  modified_base 12: mod_base = OTHER; note = 2'-O-methyluridine-3'-phosphate
  modified_base 13: mod_base = OTHER; note = 2'-O-methyladenosine-3'-phosphate
  modified_base 14: mod_base = OTHER; note = 2'-fluoroadenosine-3'-phosphate
  modified_base 15: mod_base = OTHER; note = 2'-O-methyluridine-3'-phosphate
  modified_base 16: mod_base = OTHER; note = 2'-fluoroadenosine-3'-phosphate
  modified_base 17: mod_base = OTHER; note = 2'-O-methylcytidine-3'-phosphate
  modified_base 18: mod_base = OTHER; note = 2'-O-methyladenosine-3'-phosphate
  modified_base 19: mod_base = OTHER; note = 2'-O-methyluridine-3'-phosphate
  modified_base 20: mod_base = OTHER; note = 2'-O-methylguanosine-3'-phosphate
  modified_base 21: mod_base = OTHER; note = 2'-O-methylcytidine-3'- phosphorothioate
  modified_base 22: mod_base = OTHER; note = 2'-O-methyluridine-3'-phosphorothioate
  modified_base 23: mod_base = OTHER; note = 2'-O-methylguanosine-3'-phosphate
tctttgtcaagtaatacatgctg

SEQ ID NO: 2084 - RNA, 21 nt, synthetic construct
  misc_feature 1..21: note = Description of Artificial Sequence: Synthetic oligonucleotide
  source 1..21: mol_type = other RNA
  modified_base 1: mod_base = OTHER; note = 2'-O-methylcytidine-3'- phosphorothioate
  modified_base 2: mod_base = OTHER; note = 2'-O-methyladenosine-3'- phosphorothioate
  modified_base 3: mod_base = OTHER; note = 2'-O-methyluridine-3'-phosphate
  modified_base 4: mod_base = OTHER; note = 2'-O-methylguanosine-3'-phosphate
  modified_base 5: mod_base = OTHER; note = 2'-O-methyluridine-3'-phosphate
  modified_base 6: mod_base = OTHER; note = 2'-O-methyladenosine-3'-phosphate
  modified_base 7: mod_base = OTHER; note = 2'-fluorouridine-3'-phosphate
  modified_base 8: mod_base = OTHER; note = 2'-O-methyluridine-3'-phosphate
  modified_base 9: mod_base = OTHER; note = 2'-fluoroadenosine-3'-phosphate
  modified_base 10: mod_base = OTHER; note = 2'-fluorocytidine-3'-phosphate
  modified_base 11: mod_base = OTHER; note = 2'-fluorouridine-3'-phosphate
  modified_base 12: mod_base = OTHER; note = 2'-O-methyluridine-3'-phosphate
  modified_base 13: mod_base = OTHER; note = 2'-O-methylguanosine-3'-phosphate
  modified_base 14: mod_base = OTHER; note = 2'-O-methyladenosine-3'-phosphate
  modified_base 15: mod_base = OTHER; note = 2'-O-methylcytidine-3'-phosphate
  modified_base 16: mod_base = OTHER; note = 2'-O-methyladenosine-3'-phosphate
  modified_base 17: mod_base = OTHER; note = 2'-O-methyladenosine-3'-phosphate
  modified_base 18: mod_base = OTHER; note = 2'-O-methyladenosine-3'-phosphate
  modified_base 19: mod_base = OTHER; note = 2'-O-methylguanosine-3'-phosphate
  modified_base 20: mod_base = OTHER; note = 2'-O-methyladenosine-3'-phosphate
  modified_base 21: mod_base = OTHER; note = 2'-O-methylguanosine-3'-phosphate attached to N-[tris(N-acetylgalactosamine-alkyl)-amidodecanoyl)]-4-hydr oxyprolinol Hyp-(N-acetylgalactosamine-alkyl)3
catgtattacttgacaaagag

SEQ ID NO: 2085 - RNA, 23 nt, synthetic construct
  misc_feature 1..23: note = Description of Artificial Sequence: Synthetic oligonucleotide
  source 1..23: mol_type = other RNA
  modified_base 1: mod_base = OTHER; note = 2'-O-methylcytidine-3'- phosphorothioate
  modified_base 2: mod_base = OTHER; note = 2'-fluorouridine -3'-phosphorothioate
  modified_base 3: mod_base = OTHER; note = 2'-O-methylcytidine-3'-phosphate
  modified_base 4: mod_base = OTHER; note = 2'-O-methyluridine-3'-phosphate
  modified_base 5: mod_base = OTHER; note = 2'-O-methyluridine-3'-phosphate
  modified_base 6: mod_base = OTHER; note = 2'-fluorouridine-3'-phosphate
  modified_base 7: mod_base = OTHER; note = 2'-O-methylguanosine-3'-phosphate
  modified_base 8: mod_base = OTHER; note = 2'-fluorouridine-3'-phosphate
  modified_base 9: mod_base = OTHER; note = 2'-fluorocytidine-3'-phosphate
  modified_base 10: mod_base = OTHER; note = 2'-O-methyladenosine-3'-phosphate
  modified_base 11: mod_base = OTHER; note = 2'-O-methyladenosine-3'-phosphate
  modified_base 12: mod_base = OTHER; note = 2'-O-methylguanosine-3'-phosphate
  modified_base 13: mod_base = OTHER; note = 2'-O-methyluridine-3'-phosphate
  modified_base 14: mod_base = OTHER; note = 2'-fluoroadenosine-3'-phosphate
  modified_base 15: mod_base = OTHER; note = 2'-O-methyladenosine-3'-phosphate
  modified_base 16: mod_base = OTHER; note = 2'-fluorouridine-3'-phosphate
  modified_base 17: mod_base = OTHER; note = 2'-O-methyladenosine-3'-phosphate
  modified_base 18: mod_base = OTHER; note = 2'-O-methylcytidine-3'-phosphate
  modified_base 19: mod_base = OTHER; note = 2'-O-methyladenosine-3'-phosphate
  modified_base 20: mod_base = OTHER; note = 2'-O-methyluridine-3'-phosphate
  modified_base 21: mod_base = OTHER; note = 2'-O-methylguanosine-3'- phosphorothioate
  modified_base 22: mod_base = OTHER; note = 2'-O-methylcytidine-3'- phosphorothioate
  modified_base 23: mod_base = OTHER; note = 2'-O-methyluridine-3'-phosphate
ctctttgtcaagtaatacatgct

SEQ ID NO: 2086 - RNA, 21 nt, synthetic construct
  misc_feature 1..21: note = Description of Artificial Sequence: Synthetic oligonucleotide
  source 1..21: mol_type = other RNA
  modified_base 1: mod_base = OTHER; note = 2'-O-methyluridine-3'-phosphorothioate
  modified_base 2: mod_base = OTHER; note = 2'-O-methyluridine-3'-phosphorothioate
  modified_base 3: mod_base = OTHER; note = 2'-O-methylcytidine-3'-phosphate
  modified_base 4: mod_base = OTHER; note = 2'-O-methyladenosine-3'-phosphate
  modified_base 5: mod_base = OTHER; note = 2'-O-methylguanosine-3'-phosphate
  modified_base 6: mod_base = OTHER; note = 2'-O-methylcytidine-3'-phosphate
  modified_base 7: mod_base = OTHER; note = 2'-fluoroadenosine-3'-phosphate
  modified_base 8: mod_base = OTHER; note = 2'-O-methyluridine-3'-phosphate
  modified_base 9: mod_base = OTHER; note = 2'-fluoroguanosine-3'-phosphate
  modified_base 10: mod_base = OTHER; note = 2'-fluorouridine-3'-phosphate
  modified_base 11: mod_base = OTHER; note = 2'-fluoroadenosine-3'-phosphate
  modified_base 12: mod_base = OTHER; note = 2'-O-methyluridine-3'-phosphate
  modified_base 13: mod_base = OTHER; note = 2'-O-methyluridine-3'-phosphate
  modified_base 14: mod_base = OTHER; note = 2'-O-methyladenosine-3'-phosphate
  modified_base 15: mod_base = OTHER; note = 2'-O-methylcytidine-3'-phosphate
  modified_base 16: mod_base = OTHER; note = 2'-O-methyluridine-3'-phosphate
  modified_base 17: mod_base = OTHER; note = 2'-O-methyluridine-3'-phosphate
  modified_base 18: mod_base = OTHER; note = 2'-O-methylguanosine-3'-phosphate
  modified_base 19: mod_base = OTHER; note = 2'-O-methyladenosine-3'-phosphate
  modified_base 20: mod_base = OTHER; note = 2'-O-methylcytidine-3'-phosphate
  modified_base 21: mod_base = OTHER; note = 2'-O-methyladenosine-3'-phosphate attached to N-[tris(N-acetylgalactosamine-alkyl)-amidodecanoyl)]-4-hydr oxyprolinol Hyp-(N-acetylgalactosamine-alkyl)3
ttcagcatgtattacttgaca

SEQ ID NO: 2087 - RNA, 23 nt, synthetic construct
  misc_feature 1..23: note = Description of Artificial Sequence: Synthetic oligonucleotide
  source 1..23: mol_type = other RNA
  modified_base 1: mod_base = OTHER; note = 2'-O-methyluridine-3'-phosphorothioate
  modified_base 2: mod_base = OTHER; note = 2'-fluoroguanosine-3'-phosphorothioate
  modified_base 3: mod_base = OTHER; note = 2'-O-methyluridine-3'-phosphate
  modified_base 4: mod_base = OTHER; note = 2'-O-methylcytidine-3'-phosphate
  modified_base 5: mod_base = OTHER; note = 2'-O-methyladenosine-3'-phosphate
  modified_base 6: mod_base = OTHER; note = 2'-fluoroadenosine-3'-phosphate
  modified_base 7: mod_base = OTHER; note = 2'-O-methylguanosine-3'-phosphate
  modified_base 8: mod_base = OTHER; note = 2'-fluorouridine-3'-phosphate
  modified_base 9: mod_base = OTHER; note = 2'-fluoroadenosine-3'-phosphate
  modified_base 10: mod_base = OTHER; note = 2'-O-methyladenosine-3'-phosphate
  modified_base 11: mod_base = OTHER; note = 2'-O-methyluridine-3'-phosphate
  modified_base 12: mod_base = OTHER; note = 2'-O-methyladenosine-3'-phosphate
  modified_base 13: mod_base = OTHER; note = 2'-O-methylcytidine-3'-phosphate
  modified_base 14: mod_base = OTHER; note = 2'-fluoroadenosine-3'-phosphate
  modified_base 15: mod_base = OTHER; note = 2'-O-methyluridine-3'-phosphate
  modified_base 16: mod_base = OTHER; note = 2'-fluoroguanosine-3'-phosphate
  modified_base 17: mod_base = OTHER; note = 2'-O-methylcytidine-3'-phosphate
  modified_base 18: mod_base = OTHER; note = 2'-O-methyluridine-3'-phosphate
  modified_base 19: mod_base = OTHER; note = 2'-O-methylguanosine-3'-phosphate
  modified_base 20: mod_base = OTHER; note = 2'-O-methyladenosine-3'-phosphate
  modified_base 21: mod_base = OTHER; note = 2'-O-methyladenosine-3'- phosphorothioate
  modified_base 22: mod_base = OTHER; note = 2'-O-methyladenosine-3'- phosphorothioate
  modified_base 23: mod_base = OTHER; note = 2'-O-methyladenosine-3'-phosphate
tgtcaagtaatacatgctgaaaa

SEQ ID NO: 2088 - RNA, 21 nt, synthetic construct
  misc_feature 1..21: note = Description of Artificial Sequence: Synthetic oligonucleotide
  source 1..21: mol_type = other RNA
  modified_base 1: mod_base = OTHER; note = 2'-O-methyluridine-3'-phosphorothioate
  modified_base 2: mod_base = OTHER; note = 2'-O-methyluridine-3'-phosphorothioate
  modified_base 3: mod_base = OTHER; note = 2'-O-methyluridine-3'-phosphate
  modified_base 4: mod_base = OTHER; note = 2'-O-methylcytidine-3'-phosphate
  modified_base 5: mod_base = OTHER; note = 2'-O-methyladenosine-3'-phosphate
  modified_base 6: mod_base = OTHER; note = 2'-O-methylguanosine-3'-phosphate
  modified_base 7: mod_base = OTHER; note = 2'-fluorocytidine-3'-phosphate
  modified_base 8: mod_base = OTHER; note = 2'-O-methyladenosine-3'-phosphate
  modified_base 9: mod_base = OTHER; note = 2'-fluorouridine-3'-phosphate
  modified_base 10: mod_base = OTHER; note = 2'-fluoroguanosine-3'-phosphate
  modified_base 11: mod_base = OTHER; note = 2'-fluorouridine-3'-phosphate
  modified_base 12: mod_base = OTHER; note = 2'-O-methyladenosine-3'-phosphate
  modified_base 13: mod_base = OTHER; note = 2'-O-methyluridine-3'-phosphate
  modified_base 14: mod_base = OTHER; note = 2'-O-methyluridine-3'-phosphate
  modified_base 15: mod_base = OTHER; note = 2'-O-methyladenosine-3'-phosphate
  modified_base 16: mod_base = OTHER; note = 2'-O-methylcytidine-3'-phosphate
  modified_base 17: mod_base = OTHER; note = 2'-O-methyluridine-3'-phosphate
  modified_base 18: mod_base = OTHER; note = 2'-O-methyluridine-3'-phosphate
  modified_base 19: mod_base = OTHER; note = 2'-O-methylguanosine-3'-phosphate
  modified_base 20: mod_base = OTHER; note = 2'-O-methyladenosine-3'-phosphate
  modified_base 21: mod_base = OTHER; note = 2'-O-methylcytidine-3'-phosphate attached to N-[tris(N-acetylgalactosamine-alkyl)-amidodecanoyl)]-4-hydr oxyprolinol Hyp-(N-acetylgalactosamine-alkyl)3
tttcagcatgtattacttgac

SEQ ID NO: 2089 - RNA, 23 nt, synthetic construct
  misc_feature 1..23: note = Description of Artificial Sequence: Synthetic oligonucleotide
  source 1..23: mol_type = other RNA
  modified_base 1: mod_base = OTHER; note = 2'-O-methylguanosine-3'- phosphorothioate
  modified_base 2: mod_base = OTHER; note = 2'-fluorouridine -3'-phosphorothioate
  modified_base 3: mod_base = OTHER; note = 2'-O-methylcytidine-3'-phosphate
  modified_base 4: mod_base = OTHER; note = 2'-O-methyladenosine-3'-phosphate
  modified_base 5: mod_base = OTHER; note = 2'-O-methyladenosine-3'-phosphate
  modified_base 6: mod_base = OTHER; note = 2'-fluoroguanosine-3'-phosphate
  modified_base 7: mod_base = OTHER; note = 2'-O-methyluridine-3'-phosphate
  modified_base 8: mod_base = OTHER; note = 2'-fluoroadenosine-3'-phosphate
  modified_base 9: mod_base = OTHER; note = 2'-fluoroadenosine-3'-phosphate
  modified_base 10: mod_base = OTHER; note = 2'-O-methyluridine-3'-phosphate
  modified_base 11: mod_base = OTHER; note = 2'-O-methyladenosine-3'-phosphate
  modified_base 12: mod_base = OTHER; note = 2'-O-methylcytidine-3'-phosphate
  modified_base 13: mod_base = OTHER; note = 2'-O-methyladenosine-3'-phosphate
  modified_base 14: mod_base = OTHER; note = 2'-fluorouridine-3'-phosphate
  modified_base 15: mod_base = OTHER; note = 2'-O-methylguanosine-3'-phosphate
  modified_base 16: mod_base = OTHER; note = 2'-fluorocytidine-3'-phosphate
  modified_base 17: mod_base = OTHER; note = 2'-O-methyluridine-3'-phosphate
  modified_base 18: mod_base = OTHER; note = 2'-O-methylguanosine-3'-phosphate
  modified_base 19: mod_base = OTHER; note = 2'-O-methyladenosine-3'-phosphate
  modified_base 20: mod_base = OTHER; note = 2'-O-methyladenosine-3'-phosphate
  modified_base 21: mod_base = OTHER; note = 2'-O-methyladenosine-3'- phosphorothioate
  modified_base 22: mod_base = OTHER; note = 2'-O-methyladenosine-3'- phosphorothioate
  modified_base 23: mod_base = OTHER; note = 2'-O-methyladenosine-3'-phosphate
gtcaagtaatacatgctgaaaaa

SEQ ID NO: 2090 - RNA, 21 nt, synthetic construct
  misc_feature 1..21: note = Description of Artificial Sequence: Synthetic oligonucleotide
  source 1..21: mol_type = other RNA
  modified_base 1: mod_base = OTHER; note = 2'-O-methyladenosine-3'- phosphorothioate
  modified_base 2: mod_base = OTHER; note = 2'-O-methyluridine-3'-phosphorothioate
  modified_base 3: mod_base = OTHER; note = 2'-O-methylguanosine-3'-phosphate
  modified_base 4: mod_base = OTHER; note = 2'-O-methyluridine-3'-phosphate
  modified_base 5: mod_base = OTHER; note = 2'-O-methyluridine-3'-phosphate
  modified_base 6: mod_base = OTHER; note = 2'-O-methyladenosine-3'-phosphate
  modified_base 7: mod_base = OTHER; note = 2'-fluorocytidine-3'-phosphate
  modified_base 8: mod_base = OTHER; note = 2'-O-methyluridine-3'-phosphate
  modified_base 9: mod_base = OTHER; note = 2'-fluorouridine-3'-phosphate
  modified_base 10: mod_base = OTHER; note = 2'-fluorocytidine-3'-phosphate
  modified_base 11: mod_base = OTHER; note = 2'-fluorouridine-3'-phosphate
  modified_base 12: mod_base = OTHER; note = 2'-O-methyluridine-3'-phosphate
  modified_base 13: mod_base = OTHER; note = 2'-O-methyladenosine-3'-phosphate
  modified_base 14: mod_base = OTHER; note = 2'-O-methylguanosine-3'-phosphate
  modified_base 15: mod_base = OTHER; note = 2'-O-methyladenosine-3'-phosphate
  modified_base 16: mod_base = OTHER; note = 2'-O-methylguanosine-3'-phosphate
  modified_base 17: mod_base = OTHER; note = 2'-O-methyladenosine-3'-phosphate
  modified_base 18: mod_base = OTHER; note = 2'-O-methylguanosine-3'-phosphate
  modified_base 19: mod_base = OTHER; note = 2'-O-methyladenosine-3'-phosphate
  modified_base 20: mod_base = OTHER; note = 2'-O-methyladenosine-3'-phosphate
  modified_base 21: mod_base = OTHER; note = 2'-O-methyladenosine-3'-phosphate attached to N-[tris(N-acetylgalactosamine-alkyl)-amidodecanoyl)]-4-hydr oxyprolinol Hyp-(N-acetylgalactosamine-alkyl)3
atgttacttcttagagagaaa

SEQ ID NO: 2091 - RNA, 23 nt, synthetic construct
  misc_feature 1..23: note = Description of Artificial Sequence: Synthetic oligonucleotide
  source 1..23: mol_type = other RNA
  modified_base 1: mod_base = OTHER; note = 2'-O-methyluridine-3'-phosphorothioate
  modified_base 2: mod_base = OTHER; note = 2'-fluorouridine -3'-phosphorothioate
  modified_base 3: mod_base = OTHER; note = 2'-O-methyluridine-3'-phosphate
  modified_base 4: mod_base = OTHER; note = 2'-O-methylcytidine-3'-phosphate
  modified_base 5: mod_base = OTHER; note = 2'-O-methyluridine-3'-phosphate
  modified_base 6: mod_base = OTHER; note = 2'-fluorocytidine-3'-phosphate
  modified_base 7: mod_base = OTHER; note = 2'-O-methyluridine-3'-phosphate
  modified_base 8: mod_base = OTHER; note = 2'-fluorocytidine-3'-phosphate
  modified_base 9: mod_base = OTHER; note = 2'-fluorouridine-3'-phosphate
  modified_base 10: mod_base = OTHER; note = 2'-O-methyladenosine-3'-phosphate
  modified_base 11: mod_base = OTHER; note = 2'-O-methyladenosine-3'-phosphate
  modified_base 12: mod_base = OTHER; note = 2'-O-methylguanosine-3'-phosphate
  modified_base 13: mod_base = OTHER; note = 2'-O-methyladenosine-3'-phosphate
  modified_base 14: mod_base = OTHER; note = 2'-fluoroadenosine-3'-phosphate
  modified_base 15: mod_base = OTHER; note = 2'-O-methylguanosine-3'-phosphate
  modified_base 16: mod_base = OTHER; note = 2'-fluorouridine-3'-phosphate
  modified_base 17: mod_base = OTHER; note = 2'-O-methyladenosine-3'-phosphate
  modified_base 18: mod_base = OTHER; note = 2'-O-methyladenosine-3'-phosphate
  modified_base 19: mod_base = OTHER; note = 2'-O-methylcytidine-3'-phosphate
  modified_base 20: mod_base = OTHER; note = 2'-O-methyladenosine-3'-phosphate
  modified_base 21: mod_base = OTHER; note = 2'-O-methyluridine-3'-phosphorothioate
  modified_base 22: mod_base = OTHER; note = 2'-O-methyladenosine-3'- phosphorothioate
  modified_base 23: mod_base = OTHER; note = 2'-O-methylcytidine-3'-phosphate
tttctctctaagaagtaacatac

SEQ ID NO: 2092 - RNA, 21 nt, synthetic construct
  misc_feature 1..21: note = Description of Artificial Sequence: Synthetic oligonucleotide
  source 1..21: mol_type = other RNA
  modified_base 1: mod_base = OTHER; note = 2'-O-methyluridine-3'-phosphorothioate
  modified_base 2: mod_base = OTHER; note = 2'-O-methylguanosine-3'- phosphorothioate
  modified_base 3: mod_base = OTHER; note = 2'-O-methyluridine-3'-phosphate
  modified_base 4: mod_base = OTHER; note = 2'-O-methyluridine-3'-phosphate
  modified_base 5: mod_base = OTHER; note = 2'-O-methyladenosine-3'-phosphate
  modified_base 6: mod_base = OTHER; note = 2'-O-methylcytidine-3'-phosphate
  modified_base 7: mod_base = OTHER; note = 2'-fluorouridine-3'-phosphate
  modified_base 8: mod_base = OTHER; note = 2'-O-methyluridine-3'-phosphate
  modified_base 9: mod_base = OTHER; note = 2'-fluorocytidine-3'-phosphate
  modified_base 10: mod_base = OTHER; note = 2'-fluorouridine-3'-phosphate
  modified_base 11: mod_base = OTHER; note = 2'-fluorouridine-3'-phosphate
  modified_base 12: mod_base = OTHER; note = 2'-O-methyladenosine-3'-phosphate
  modified_base 13: mod_base = OTHER; note = 2'-O-methylguanosine-3'-phosphate
  modified_base 14: mod_base = OTHER; note = 2'-O-methyladenosine-3'-phosphate
  modified_base 15: mod_base = OTHER; note = 2'-O-methylguanosine-3'-phosphate
  modified_base 16: mod_base = OTHER; note = 2'-O-methyladenosine-3'-phosphate
  modified_base 17: mod_base = OTHER; note = 2'-O-methylguanosine-3'-phosphate
  modified_base 18: mod_base = OTHER; note = 2'-O-methyladenosine-3'-phosphate
  modified_base 19: mod_base = OTHER; note = 2'-O-methyladenosine-3'-phosphate
  modified_base 20: mod_base = OTHER; note = 2'-O-methyladenosine-3'-phosphate
  modified_base 21: mod_base = OTHER; note = 2'-O-methyluridine-3'-phosphate attached to N-[tris(N-acetylgalactosamine-alkyl)-amidodecanoyl)]-4-hydr oxyprolinol Hyp-(N-acetylgalactosamine-alkyl)3
tgttacttcttagagagaaat

SEQ ID NO: 2093 - RNA, 23 nt, synthetic construct
  misc_feature 1..23: note = Description of Artificial Sequence: Synthetic oligonucleotide
  source 1..23: mol_type = other RNA
  modified_base 1: mod_base = OTHER; note = 2'-O-methyladenosine-3'- phosphorothioate
  modified_base 2: mod_base = OTHER; note = 2'-fluorouridine -3'-phosphorothioate
  modified_base 3: mod_base = OTHER; note = 2'-O-methyluridine-3'-phosphate
  modified_base 4: mod_base = OTHER; note = 2'-O-methyluridine-3'-phosphate
  modified_base 5: mod_base = OTHER; note = 2'-O-methylcytidine-3'-phosphate
  modified_base 6: mod_base = OTHER; note = 2'-fluorouridine-3'-phosphate
  modified_base 7: mod_base = OTHER; note = 2'-O-methylcytidine-3'-phosphate
  modified_base 8: mod_base = OTHER; note = 2'-fluorouridine-3'-phosphate
  modified_base 9: mod_base = OTHER; note = 2'-fluorocytidine-3'-phosphate
  modified_base 10: mod_base = OTHER; note = 2'-O-methyluridine-3'-phosphate
  modified_base 11: mod_base = OTHER; note = 2'-O-methyladenosine-3'-phosphate
  modified_base 12: mod_base = OTHER; note = 2'-O-methyladenosine-3'-phosphate
  modified_base 13: mod_base = OTHER; note = 2'-O-methylguanosine-3'-phosphate
  modified_base 14: mod_base = OTHER; note = 2'-fluoroadenosine-3'-phosphate
  modified_base 15: mod_base = OTHER; note = 2'-O-methyladenosine-3'-phosphate
  modified_base 16: mod_base = OTHER; note = 2'-fluoroguanosine-3'-phosphate
  modified_base 17: mod_base = OTHER; note = 2'-O-methyluridine-3'-phosphate
  modified_base 18: mod_base = OTHER; note = 2'-O-methyladenosine-3'-phosphate
  modified_base 19: mod_base = OTHER; note = 2'-O-methyladenosine-3'-phosphate
  modified_base 20: mod_base = OTHER; note = 2'-O-methylcytidine-3'-phosphate
  modified_base 21: mod_base = OTHER; note = 2'-O-methyladenosine-3'- phosphorothioate
  modified_base 22: mod_base = OTHER; note = 2'-O-methyluridine-3'-phosphorothioate
  modified_base 23: mod_base = OTHER; note = 2'-O-methyladenosine-3'-phosphate
atttctctctaagaagtaacata

SEQ ID NO: 2094 - RNA, 21 nt, synthetic construct
  misc_feature 1..21: note = Description of Artificial Sequence: Synthetic oligonucleotide
  source 1..21: mol_type = other RNA
  modified_base 1: mod_base = OTHER; note = 2'-O-methyladenosine-3'- phosphorothioate
  modified_base 2: mod_base = OTHER; note = 2'-O-methyluridine-3'-phosphorothioate
  modified_base 3: mod_base = OTHER; note = 2'-O-methylguanosine-3'-phosphate
  modified_base 4: mod_base = OTHER; note = 2'-O-methyluridine-3'-phosphate
  modified_base 5: mod_base = OTHER; note = 2'-O-methyladenosine-3'-phosphate
  modified_base 6: mod_base = OTHER; note = 2'-O-methyluridine-3'-phosphate
  modified_base 7: mod_base = OTHER; note = 2'-fluoroguanosine-3'-phosphate
  modified_base 8: mod_base = OTHER; note = 2'-O-methyluridine-3'-phosphate
  modified_base 9: mod_base = OTHER; note = 2'-fluorouridine-3'-phosphate
  modified_base 10: mod_base = OTHER; note = 2'-fluoroadenosine-3'-phosphate
  modified_base 11: mod_base = OTHER; note = 2'-fluorocytidine-3'-phosphate
  modified_base 12: mod_base = OTHER; note = 2'-O-methyluridine-3'-phosphate
  modified_base 13: mod_base = OTHER; note = 2'-O-methyluridine-3'-phosphate
  modified_base 14: mod_base = OTHER; note = 2'-O-methylcytidine-3'-phosphate
  modified_base 15: mod_base = OTHER; note = 2'-O-methyluridine-3'-phosphate
  modified_base 16: mod_base = OTHER; note = 2'-O-methyluridine-3'-phosphate
  modified_base 17: mod_base = OTHER; note = 2'-O-methyladenosine-3'-phosphate
  modified_base 18: mod_base = OTHER; note = 2'-O-methylguanosine-3'-phosphate
  modified_base 19: mod_base = OTHER; note = 2'-O-methyladenosine-3'-phosphate
  modified_base 20: mod_base = OTHER; note = 2'-O-methylguanosine-3'-phosphate
  modified_base 21: mod_base = OTHER; note = 2'-O-methyladenosine-3'-phosphate attached to N-[tris(N-acetylgalactosamine-alkyl)-amidodecanoyl)]-4-hydr oxyprolinol Hyp-(N-acetylgalactosamine-alkyl)3
atgtatgttacttcttagaga

SEQ ID NO: 2095 - RNA, 23 nt, synthetic construct
  misc_feature 1..23: note = Description of Artificial Sequence: Synthetic oligonucleotide
  source 1..23: mol_type = other RNA
  modified_base 1: mod_base = OTHER; note = 2'-O-methyluridine-3'-phosphorothioate
  modified_base 2: mod_base = OTHER; note = 2'-fluorocytidine-3'-phosphorothioate
  modified_base 3: mod_base = OTHER; note = 2'-O-methyluridine-3'-phosphate
  modified_base 4: mod_base = OTHER; note = 2'-O-methylcytidine-3'-phosphate
  modified_base 5: mod_base = OTHER; note = 2'-O-methyluridine-3'-phosphate
  modified_base 6: mod_base = OTHER; note = 2'-fluoroadenosine-3'-phosphate
  modified_base 7: mod_base = OTHER; note = 2'-O-methyladenosine-3'-phosphate
  modified_base 8: mod_base = OTHER; note = 2'-fluoroguanosine-3'-phosphate
  modified_base 9: mod_base = OTHER; note = 2'-fluoroadenosine-3'-phosphate
  modified_base 10: mod_base = OTHER; note = 2'-O-methyladenosine-3'-phosphate
  modified_base 11: mod_base = OTHER; note = 2'-O-methylguanosine-3'-phosphate
  modified_base 12: mod_base = OTHER; note = 2'-O-methyluridine-3'-phosphate
  modified_base 13: mod_base = OTHER; note = 2'-O-methyladenosine-3'-phosphate
  modified_base 14: mod_base = OTHER; note = 2'-fluoroadenosine-3'-phosphate
  modified_base 15: mod_base = OTHER; note = 2'-O-methylcytidine-3'-phosphate
  modified_base 16: mod_base = OTHER; note = 2'-fluoroadenosine-3'-phosphate
  modified_base 17: mod_base = OTHER; note = 2'-O-methyluridine-3'-phosphate
  modified_base 18: mod_base = OTHER; note = 2'-O-methyladenosine-3'-phosphate
  modified_base 19: mod_base = OTHER; note = 2'-O-methylcytidine-3'-phosphate
  modified_base 20: mod_base = OTHER; note = 2'-O-methyladenosine-3'-phosphate
  modified_base 21: mod_base = OTHER; note = 2'-O-methyluridine-3'-phosphorothioate
  modified_base 22: mod_base = OTHER; note = 2'-O-methylcytidine-3'- phosphorothioate
  modified_base 23: mod_base = OTHER; note = 2'-O-methylcytidine-3'-phosphate
tctctaagaagtaacatacatcc

SEQ ID NO: 2096 - RNA, 21 nt, synthetic construct
  misc_feature 1..21: note = Description of Artificial Sequence: Synthetic oligonucleotide
  source 1..21: mol_type = other RNA
  modified_base 1: mod_base = OTHER; note = 2'-O-methylguanosine-3'- phosphorothioate
  modified_base 2: mod_base = OTHER; note = 2'-O-methyladenosine-3'- phosphorothioate
  modified_base 3: mod_base = OTHER; note = 2'-O-methyluridine-3'-phosphate
  modified_base 4: mod_base = OTHER; note = 2'-O-methylguanosine-3'-phosphate
  modified_base 5: mod_base = OTHER; note = 2'-O-methyluridine-3'-phosphate
  modified_base 6: mod_base = OTHER; note = 2'-O-methyladenosine-3'-phosphate
  modified_base 7: mod_base = OTHER; note = 2'-fluorouridine-3'-phosphate
  modified_base 8: mod_base = OTHER; note = 2'-O-methylguanosine-3'-phosphate
  modified_base 9: mod_base = OTHER; note = 2'-fluorouridine-3'-phosphate
  modified_base 10: mod_base = OTHER; note = 2'-fluorouridine-3'-phosphate
  modified_base 11: mod_base = OTHER; note = 2'-fluoroadenosine-3'-phosphate
  modified_base 12: mod_base = OTHER; note = 2'-O-methylcytidine-3'-phosphate
  modified_base 13: mod_base = OTHER; note = 2'-O-methyluridine-3'-phosphate
  modified_base 14: mod_base = OTHER; note = 2'-O-methyluridine-3'-phosphate
  modified_base 15: mod_base = OTHER; note = 2'-O-methylcytidine-3'-phosphate
  modified_base 16: mod_base = OTHER; note = 2'-O-methyluridine-3'-phosphate
  modified_base 17: mod_base = OTHER; note = 2'-O-methyluridine-3'-phosphate
  modified_base 18: mod_base = OTHER; note = 2'-O-methyladenosine-3'-phosphate
  modified_base 19: mod_base = OTHER; note = 2'-O-methylguanosine-3'-phosphate
  modified_base 20: mod_base = OTHER; note = 2'-O-methyladenosine-3'-phosphate
  modified_base 21: mod_base = OTHER; note = 2'-O-methylguanosine-3'-phosphate attached to N-[tris(N-acetylgalactosamine-alkyl)-amidodecanoyl)]-4-hydr oxyprolinol Hyp-(N-acetylgalactosamine-alkyl)3
gatgtatgttacttcttagag

SEQ ID NO: 2097 - RNA, 23 nt, synthetic construct
  misc_feature 1..23: note = Description of Artificial Sequence: Synthetic oligonucleotide
  source 1..23: mol_type = other RNA
  modified_base 1: mod_base = OTHER; note = 2'-O-methylcytidine-3'- phosphorothioate
  modified_base 2: mod_base = OTHER; note = 2'-fluorouridine -3'-phosphorothioate
  modified_base 3: mod_base = OTHER; note = 2'-O-methylcytidine-3'-phosphate
  modified_base 4: mod_base = OTHER; note = 2'-O-methyluridine-3'-phosphate
  modified_base 5: mod_base = OTHER; note = 2'-O-methyladenosine-3'-phosphate
  modified_base 6: mod_base = OTHER; note = 2'-fluoroadenosine-3'-phosphate
  modified_base 7: mod_base = OTHER; note = 2'-O-methylguanosine-3'-phosphate
  modified_base 8: mod_base = OTHER; note = 2'-fluoroadenosine-3'-phosphate
  modified_base 9: mod_base = OTHER; note = 2'-fluoroadenosine-3'-phosphate
  modified_base 10: mod_base = OTHER; note = 2'-O-methylguanosine-3'-phosphate
  modified_base 11: mod_base = OTHER; note = 2'-O-methyluridine-3'-phosphate
  modified_base 12: mod_base = OTHER; note = 2'-O-methyladenosine-3'-phosphate
  modified_base 13: mod_base = OTHER; note = 2'-O-methyladenosine-3'-phosphate
  modified_base 14: mod_base = OTHER; note = 2'-fluorocytidine-3'-phosphate
  modified_base 15: mod_base = OTHER; note = 2'-O-methyladenosine-3'-phosphate
  modified_base 16: mod_base = OTHER; note = 2'-fluorouridine-3'-phosphate
  modified_base 17: mod_base = OTHER; note = 2'-O-methyladenosine-3'-phosphate
  modified_base 18: mod_base = OTHER; note = 2'-O-methylcytidine-3'-phosphate
  modified_base 19: mod_base = OTHER; note = 2'-O-methyladenosine-3'-phosphate
  modified_base 20: mod_base = OTHER; note = 2'-O-methyluridine-3'-phosphate
  modified_base 21: mod_base = OTHER; note = 2'-O-methylcytidine-3'- phosphorothioate
  modified_base 22: mod_base = OTHER; note = 2'-O-methylcytidine-3'- phosphorothioate
  modified_base 23: mod_base = OTHER; note = 2'-O-methyluridine-3'-phosphate
ctctaagaagtaacatacatcct

SEQ ID NO: 2098 - RNA, 21 nt, synthetic construct
  misc_feature 1..21: note = Description of Artificial Sequence: Synthetic oligonucleotide
  source 1..21: mol_type = other RNA
  modified_base 1: mod_base = OTHER; note = 2'-O-methyladenosine-3'- phosphorothioate
  modified_base 2: mod_base = OTHER; note = 2'-O-methylcytidine-3'- phosphorothioate
  modified_base 3: mod_base = OTHER; note = 2'-O-methyladenosine-3'-phosphate
  modified_base 4: mod_base = OTHER; note = 2'-O-methyladenosine-3'-phosphate
  modified_base 5: mod_base = OTHER; note = 2'-O-methylcytidine-3'-phosphate
  modified_base 6: mod_base = OTHER; note = 2'-O-methyluridine-3'-phosphate
  modified_base 7: mod_base = OTHER; note = 2'-fluorouridine-3'-phosphate
  modified_base 8: mod_base = OTHER; note = 2'-O-methyluridine-3'-phosphate
  modified_base 9: mod_base = OTHER; note = 2'-fluoroguanosine-3'-phosphate
  modified_base 10: mod_base = OTHER; note = 2'-fluoroadenosine-3'-phosphate
  modified_base 11: mod_base = OTHER; note = 2'-fluoroguanosine-3'-phosphate
  modified_base 12: mod_base = OTHER; note = 2'-O-methyladenosine-3'-phosphate
  modified_base 13: mod_base = OTHER; note = 2'-O-methyladenosine-3'-phosphate
  modified_base 14: mod_base = OTHER; note = 2'-O-methylguanosine-3'-phosphate
  modified_base 15: mod_base = OTHER; note = 2'-O-methylguanosine-3'-phosphate
  modified_base 16: mod_base = OTHER; note = 2'-O-methyluridine-3'-phosphate
  modified_base 17: mod_base = OTHER; note = 2'-O-methyladenosine-3'-phosphate
  modified_base 18: mod_base = OTHER; note = 2'-O-methylguanosine-3'-phosphate
  modified_base 19: mod_base = OTHER; note = 2'-O-methylcytidine-3'-phosphate
  modified_base 20: mod_base = OTHER; note = 2'-O-methyladenosine-3'-phosphate
  modified_base 21: mod_base = OTHER; note = 2'-O-methylcytidine-3'-phosphate attached to N-[tris(N-acetylgalactosamine-alkyl)-amidodecanoyl)]-4-hydr oxyprolinol Hyp-(N-acetylgalactosamine-alkyl)3
acaactttgagaaggtagcac

SEQ ID NO: 2099 - RNA, 23 nt, synthetic construct
  misc_feature 1..23: note = Description of Artificial Sequence: Synthetic oligonucleotide
  source 1..23: mol_type = other RNA
  modified_base 1: mod_base = OTHER; note = 2'-O-methylguanosine-3'- phosphorothioate
  modified_base 2: mod_base = OTHER; note = 2'-fluorouridine -3'-phosphorothioate
  modified_base 3: mod_base = OTHER; note = 2'-O-methylguanosine-3'-phosphate
  modified_base 4: mod_base = OTHER; note = 2'-O-methylcytidine-3'-phosphate
  modified_base 5: mod_base = OTHER; note = 2'-O-methyluridine-3'-phosphate
  modified_base 6: mod_base = OTHER; note = 2'-fluoroadenosine-3'-phosphate
  modified_base 7: mod_base = OTHER; note = 2'-O-methylcytidine-3'-phosphate
  modified_base 8: mod_base = OTHER; note = 2'-fluorocytidine-3'-phosphate
  modified_base 9: mod_base = OTHER; note = 2'-fluorouridine-3'-phosphate
  modified_base 10: mod_base = OTHER; note = 2'-O-methyluridine-3'-phosphate
  modified_base 11: mod_base = OTHER; note = 2'-O-methylcytidine-3'-phosphate
  modified_base 12: mod_base = OTHER; note = 2'-O-methyluridine-3'-phosphate
  modified_base 13: mod_base = OTHER; note = 2'-O-methylcytidine-3'-phosphate
  modified_base 14: mod_base = OTHER; note = 2'-fluoroadenosine-3'-phosphate
  modified_base 15: mod_base = OTHER; note = 2'-O-methyladenosine-3'-phosphate
  modified_base 16: mod_base = OTHER; note = 2'-fluoroadenosine-3'-phosphate
  modified_base 17: mod_base = OTHER; note = 2'-O-methylguanosine-3'-phosphate
  modified_base 18: mod_base = OTHER; note = 2'-O-methyluridine-3'-phosphate
  modified_base 19: mod_base = OTHER; note = 2'-O-methyluridine-3'-phosphate
  modified_base 20: mod_base = OTHER; note = 2'-O-methylguanosine-3'-phosphate
  modified_base 21: mod_base = OTHER; note = 2'-O-methyluridine-3'-phosphorothioate
  modified_base 22: mod_base = OTHER; note = 2'-O-methylguanosine-3'- phosphorothioate
  modified_base 23: mod_base = OTHER; note = 2'-O-methyladenosine-3'-phosphate
gtgctaccttctcaaagttgtga

SEQ ID NO: 2100 - RNA, 21 nt, synthetic construct
  misc_feature 1..21: note = Description of Artificial Sequence: Synthetic oligonucleotide
  source 1..21: mol_type = other RNA
  modified_base 1: mod_base = OTHER; note = 2'-O-methylcytidine-3'- phosphorothioate
  modified_base 2: mod_base = OTHER; note = 2'-O-methyladenosine-3'- phosphorothioate
  modified_base 3: mod_base = OTHER; note = 2'-O-methyladenosine-3'-phosphate
  modified_base 4: mod_base = OTHER; note = 2'-O-methylcytidine-3'-phosphate
  modified_base 5: mod_base = OTHER; note = 2'-O-methyluridine-3'-phosphate
  modified_base 6: mod_base = OTHER; note = 2'-O-methyluridine-3'-phosphate
  modified_base 7: mod_base = OTHER; note = 2'-fluorouridine-3'-phosphate
  modified_base 8: mod_base = OTHER; note = 2'-O-methylguanosine-3'-phosphate
  modified_base 9: mod_base = OTHER; note = 2'-fluoroadenosine-3'-phosphate
  modified_base 10: mod_base = OTHER; note = 2'-fluoroguanosine-3'-phosphate
  modified_base 11: mod_base = OTHER; note = 2'-fluoroadenosine-3'-phosphate
  modified_base 12: mod_base = OTHER; note = 2'-O-methyladenosine-3'-phosphate
  modified_base 13: mod_base = OTHER; note = 2'-O-methylguanosine-3'-phosphate
  modified_base 14: mod_base = OTHER; note = 2'-O-methylguanosine-3'-phosphate
  modified_base 15: mod_base = OTHER; note = 2'-O-methyluridine-3'-phosphate
  modified_base 16: mod_base = OTHER; note = 2'-O-methyladenosine-3'-phosphate
  modified_base 17: mod_base = OTHER; note = 2'-O-methylguanosine-3'-phosphate
  modified_base 18: mod_base = OTHER; note = 2'-O-methylcytidine-3'-phosphate
  modified_base 19: mod_base = OTHER; note = 2'-O-methyladenosine-3'-phosphate
  modified_base 20: mod_base = OTHER; note = 2'-O-methylcytidine-3'-phosphate
  modified_base 21: mod_base = OTHER; note = 2'-O-methyluridine-3'-phosphate attached to N-[tris(N-acetylgalactosamine-alkyl)-amidodecanoyl)]-4-hydr oxyprolinol Hyp-(N-acetylgalactosamine-alkyl)3
caactttgagaaggtagcact

SEQ ID NO: 2101 - RNA, 23 nt, synthetic construct
  misc_feature 1..23: note = Description of Artificial Sequence: Synthetic oligonucleotide
  source 1..23: mol_type = other RNA
  modified_base 1: mod_base = OTHER; note = 2'-O-methyladenosine-3'- phosphorothioate
  modified_base 2: mod_base = OTHER; note = 2'-fluoroguanosine-3'-phosphorothioate
  modified_base 3: mod_base = OTHER; note = 2'-O-methyluridine-3'-phosphate
  modified_base 4: mod_base = OTHER; note = 2'-O-methylguanosine-3'-phosphate
  modified_base 5: mod_base = OTHER; note = 2'-O-methylcytidine-3'-phosphate
  modified_base 6: mod_base = OTHER; note = 2'-fluorouridine-3'-phosphate
  modified_base 7: mod_base = OTHER; note = 2'-O-methyladenosine-3'-phosphate
  modified_base 8: mod_base = OTHER; note = 2'-fluorocytidine-3'-phosphate
  modified_base 9: mod_base = OTHER; note = 2'-fluorocytidine-3'-phosphate
  modified_base 10: mod_base = OTHER; note = 2'-O-methyluridine-3'-phosphate
  modified_base 11: mod_base = OTHER; note = 2'-O-methyluridine-3'-phosphate
  modified_base 12: mod_base = OTHER; note = 2'-O-methylcytidine-3'-phosphate
  modified_base 13: mod_base = OTHER; note = 2'-O-methyluridine-3'-phosphate
  modified_base 14: mod_base = OTHER; note = 2'-fluorocytidine-3'-phosphate
  modified_base 15: mod_base = OTHER; note = 2'-O-methyladenosine-3'-phosphate
  modified_base 16: mod_base = OTHER; note = 2'-fluoroadenosine-3'-phosphate
  modified_base 17: mod_base = OTHER; note = 2'-O-methyladenosine-3'-phosphate
  modified_base 18: mod_base = OTHER; note = 2'-O-methylguanosine-3'-phosphate
  modified_base 19: mod_base = OTHER; note = 2'-O-methyluridine-3'-phosphate
  modified_base 20: mod_base = OTHER; note = 2'-O-methyluridine-3'-phosphate
  modified_base 21: mod_base = OTHER; note = 2'-O-methylguanosine-3'- phosphorothioate
  modified_base 22: mod_base = OTHER; note = 2'-O-methyluridine-3'-phosphorothioate
  modified_base 23: mod_base = OTHER; note = 2'-O-methylguanosine-3'-phosphate
agtgctaccttctcaaagttgtg

SEQ ID NO: 2102 - RNA, 21 nt, synthetic construct
  misc_feature 1..21: note = Description of Artificial Sequence: Synthetic oligonucleotide
  source 1..21: mol_type = other RNA
  modified_base 1: mod_base = OTHER; note = 2'-O-methyladenosine-3'- phosphorothioate
  modified_base 2: mod_base = OTHER; note = 2'-O-methyluridine-3'-phosphorothioate
  modified_base 3: mod_base = OTHER; note = 2'-O-methyluridine-3'-phosphate
  modified_base 4: mod_base = OTHER; note = 2'-O-methylcytidine-3'-phosphate
  modified_base 5: mod_base = OTHER; note = 2'-O-methyladenosine-3'-phosphate
  modified_base 6: mod_base = OTHER; note = 2'-O-methylcytidine-3'-phosphate
  modified_base 7: mod_base = OTHER; note = 2'-fluoroadenosine-3'-phosphate
  modified_base 8: mod_base = OTHER; note = 2'-O-methyladenosine-3'-phosphate
  modified_base 9: mod_base = OTHER; note = 2'-fluorocytidine-3'-phosphate
  modified_base 10: mod_base = OTHER; note = 2'-fluorouridine-3'-phosphate
  modified_base 11: mod_base = OTHER; note = 2'-fluorouridine-3'-phosphate
  modified_base 12: mod_base = OTHER; note = 2'-O-methyluridine-3'-phosphate
  modified_base 13: mod_base = OTHER; note = 2'-O-methylguanosine-3'-phosphate
  modified_base 14: mod_base = OTHER; note = 2'-O-methyladenosine-3'-phosphate
  modified_base 15: mod_base = OTHER; note = 2'-O-methylguanosine-3'-phosphate
  modified_base 16: mod_base = OTHER; note = 2'-O-methyladenosine-3'-phosphate
  modified_base 17: mod_base = OTHER; note = 2'-O-methyladenosine-3'-phosphate
  modified_base 18: mod_base = OTHER; note = 2'-O-methylguanosine-3'-phosphate
  modified_base 19: mod_base = OTHER; note = 2'-O-methylguanosine-3'-phosphate
  modified_base 20: mod_base = OTHER; note = 2'-O-methyluridine-3'-phosphate
  modified_base 21: mod_base = OTHER; note = 2'-O-methyladenosine-3'-phosphate attached to N-[tris(N-acetylgalactosamine-alkyl)-amidodecanoyl)]-4-hydr oxyprolinol Hyp-(N-acetylgalactosamine-alkyl)3
attcacaactttgagaaggta

SEQ ID NO: 2103 - RNA, 23 nt, synthetic construct
  misc_feature 1..23: note = Description of Artificial Sequence: Synthetic oligonucleotide
  source 1..23: mol_type = other RNA
  modified_base 1: mod_base = OTHER; note = 2'-O-methyluridine-3'-phosphorothioate
  modified_base 2: mod_base = OTHER; note = 2'-fluoroadenosine-3'-phosphorothioate
  modified_base 3: mod_base = OTHER; note = 2'-O-methylcytidine-3'-phosphate
  modified_base 4: mod_base = OTHER; note = 2'-O-methylcytidine-3'-phosphate
  modified_base 5: mod_base = OTHER; note = 2'-O-methyluridine-3'-phosphate
  modified_base 6: mod_base = OTHER; note = 2'-fluorouridine-3'-phosphate
  modified_base 7: mod_base = OTHER; note = 2'-O-methylcytidine-3'-phosphate
  modified_base 8: mod_base = OTHER; note = 2'-fluorouridine-3'-phosphate
  modified_base 9: mod_base = OTHER; note = 2'-fluorocytidine-3'-phosphate
  modified_base 10: mod_base = OTHER; note = 2'-O-methyladenosine-3'-phosphate
  modified_base 11: mod_base = OTHER; note = 2'-O-methyladenosine-3'-phosphate
  modified_base 12: mod_base = OTHER; note = 2'-O-methyladenosine-3'-phosphate
  modified_base 13: mod_base = OTHER; note = 2'-O-methylguanosine-3'-phosphate
  modified_base 14: mod_base = OTHER; note = 2'-fluorouridine-3'-phosphate
  modified_base 15: mod_base = OTHER; note = 2'-O-methyluridine-3'-phosphate
  modified_base 16: mod_base = OTHER; note = 2'-fluoroguanosine-3'-phosphate
  modified_base 17: mod_base = OTHER; note = 2'-O-methyluridine-3'-phosphate
  modified_base 18: mod_base = OTHER; note = 2'-O-methylguanosine-3'-phosphate
  modified_base 19: mod_base = OTHER; note = 2'-O-methyladenosine-3'-phosphate
  modified_base 20: mod_base = OTHER; note = 2'-O-methyladenosine-3'-phosphate
  modified_base 21: mod_base = OTHER; note = 2'-O-methyluridine-3'-phosphorothioate
  modified_base 22: mod_base = OTHER; note = 2'-O-methylcytidine-3'- phosphorothioate
  modified_base 23: mod_base = OTHER; note = 2'-O-methyladenosine-3'-phosphate
taccttctcaaagttgtgaatca

SEQ ID NO: 2104 - RNA, 21 nt, synthetic construct
  misc_feature 1..21: note = Description of Artificial Sequence: Synthetic oligonucleotide
  source 1..21: mol_type = other RNA
  modified_base 1: mod_base = OTHER; note = 2'-O-methylguanosine-3'- phosphorothioate
  modified_base 2: mod_base = OTHER; note = 2'-O-methyladenosine-3'- phosphorothioate
  modified_base 3: mod_base = OTHER; note = 2'-O-methyluridine-3'-phosphate
  modified_base 4: mod_base = OTHER; note = 2'-O-methyluridine-3'-phosphate
  modified_base 5: mod_base = OTHER; note = 2'-O-methylcytidine-3'-phosphate
  modified_base 6: mod_base = OTHER; note = 2'-O-methyladenosine-3'-phosphate
  modified_base 7: mod_base = OTHER; note = 2'-fluorocytidine-3'-phosphate
  modified_base 8: mod_base = OTHER; note = 2'-O-methyladenosine-3'-phosphate
  modified_base 9: mod_base = OTHER; note = 2'-fluoroadenosine-3'-phosphate
  modified_base 10: mod_base = OTHER; note = 2'-fluorocytidine-3'-phosphate
  modified_base 11: mod_base = OTHER; note = 2'-fluorouridine-3'-phosphate
  modified_base 12: mod_base = OTHER; note = 2'-O-methyluridine-3'-phosphate
  modified_base 13: mod_base = OTHER; note = 2'-O-methyluridine-3'-phosphate
  modified_base 14: mod_base = OTHER; note = 2'-O-methylguanosine-3'-phosphate
  modified_base 15: mod_base = OTHER; note = 2'-O-methyladenosine-3'-phosphate
  modified_base 16: mod_base = OTHER; note = 2'-O-methylguanosine-3'-phosphate
  modified_base 17: mod_base = OTHER; note = 2'-O-methyladenosine-3'-phosphate
  modified_base 18: mod_base = OTHER; note = 2'-O-methyladenosine-3'-phosphate
  modified_base 19: mod_base = OTHER; note = 2'-O-methylguanosine-3'-phosphate
  modified_base 20: mod_base = OTHER; note = 2'-O-methylguanosine-3'-phosphate
  modified_base 21: mod_base = OTHER; note = 2'-O-methyluridine-3'-phosphate attached to N-[tris(N-acetylgalactosamine-alkyl)-amidodecanoyl)]-4-hydr oxyprolinol Hyp-(N-acetylgalactosamine-alkyl)3
gattcacaactttgagaaggt

SEQ ID NO: 2105 - RNA, 23 nt, synthetic construct
  misc_feature 1..23: note = Description of Artificial Sequence: Synthetic oligonucleotide
  source 1..23: mol_type = other RNA
  modified_base 1: mod_base = OTHER; note = 2'-O-methyladenosine-3'- phosphorothioate
  modified_base 2: mod_base = OTHER; note = 2'-fluorocytidine-3'-phosphorothioate
  modified_base 3: mod_base = OTHER; note = 2'-O-methylcytidine-3'-phosphate
  modified_base 4: mod_base = OTHER; note = 2'-O-methyluridine-3'-phosphate
  modified_base 5: mod_base = OTHER; note = 2'-O-methyluridine-3'-phosphate
  modified_base 6: mod_base = OTHER; note = 2'-fluorocytidine-3'-phosphate
  modified_base 7: mod_base = OTHER; note = 2'-O-methyluridine-3'-phosphate
  modified_base 8: mod_base = OTHER; note = 2'-fluorocytidine-3'-phosphate
  modified_base 9: mod_base = OTHER; note = 2'-fluoroadenosine-3'-phosphate
  modified_base 10: mod_base = OTHER; note = 2'-O-methyladenosine-3'-phosphate
  modified_base 11: mod_base = OTHER; note = 2'-O-methyladenosine-3'-phosphate
  modified_base 12: mod_base = OTHER; note = 2'-O-methylguanosine-3'-phosphate
  modified_base 13: mod_base = OTHER; note = 2'-O-methyluridine-3'-phosphate
  modified_base 14: mod_base = OTHER; note = 2'-fluorouridine-3'-phosphate
  modified_base 15: mod_base = OTHER; note = 2'-O-methylguanosine-3'-phosphate
  modified_base 16: mod_base = OTHER; note = 2'-fluorouridine-3'-phosphate
  modified_base 17: mod_base = OTHER; note = 2'-O-methylguanosine-3'-phosphate
  modified_base 18: mod_base = OTHER; note = 2'-O-methyladenosine-3'-phosphate
  modified_base 19: mod_base = OTHER; note = 2'-O-methyladenosine-3'-phosphate
  modified_base 20: mod_base = OTHER; note = 2'-O-methyluridine-3'-phosphate
  modified_base 21: mod_base = OTHER; note = 2'-O-methylcytidine-3'- phosphorothioate
  modified_base 22: mod_base = OTHER; note = 2'-O-methyladenosine-3'- phosphorothioate
  modified_base 23: mod_base = OTHER; note = 2'-O-methylguanosine-3'-phosphate
accttctcaaagttgtgaatcag

SEQ ID NO: 2106 - RNA, 21 nt, synthetic construct
  misc_feature 1..21: note = Description of Artificial Sequence: Synthetic oligonucleotide
  source 1..21: mol_type = other RNA
  modified_base 1: mod_base = OTHER; note = 2'-O-methyladenosine-3'- phosphorothioate
  modified_base 2: mod_base = OTHER; note = 2'-O-methyladenosine-3'- phosphorothioate
  modified_base 3: mod_base = OTHER; note = 2'-O-methylcytidine-3'-phosphate
  modified_base 4: mod_base = OTHER; note = 2'-O-methyladenosine-3'-phosphate
  modified_base 5: mod_base = OTHER; note = 2'-O-methyluridine-3'-phosphate
  modified_base 6: mod_base = OTHER; note = 2'-O-methylguanosine-3'-phosphate
  modified_base 7: mod_base = OTHER; note = 2'-fluorocytidine-3'-phosphate
  modified_base 8: mod_base = OTHER; note = 2'-O-methyluridine-3'-phosphate
  modified_base 9: mod_base = OTHER; note = 2'-fluoroadenosine-3'-phosphate
  modified_base 10: mod_base = OTHER; note = 2'-fluoroadenosine-3'-phosphate
  modified_base 11: mod_base = OTHER; note = 2'-fluoroadenosine-3'-phosphate
  modified_base 12: mod_base = OTHER; note = 2'-O-methyluridine-3'-phosphate
  modified_base 13: mod_base = OTHER; note = 2'-O-methylcytidine-3'-phosphate
  modified_base 14: mod_base = OTHER; note = 2'-O-methyladenosine-3'-phosphate
  modified_base 15: mod_base = OTHER; note = 2'-O-methylguanosine-3'-phosphate
  modified_base 16: mod_base = OTHER; note = 2'-O-methyluridine-3'-phosphate
  modified_base 17: mod_base = OTHER; note = 2'-O-methyladenosine-3'-phosphate
  modified_base 18: mod_base = OTHER; note = 2'-O-methylcytidine-3'-phosphate
  modified_base 19: mod_base = OTHER; note = 2'-O-methyluridine-3'-phosphate
  modified_base 20: mod_base = OTHER; note = 2'-O-methyluridine-3'-phosphate
  modified_base 21: mod_base = OTHER; note = 2'-O-methylcytidine-3'-phosphate attached to N-[tris(N-acetylgalactosamine-alkyl)-amidodecanoyl)]-4-hydr oxyprolinol Hyp-(N-acetylgalactosamine-alkyl)3
aacatgctaaatcagtacttc

SEQ ID NO: 2107 - RNA, 23 nt, synthetic construct
  misc_feature 1..23: note = Description of Artificial Sequence: Synthetic oligonucleotide
  source 1..23: mol_type = other RNA
  modified_base 1: mod_base = OTHER; note = 2'-O-methylguanosine-3'- phosphorothioate
  modified_base 2: mod_base = OTHER; note = 2'-fluoroadenosine-3'-phosphorothioate
  modified_base 3: mod_base = OTHER; note = 2'-O-methyladenosine-3'-phosphate
  modified_base 4: mod_base = OTHER; note = 2'-O-methylguanosine-3'-phosphate
  modified_base 5: mod_base = OTHER; note = 2'-O-methyluridine-3'-phosphate
  modified_base 6: mod_base = OTHER; note = 2'-fluoroadenosine-3'-phosphate
  modified_base 7: mod_base = OTHER; note = 2'-O-methylcytidine-3'-phosphate
  modified_base 8: mod_base = OTHER; note = 2'-fluorouridine-3'-phosphate
  modified_base 9: mod_base = OTHER; note = 2'-fluoroguanosine-3'-phosphate
  modified_base 10: mod_base = OTHER; note = 2'-O-methyladenosine-3'-phosphate
  modified_base 11: mod_base = OTHER; note = 2'-O-methyluridine-3'-phosphate
  modified_base 12: mod_base = OTHER; note = 2'-O-methyluridine-3'-phosphate
  modified_base 13: mod_base = OTHER; note = 2'-O-methyluridine-3'-phosphate
  modified_base 14: mod_base = OTHER; note = 2'-fluoroadenosine-3'-phosphate
  modified_base 15: mod_base = OTHER; note = 2'-O-methylguanosine-3'-phosphate
  modified_base 16: mod_base = OTHER; note = 2'-fluorocytidine-3'-phosphate
  modified_base 17: mod_base = OTHER; note = 2'-O-methyladenosine-3'-phosphate
  modified_base 18: mod_base = OTHER; note = 2'-O-methyluridine-3'-phosphate
  modified_base 19: mod_base = OTHER; note = 2'-O-methylguanosine-3'-phosphate
  modified_base 20: mod_base = OTHER; note = 2'-O-methyluridine-3'-phosphate
  modified_base 21: mod_base = OTHER; note = 2'-O-methyluridine-3'-phosphorothioate
  modified_base 22: mod_base = OTHER; note = 2'-O-methylguanosine-3'- phosphorothioate
  modified_base 23: mod_base = OTHER; note = 2'-O-methyluridine-3'-phosphate
gaagtactgatttagcatgttgt

SEQ ID NO: 2108 - RNA, 21 nt, synthetic construct
  misc_feature 1..21: note = Description of Artificial Sequence: Synthetic oligonucleotide
  source 1..21: mol_type = other RNA
  modified_base 1: mod_base = OTHER; note = 2'-O-methyladenosine-3'- phosphorothioate
  modified_base 2: mod_base = OTHER; note = 2'-O-methylcytidine-3'- phosphorothioate
  modified_base 3: mod_base = OTHER; note = 2'-O-methyladenosine-3'-phosphate
  modified_base 4: mod_base = OTHER; note = 2'-O-methyluridine-3'-phosphate
  modified_base 5: mod_base = OTHER; note = 2'-O-methylguanosine-3'-phosphate
  modified_base 6: mod_base = OTHER; note = 2'-O-methylcytidine-3'-phosphate
  modified_base 7: mod_base = OTHER; note = 2'-fluorouridine-3'-phosphate
  modified_base 8: mod_base = OTHER; note = 2'-O-methyladenosine-3'-phosphate
  modified_base 9: mod_base = OTHER; note = 2'-fluoroadenosine-3'-phosphate
  modified_base 10: mod_base = OTHER; note = 2'-fluoroadenosine-3'-phosphate
  modified_base 11: mod_base = OTHER; note = 2'-fluorouridine-3'-phosphate
  modified_base 12: mod_base = OTHER; note = 2'-O-methylcytidine-3'-phosphate
  modified_base 13: mod_base = OTHER; note = 2'-O-methyladenosine-3'-phosphate
  modified_base 14: mod_base = OTHER; note = 2'-O-methylguanosine-3'-phosphate
  modified_base 15: mod_base = OTHER; note = 2'-O-methyluridine-3'-phosphate
  modified_base 16: mod_base = OTHER; note = 2'-O-methyladenosine-3'-phosphate
  modified_base 17: mod_base = OTHER; note = 2'-O-methylcytidine-3'-phosphate
  modified_base 18: mod_base = OTHER; note = 2'-O-methyluridine-3'-phosphate
  modified_base 19: mod_base = OTHER; note = 2'-O-methyluridine-3'-phosphate
  modified_base 20: mod_base = OTHER; note = 2'-O-methylcytidine-3'-phosphate
  modified_base 21: mod_base = OTHER; note = 2'-O-methylcytidine-3'-phosphate attached to N-[tris(N-acetylgalactosamine-alkyl)-amidodecanoyl)]-4-hydr oxyprolinol Hyp-(N-acetylgalactosamine-alkyl)3
acatgctaaatcagtacttcc

SEQ ID NO: 2109 - RNA, 23 nt, synthetic construct
  misc_feature 1..23: note = Description of Artificial Sequence: Synthetic oligonucleotide
  source 1..23: mol_type = other RNA
  modified_base 1: mod_base = OTHER; note = 2'-O-methylguanosine-3'- phosphorothioate
  modified_base 2: mod_base = OTHER; note = 2'-fluoroguanosine-3'-phosphorothioate
  modified_base 3: mod_base = OTHER; note = 2'-O-methyladenosine-3'-phosphate
  modified_base 4: mod_base = OTHER; note = 2'-O-methyladenosine-3'-phosphate
  modified_base 5: mod_base = OTHER; note = 2'-O-methylguanosine-3'-phosphate
  modified_base 6: mod_base = OTHER; note = 2'-fluorouridine-3'-phosphate
  modified_base 7: mod_base = OTHER; note = 2'-O-methyladenosine-3'-phosphate
  modified_base 8: mod_base = OTHER; note = 2'-fluorocytidine-3'-phosphate
  modified_base 9: mod_base = OTHER; note = 2'-fluorouridine-3'-phosphate
  modified_base 10: mod_base = OTHER; note = 2'-O-methylguanosine-3'-phosphate
  modified_base 11: mod_base = OTHER; note = 2'-O-methyladenosine-3'-phosphate
  modified_base 12: mod_base = OTHER; note = 2'-O-methyluridine-3'-phosphate
  modified_base 13: mod_base = OTHER; note = 2'-O-methyluridine-3'-phosphate
  modified_base 14: mod_base = OTHER; note = 2'-fluorouridine-3'-phosphate
  modified_base 15: mod_base = OTHER; note = 2'-O-methyladenosine-3'-phosphate
  modified_base 16: mod_base = OTHER; note = 2'-fluoroguanosine-3'-phosphate
  modified_base 17: mod_base = OTHER; note = 2'-O-methylcytidine-3'-phosphate
  modified_base 18: mod_base = OTHER; note = 2'-O-methyladenosine-3'-phosphate
  modified_base 19: mod_base = OTHER; note = 2'-O-methyluridine-3'-phosphate
  modified_base 20: mod_base = OTHER; note = 2'-O-methylguanosine-3'-phosphate
  modified_base 21: mod_base = OTHER; note = 2'-O-methyluridine-3'-phosphorothioate
  modified_base 22: mod_base = OTHER; note = 2'-O-methyluridine-3'-phosphorothioate
  modified_base 23: mod_base = OTHER; note = 2'-O-methylguanosine-3'-phosphate
ggaagtactgatttagcatgttg

SEQ ID NO: 2110 - RNA, 21 nt, synthetic construct
  misc_feature 1..21: note = Description of Artificial Sequence: Synthetic oligonucleotide
  source 1..21: mol_type = other RNA
  modified_base 1: mod_base = OTHER; note = 2'-O-methylguanosine-3'- phosphorothioate
  modified_base 2: mod_base = OTHER; note = 2'-O-methyladenosine-3'- phosphorothioate
  modified_base 3: mod_base = OTHER; note = 2'-O-methyladenosine-3'-phosphate
  modified_base 4: mod_base = OTHER; note = 2'-O-methylcytidine-3'-phosphate
  modified_base 5: mod_base = OTHER; note = 2'-O-methyladenosine-3'-phosphate
  modified_base 6: mod_base = OTHER; note = 2'-O-methyladenosine-3'-phosphate
  modified_base 7: mod_base = OTHER; note = 2'-fluorocytidine-3'-phosphate
  modified_base 8: mod_base = OTHER; note = 2'-O-methyladenosine-3'-phosphate
  modified_base 9: mod_base = OTHER; note = 2'-fluorouridine-3'-phosphate
  modified_base 10: mod_base = OTHER; note = 2'-fluoroguanosine-3'-phosphate
  modified_base 11: mod_base = OTHER; note = 2'-fluorocytidine-3'-phosphate
  modified_base 12: mod_base = OTHER; note = 2'-O-methyluridine-3'-phosphate
  modified_base 13: mod_base = OTHER; note = 2'-O-methyladenosine-3'-phosphate
  modified_base 14: mod_base = OTHER; note = 2'-O-methyladenosine-3'-phosphate
  modified_base 15: mod_base = OTHER; note = 2'-O-methyladenosine-3'-phosphate
  modified_base 16: mod_base = OTHER; note = 2'-O-methyluridine-3'-phosphate
  modified_base 17: mod_base = OTHER; note = 2'-O-methylcytidine-3'-phosphate
  modified_base 18: mod_base = OTHER; note = 2'-O-methyladenosine-3'-phosphate
  modified_base 19: mod_base = OTHER; note = 2'-O-methylguanosine-3'-phosphate
  modified_base 20: mod_base = OTHER; note = 2'-O-methyluridine-3'-phosphate
  modified_base 21: mod_base = OTHER; note = 2'-O-methyladenosine-3'-phosphate attached to N-[tris(N-acetylgalactosamine-alkyl)-amidodecanoyl)]-4-hydr oxyprolinol Hyp-(N-acetylgalactosamine-alkyl)3
gaacaacatgctaaatcagta

SEQ ID NO: 2111 - RNA, 23 nt, synthetic construct
  misc_feature 1..23: note = Description of Artificial Sequence: Synthetic oligonucleotide
  source 1..23: mol_type = other RNA
  modified_base 1: mod_base = OTHER; note = 2'-O-methyluridine-3'-phosphorothioate
  modified_base 2: mod_base = OTHER; note = 2'-fluoroadenosine-3'-phosphorothioate
  modified_base 3: mod_base = OTHER; note = 2'-O-methylcytidine-3'-phosphate
  modified_base 4: mod_base = OTHER; note = 2'-O-methyluridine-3'-phosphate
  modified_base 5: mod_base = OTHER; note = 2'-O-methylguanosine-3'-phosphate
  modified_base 6: mod_base = OTHER; note = 2'-fluoroadenosine-3'-phosphate
  modified_base 7: mod_base = OTHER; note = 2'-O-methyluridine-3'-phosphate
  modified_base 8: mod_base = OTHER; note = 2'-fluorouridine-3'-phosphate
  modified_base 9: mod_base = OTHER; note = 2'-fluorouridine-3'-phosphate
  modified_base 10: mod_base = OTHER; note = 2'-O-methyladenosine-3'-phosphate
  modified_base 11: mod_base = OTHER; note = 2'-O-methylguanosine-3'-phosphate
  modified_base 12: mod_base = OTHER; note = 2'-O-methylcytidine-3'-phosphate
  modified_base 13: mod_base = OTHER; note = 2'-O-methyladenosine-3'-phosphate
  modified_base 14: mod_base = OTHER; note = 2'-fluorouridine-3'-phosphate
  modified_base 15: mod_base = OTHER; note = 2'-O-methylguanosine-3'-phosphate
  modified_base 16: mod_base = OTHER; note = 2'-fluorouridine-3'-phosphate
  modified_base 17: mod_base = OTHER; note = 2'-O-methyluridine-3'-phosphate
  modified_base 18: mod_base = OTHER; note = 2'-O-methylguanosine-3'-phosphate
  modified_base 19: mod_base = OTHER; note = 2'-O-methyluridine-3'-phosphate
  modified_base 20: mod_base = OTHER; note = 2'-O-methyluridine-3'-phosphate
  modified_base 21: mod_base = OTHER; note = 2'-O-methylcytidine-3'- phosphorothioate
  modified_base 22: mod_base = OTHER; note = 2'-O-methyladenosine-3'- phosphorothioate
  modified_base 23: mod_base = OTHER; note = 2'-O-methyluridine-3'-phosphate
tactgatttagcatgttgttcat

SEQ ID NO: 2112 - RNA, 21 nt, synthetic construct
  misc_feature 1..21: note = Description of Artificial Sequence: Synthetic oligonucleotide
  source 1..21: mol_type = other RNA
  modified_base 1: mod_base = OTHER; note = 2'-O-methyluridine-3'-phosphorothioate
  modified_base 2: mod_base = OTHER; note = 2'-O-methylguanosine-3'- phosphorothioate
  modified_base 3: mod_base = OTHER; note = 2'-O-methyladenosine-3'-phosphate
  modified_base 4: mod_base = OTHER; note = 2'-O-methyladenosine-3'-phosphate
  modified_base 5: mod_base = OTHER; note = 2'-O-methylcytidine-3'-phosphate
  modified_base 6: mod_base = OTHER; note = 2'-O-methyladenosine-3'-phosphate
  modified_base 7: mod_base = OTHER; note = 2'-fluoroadenosine-3'-phosphate
  modified_base 8: mod_base = OTHER; note = 2'-O-methylcytidine-3'-phosphate
  modified_base 9: mod_base = OTHER; note = 2'-fluoroadenosine-3'-phosphate
  modified_base 10: mod_base = OTHER; note = 2'-fluorouridine-3'-phosphate
  modified_base 11: mod_base = OTHER; note = 2'-fluoroguanosine-3'-phosphate
  modified_base 12: mod_base = OTHER; note = 2'-O-methylcytidine-3'-phosphate
  modified_base 13: mod_base = OTHER; note = 2'-O-methyluridine-3'-phosphate
  modified_base 14: mod_base = OTHER; note = 2'-O-methyladenosine-3'-phosphate
  modified_base 15: mod_base = OTHER; note = 2'-O-methyladenosine-3'-phosphate
  modified_base 16: mod_base = OTHER; note = 2'-O-methyladenosine-3'-phosphate
  modified_base 17: mod_base = OTHER; note = 2'-O-methyluridine-3'-phosphate
  modified_base 18: mod_base = OTHER; note = 2'-O-methylcytidine-3'-phosphate
  modified_base 19: mod_base = OTHER; note = 2'-O-methyladenosine-3'-phosphate
  modified_base 20: mod_base = OTHER; note = 2'-O-methylguanosine-3'-phosphate
  modified_base 21: mod_base = OTHER; note = 2'-O-methyluridine-3'-phosphate attached to N-[tris(N-acetylgalactosamine-alkyl)-amidodecanoyl)]-4-hydr oxyprolinol Hyp-(N-acetylgalactosamine-alkyl)3
tgaacaacatgctaaatcagt

SEQ ID NO: 2113 - RNA, 23 nt, synthetic construct
  misc_feature 1..23: note = Description of Artificial Sequence: Synthetic oligonucleotide
  source 1..23: mol_type = other RNA
  modified_base 1: mod_base = OTHER; note = 2'-O-methyladenosine-3'- phosphorothioate
  modified_base 2: mod_base = OTHER; note = 2'-fluorocytidine-3'-phosphorothioate
  modified_base 3: mod_base = OTHER; note = 2'-O-methyluridine-3'-phosphate
  modified_base 4: mod_base = OTHER; note = 2'-O-methylguanosine-3'-phosphate
  modified_base 5: mod_base = OTHER; note = 2'-O-methyladenosine-3'-phosphate
  modified_base 6: mod_base = OTHER; note = 2'-fluorouridine-3'-phosphate
  modified_base 7: mod_base = OTHER; note = 2'-O-methyluridine-3'-phosphate
  modified_base 8: mod_base = OTHER; note = 2'-fluorouridine-3'-phosphate
  modified_base 9: mod_base = OTHER; note = 2'-fluoroadenosine-3'-phosphate
  modified_base 10: mod_base = OTHER; note = 2'-O-methylguanosine-3'-phosphate
  modified_base 11: mod_base = OTHER; note = 2'-O-methylcytidine-3'-phosphate
  modified_base 12: mod_base = OTHER; note = 2'-O-methyladenosine-3'-phosphate
  modified_base 13: mod_base = OTHER; note = 2'-O-methyluridine-3'-phosphate
  modified_base 14: mod_base = OTHER; note = 2'-fluoroguanosine-3'-phosphate
  modified_base 15: mod_base = OTHER; note = 2'-O-methyluridine-3'-phosphate
  modified_base 16: mod_base = OTHER; note = 2'-fluorouridine-3'-phosphate
  modified_base 17: mod_base = OTHER; note = 2'-O-methylguanosine-3'-phosphate
  modified_base 18: mod_base = OTHER; note = 2'-O-methyluridine-3'-phosphate
  modified_base 19: mod_base = OTHER; note = 2'-O-methyluridine-3'-phosphate
  modified_base 20: mod_base = OTHER; note = 2'-O-methylcytidine-3'-phosphate
  modified_base 21: mod_base = OTHER; note = 2'-O-methyladenosine-3'- phosphorothioate
  modified_base 22: mod_base = OTHER; note = 2'-O-methyluridine-3'-phosphorothioate
  modified_base 23: mod_base = OTHER; note = 2'-O-methyladenosine-3'-phosphate
actgatttagcatgttgttcata

SEQ ID NO: 2114 - RNA, 21 nt, synthetic construct
  misc_feature 1..21: note = Description of Artificial Sequence: Synthetic oligonucleotide
  source 1..21: mol_type = other RNA
  modified_base 1: mod_base = OTHER; note = 2'-O-methyladenosine-3'- phosphorothioate
  modified_base 2: mod_base = OTHER; note = 2'-O-methyladenosine-3'- phosphorothioate
  modified_base 3: mod_base = OTHER; note = 2'-O-methyladenosine-3'-phosphate
  modified_base 4: mod_base = OTHER; note = 2'-O-methylcytidine-3'-phosphate
  modified_base 5: mod_base = OTHER; note = 2'-O-methylcytidine-3'-phosphate
  modified_base 6: mod_base = OTHER; note = 2'-O-methyladenosine-3'-phosphate
  modified_base 7: mod_base = OTHER; note = 2'-fluoroguanosine-3'-phosphate
  modified_base 8: mod_base = OTHER; note = 2'-O-methyluridine-3'-phosphate
  modified_base 9: mod_base = OTHER; note = 2'-fluoroadenosine-3'-phosphate
  modified_base 10: mod_base = OTHER; note = 2'-fluorocytidine-3'-phosphate
  modified_base 11: mod_base = OTHER; note = 2'-fluorouridine-3'-phosphate
  modified_base 12: mod_base = OTHER; note = 2'-O-methyluridine-3'-phosphate
  modified_base 13: mod_base = OTHER; note = 2'-O-methyluridine-3'-phosphate
  modified_base 14: mod_base = OTHER; note = 2'-O-methyladenosine-3'-phosphate
  modified_base 15: mod_base = OTHER; note = 2'-O-methyluridine-3'-phosphate
  modified_base 16: mod_base = OTHER; note = 2'-O-methylcytidine-3'-phosphate
  modified_base 17: mod_base = OTHER; note = 2'-O-methyladenosine-3'-phosphate
  modified_base 18: mod_base = OTHER; note = 2'-O-methyluridine-3'-phosphate
  modified_base 19: mod_base = OTHER; note = 2'-O-methyluridine-3'-phosphate
  modified_base 20: mod_base = OTHER; note = 2'-O-methyluridine-3'-phosphate
  modified_base 21: mod_base = OTHER; note = 2'-O-methyluridine-3'-phosphate attached to N-[tris(N-acetylgalactosamine-alkyl)-amidodecanoyl)]-4-hydr oxyprolinol Hyp-(N-acetylgalactosamine-alkyl)3
aaaccagtactttatcatttt

SEQ ID NO: 2115 - RNA, 23 nt, synthetic construct
  misc_feature 1..23: note = Description of Artificial Sequence: Synthetic oligonucleotide
  source 1..23: mol_type = other RNA
  modified_base 1: mod_base = OTHER; note = 2'-O-methyladenosine-3'- phosphorothioate
  modified_base 2: mod_base = OTHER; note = 2'-fluoroadenosine-3'-phosphorothioate
  modified_base 3: mod_base = OTHER; note = 2'-O-methyladenosine-3'-phosphate
  modified_base 4: mod_base = OTHER; note = 2'-O-methyladenosine-3'-phosphate
  modified_base 5: mod_base = OTHER; note = 2'-O-methyluridine-3'-phosphate
  modified_base 6: mod_base = OTHER; note = 2'-fluoroguanosine-3'-phosphate
  modified_base 7: mod_base = OTHER; note = 2'-O-methyladenosine-3'-phosphate
  modified_base 8: mod_base = OTHER; note = 2'-fluorouridine-3'-phosphate
  modified_base 9: mod_base = OTHER; note = 2'-fluoroadenosine-3'-phosphate
  modified_base 10: mod_base = OTHER; note = 2'-O-methyladenosine-3'-phosphate
  modified_base 11: mod_base = OTHER; note = 2'-O-methyladenosine-3'-phosphate
  modified_base 12: mod_base = OTHER; note = 2'-O-methylguanosine-3'-phosphate
  modified_base 13: mod_base = OTHER; note = 2'-O-methyluridine-3'-phosphate
  modified_base 14: mod_base = OTHER; note = 2'-fluoroadenosine-3'-phosphate
  modified_base 15: mod_base = OTHER; note = 2'-O-methylcytidine-3'-phosphate
  modified_base 16: mod_base = OTHER; note = 2'-fluorouridine-3'-phosphate
  modified_base 17: mod_base = OTHER; note = 2'-O-methylguanosine-3'-phosphate
  modified_base 18: mod_base = OTHER; note = 2'-O-methylguanosine-3'-phosphate
  modified_base 19: mod_base = OTHER; note = 2'-O-methyluridine-3'-phosphate
  modified_base 20: mod_base = OTHER; note = 2'-O-methyluridine-3'-phosphate
  modified_base 21: mod_base = OTHER; note = 2'-O-methyluridine-3'-phosphorothioate
  modified_base 22: mod_base = OTHER; note = 2'-O-methylcytidine-3'- phosphorothioate
  modified_base 23: mod_base = OTHER; note = 2'-O-methyladenosine-3'-phosphate
aaaatgataaagtactggtttca

SEQ ID NO: 2116 - RNA, 21 nt, synthetic construct
  misc_feature 1..21: note = Description of Artificial Sequence: Synthetic oligonucleotide
  source 1..21: mol_type = other RNA
  modified_base 1: mod_base = OTHER; note = 2'-O-methyladenosine-3'- phosphorothioate
  modified_base 2: mod_base = OTHER; note = 2'-O-methyladenosine-3'- phosphorothioate
  modified_base 3: mod_base = OTHER; note = 2'-O-methylcytidine-3'-phosphate
  modified_base 4: mod_base = OTHER; note = 2'-O-methylcytidine-3'-phosphate
  modified_base 5: mod_base = OTHER; note = 2'-O-methyladenosine-3'-phosphate
  modified_base 6: mod_base = OTHER; note = 2'-O-methylguanosine-3'-phosphate
  modified_base 7: mod_base = OTHER; note = 2'-fluorouridine-3'-phosphate
  modified_base 8: mod_base = OTHER; note = 2'-O-methyladenosine-3'-phosphate
  modified_base 9: mod_base = OTHER; note = 2'-fluorocytidine-3'-phosphate
  modified_base 10: mod_base = OTHER; note = 2'-fluorouridine-3'-phosphate
  modified_base 11: mod_base = OTHER; note = 2'-fluorouridine-3'-phosphate
  modified_base 12: mod_base = OTHER; note = 2'-O-methyluridine-3'-phosphate
  modified_base 13: mod_base = OTHER; note = 2'-O-methyladenosine-3'-phosphate
  modified_base 14: mod_base = OTHER; note = 2'-O-methyluridine-3'-phosphate
  modified_base 15: mod_base = OTHER; note = 2'-O-methylcytidine-3'-phosphate
  modified_base 16: mod_base = OTHER; note = 2'-O-methyladenosine-3'-phosphate
  modified_base 17: mod_base = OTHER; note = 2'-O-methyluridine-3'-phosphate
  modified_base 18: mod_base = OTHER; note = 2'-O-methyluridine-3'-phosphate
  modified_base 19: mod_base = OTHER; note = 2'-O-methyluridine-3'-phosphate
  modified_base 20: mod_base = OTHER; note = 2'-O-methyluridine-3'-phosphate
  modified_base 21: mod_base = OTHER; note = 2'-O-methylcytidine-3'-phosphate attached to N-[tris(N-acetylgalactosamine-alkyl)-amidodecanoyl)]-4-hydr oxyprolinol Hyp-(N-acetylgalactosamine-alkyl)3
aaccagtactttatcattttc

SEQ ID NO: 2117 - RNA, 23 nt, synthetic construct
  misc_feature 1..23: note = Description of Artificial Sequence: Synthetic oligonucleotide
  source 1..23: mol_type = other RNA
  modified_base 1: mod_base = OTHER; note = 2'-O-methylguanosine-3'- phosphorothioate
  modified_base 2: mod_base = OTHER; note = 2'-fluoroadenosine-3'-phosphorothioate
  modified_base 3: mod_base = OTHER; note = 2'-O-methyladenosine-3'-phosphate
  modified_base 4: mod_base = OTHER; note = 2'-O-methyladenosine-3'-phosphate
  modified_base 5: mod_base = OTHER; note = 2'-O-methyladenosine-3'-phosphate
  modified_base 6: mod_base = OTHER; note = 2'-fluorouridine-3'-phosphate
  modified_base 7: mod_base = OTHER; note = 2'-O-methylguanosine-3'-phosphate
  modified_base 8: mod_base = OTHER; note = 2'-fluoroadenosine-3'-phosphate
  modified_base 9: mod_base = OTHER; note = 2'-fluorouridine-3'-phosphate
  modified_base 10: mod_base = OTHER; note = 2'-O-methyladenosine-3'-phosphate
  modified_base 11: mod_base = OTHER; note = 2'-O-methyladenosine-3'-phosphate
  modified_base 12: mod_base = OTHER; note = 2'-O-methyladenosine-3'-phosphate
  modified_base 13: mod_base = OTHER; note = 2'-O-methylguanosine-3'-phosphate
  modified_base 14: mod_base = OTHER; note = 2'-fluorouridine-3'-phosphate
  modified_base 15: mod_base = OTHER; note = 2'-O-methyladenosine-3'-phosphate
  modified_base 16: mod_base = OTHER; note = 2'-fluorocytidine-3'-phosphate
  modified_base 17: mod_base = OTHER; note = 2'-O-methyluridine-3'-phosphate
  modified_base 18: mod_base = OTHER; note = 2'-O-methylguanosine-3'-phosphate
  modified_base 19: mod_base = OTHER; note = 2'-O-methylguanosine-3'-phosphate
  modified_base 20: mod_base = OTHER; note = 2'-O-methyluridine-3'-phosphate
  modified_base 21: mod_base = OTHER; note = 2'-O-methyluridine-3'-phosphorothioate
  modified_base 22: mod_base = OTHER; note = 2'-O-methyluridine-3'-phosphorothioate
  modified_base 23: mod_base = OTHER; note = 2'-O-methylcytidine-3'-phosphate
gaaaatgataaagtactggtttc

SEQ ID NO: 2118 - RNA, 21 nt, synthetic construct
  misc_feature 1..21: note = Description of Artificial Sequence: Synthetic oligonucleotide
  source 1..21: mol_type = other RNA
  modified_base 1: mod_base = OTHER; note = 2'-O-methyluridine-3'-phosphorothioate
  modified_base 2: mod_base = OTHER; note = 2'-O-methyluridine-3'-phosphorothioate
  modified_base 3: mod_base = OTHER; note = 2'-O-methyluridine-3'-phosphate
  modified_base 4: mod_base = OTHER; note = 2'-O-methylguanosine-3'-phosphate
  modified_base 5: mod_base = OTHER; note = 2'-O-methyladenosine-3'-phosphate
  modified_base 6: mod_base = OTHER; note = 2'-O-methyladenosine-3'-phosphate
  modified_base 7: mod_base = OTHER; note = 2'-fluoroadenosine-3'-phosphate
  modified_base 8: mod_base = OTHER; note = 2'-O-methylcytidine-3'-phosphate
  modified_base 9: mod_base = OTHER; note = 2'-fluorocytidine-3'-phosphate
  modified_base 10: mod_base = OTHER; note = 2'-fluoroadenosine-3'-phosphate
  modified_base 11: mod_base = OTHER; note = 2'-fluoroguanosine-3'-phosphate
  modified_base 12: mod_base = OTHER; note = 2'-O-methyluridine-3'-phosphate
  modified_base 13: mod_base = OTHER; note = 2'-O-methyladenosine-3'-phosphate
  modified_base 14: mod_base = OTHER; note = 2'-O-methylcytidine-3'-phosphate
  modified_base 15: mod_base = OTHER; note = 2'-O-methyluridine-3'-phosphate
  modified_base 16: mod_base = OTHER; note = 2'-O-methyluridine-3'-phosphate
  modified_base 17: mod_base = OTHER; note = 2'-O-methyluridine-3'-phosphate
  modified_base 18: mod_base = OTHER; note = 2'-O-methyladenosine-3'-phosphate
  modified_base 19: mod_base = OTHER; note = 2'-O-methyluridine-3'-phosphate
  modified_base 20: mod_base = OTHER; note = 2'-O-methylcytidine-3'-phosphate
  modified_base 21: mod_base = OTHER; note = 2'-O-methyladenosine-3'-phosphate attached to N-[tris(N-acetylgalactosamine-alkyl)-amidodecanoyl)]-4-hydr oxyprolinol Hyp-(N-acetylgalactosamine-alkyl)3
tttgaaaccagtactttatca

SEQ ID NO: 2119 - RNA, 23 nt, synthetic construct
  misc_feature 1..23: note = Description of Artificial Sequence: Synthetic oligonucleotide
  source 1..23: mol_type = other RNA
  modified_base 1: mod_base = OTHER; note = 2'-O-methyluridine-3'-phosphorothioate
  modified_base 2: mod_base = OTHER; note = 2'-fluoroguanosine-3'-phosphorothioate
  modified_base 3: mod_base = OTHER; note = 2'-O-methyladenosine-3'-phosphate
  modified_base 4: mod_base = OTHER; note = 2'-O-methyluridine-3'-phosphate
  modified_base 5: mod_base = OTHER; note = 2'-O-methyladenosine-3'-phosphate
  modified_base 6: mod_base = OTHER; note = 2'-fluoroadenosine-3'-phosphate
  modified_base 7: mod_base = OTHER; note = 2'-O-methyladenosine-3'-phosphate
  modified_base 8: mod_base = OTHER; note = 2'-fluoroguanosine-3'-phosphate
  modified_base 9: mod_base = OTHER; note = 2'-fluorouridine-3'-phosphate
  modified_base 10: mod_base = OTHER; note = 2'-O-methyladenosine-3'-phosphate
  modified_base 11: mod_base = OTHER; note = 2'-O-methylcytidine-3'-phosphate
  modified_base 12: mod_base = OTHER; note = 2'-O-methyluridine-3'-phosphate
  modified_base 13: mod_base = OTHER; note = 2'-O-methylguanosine-3'-phosphate
  modified_base 14: mod_base = OTHER; note = 2'-fluoroguanosine-3'-phosphate
  modified_base 15: mod_base = OTHER; note = 2'-O-methyluridine-3'-phosphate
  modified_base 16: mod_base = OTHER; note = 2'-fluorouridine-3'-phosphate
  modified_base 17: mod_base = OTHER; note = 2'-O-methyluridine-3'-phosphate
  modified_base 18: mod_base = OTHER; note = 2'-O-methylcytidine-3'-phosphate
  modified_base 19: mod_base = OTHER; note = 2'-O-methyladenosine-3'-phosphate
  modified_base 20: mod_base = OTHER; note = 2'-O-methyladenosine-3'-phosphate
  modified_base 21: mod_base = OTHER; note = 2'-O-methyladenosine-3'- phosphorothioate
  modified_base 22: mod_base = OTHER; note = 2'-O-methyladenosine-3'- phosphorothioate
  modified_base 23: mod_base = OTHER; note = 2'-O-methyluridine-3'-phosphate
tgataaagtactggtttcaaaat

SEQ ID NO: 2120 - RNA, 21 nt, synthetic construct
  misc_feature 1..21: note = Description of Artificial Sequence: Synthetic oligonucleotide
  source 1..21: mol_type = other RNA
  modified_base 1: mod_base = OTHER; note = 2'-O-methyluridine-3'-phosphorothioate
  modified_base 2: mod_base = OTHER; note = 2'-O-methyluridine-3'-phosphorothioate
  modified_base 3: mod_base = OTHER; note = 2'-O-methyluridine-3'-phosphate
  modified_base 4: mod_base = OTHER; note = 2'-O-methyluridine-3'-phosphate
  modified_base 5: mod_base = OTHER; note = 2'-O-methylguanosine-3'-phosphate
  modified_base 6: mod_base = OTHER; note = 2'-O-methyladenosine-3'-phosphate
  modified_base 7: mod_base = OTHER; note = 2'-fluoroadenosine-3'-phosphate
  modified_base 8: mod_base = OTHER; note = 2'-O-methyladenosine-3'-phosphate
  modified_base 9: mod_base = OTHER; note = 2'-fluorocytidine-3'-phosphate
  modified_base 10: mod_base = OTHER; note = 2'-fluorocytidine-3'-phosphate
  modified_base 11: mod_base = OTHER; note = 2'-fluoroadenosine-3'-phosphate
  modified_base 12: mod_base = OTHER; note = 2'-O-methylguanosine-3'-phosphate
  modified_base 13: mod_base = OTHER; note = 2'-O-methyluridine-3'-phosphate
  modified_base 14: mod_base = OTHER; note = 2'-O-methyladenosine-3'-phosphate
  modified_base 15: mod_base = OTHER; note = 2'-O-methylcytidine-3'-phosphate
  modified_base 16: mod_base = OTHER; note = 2'-O-methyluridine-3'-phosphate
  modified_base 17: mod_base = OTHER; note = 2'-O-methyluridine-3'-phosphate
  modified_base 18: mod_base = OTHER; note = 2'-O-methyluridine-3'-phosphate
  modified_base 19: mod_base = OTHER; note = 2'-O-methyladenosine-3'-phosphate
  modified_base 20: mod_base = OTHER; note = 2'-O-methyluridine-3'-phosphate
  modified_base 21: mod_base = OTHER; note = 2'-O-methylcytidine-3'-phosphate attached to N-[tris(N-acetylgalactosamine-alkyl)-amidodecanoyl)]-4-hydr oxyprolinol Hyp-(N-acetylgalactosamine-alkyl)3
ttttgaaaccagtactttatc

SEQ ID NO: 2121 - RNA, 23 nt, synthetic construct
  misc_feature 1..23: note = Description of Artificial Sequence: Synthetic oligonucleotide
  source 1..23: mol_type = other RNA
  modified_base 1: mod_base = OTHER; note = 2'-O-methylguanosine-3'- phosphorothioate
  modified_base 2: mod_base = OTHER; note = 2'-fluoroadenosine-3'-phosphorothioate
  modified_base 3: mod_base = OTHER; note = 2'-O-methyluridine-3'-phosphate
  modified_base 4: mod_base = OTHER; note = 2'-O-methyladenosine-3'-phosphate
  modified_base 5: mod_base = OTHER; note = 2'-O-methyladenosine-3'-phosphate
  modified_base 6: mod_base = OTHER; note = 2'-fluoroadenosine-3'-phosphate
  modified_base 7: mod_base = OTHER; note = 2'-O-methylguanosine-3'-phosphate
  modified_base 8: mod_base = OTHER; note = 2'-fluorouridine-3'-phosphate
  modified_base 9: mod_base = OTHER; note = 2'-fluoroadenosine-3'-phosphate
  modified_base 10: mod_base = OTHER; note = 2'-O-methylcytidine-3'-phosphate
  modified_base 11: mod_base = OTHER; note = 2'-O-methyluridine-3'-phosphate
  modified_base 12: mod_base = OTHER; note = 2'-O-methylguanosine-3'-phosphate
  modified_base 13: mod_base = OTHER; note = 2'-O-methylguanosine-3'-phosphate
  modified_base 14: mod_base = OTHER; note = 2'-fluorouridine-3'-phosphate
  modified_base 15: mod_base = OTHER; note = 2'-O-methyluridine-3'-phosphate
  modified_base 16: mod_base = OTHER; note = 2'-fluorouridine-3'-phosphate
  modified_base 17: mod_base = OTHER; note = 2'-O-methylcytidine-3'-phosphate
  modified_base 18: mod_base = OTHER; note = 2'-O-methyladenosine-3'-phosphate
  modified_base 19: mod_base = OTHER; note = 2'-O-methyladenosine-3'-phosphate
  modified_base 20: mod_base = OTHER; note = 2'-O-methyladenosine-3'-phosphate
  modified_base 21: mod_base = OTHER; note = 2'-O-methyladenosine-3'- phosphorothioate
  modified_base 22: mod_base = OTHER; note = 2'-O-methyluridine-3'-phosphorothioate
  modified_base 23: mod_base = OTHER; note = 2'-O-methyluridine-3'-phosphate
gataaagtactggtttcaaaatt

SEQ ID NO: 2122 - RNA, 21 nt, synthetic construct
  misc_feature 1..21: note = Description of Artificial Sequence: Synthetic oligonucleotide
  source 1..21: mol_type = other RNA
  modified_base 1: mod_base = OTHER; note = 2'-O-methylguanosine-3'- phosphorothioate
  modified_base 2: mod_base = OTHER; note = 2'-O-methyladenosine-3'- phosphorothioate
  modified_base 3: mod_base = OTHER; note = 2'-O-methylguanosine-3'-phosphate
  modified_base 4: mod_base = OTHER; note = 2'-O-methyladenosine-3'-phosphate
  modified_base 5: mod_base = OTHER; note = 2'-O-methyladenosine-3'-phosphate
  modified_base 6: mod_base = OTHER; note = 2'-O-methylguanosine-3'-phosphate
  modified_base 7: mod_base = OTHER; note = 2'-fluoroadenosine-3'-phosphate
  modified_base 8: mod_base = OTHER; note = 2'-O-methyluridine-3'-phosphate
  modified_base 9: mod_base = OTHER; note = 2'-fluoroguanosine-3'-phosphate
  modified_base 10: mod_base = OTHER; note = 2'-fluoroguanosine-3'-phosphate
  modified_base 11: mod_base = OTHER; note = 2'-fluoroguanosine-3'-phosphate
  modified_base 12: mod_base = OTHER; note = 2'-O-methylcytidine-3'-phosphate
  modified_base 13: mod_base = OTHER; note = 2'-O-methyluridine-3'-phosphate
  modified_base 14: mod_base = OTHER; note = 2'-O-methyladenosine-3'-phosphate
  modified_base 15: mod_base = OTHER; note = 2'-O-methylcytidine-3'-phosphate
  modified_base 16: mod_base = OTHER; note = 2'-O-methyladenosine-3'-phosphate
  modified_base 17: mod_base = OTHER; note = 2'-O-methyladenosine-3'-phosphate
  modified_base 18: mod_base = OTHER; note = 2'-O-methylguanosine-3'-phosphate
  modified_base 19: mod_base = OTHER; note = 2'-O-methylguanosine-3'-phosphate
  modified_base 20: mod_base = OTHER; note = 2'-O-methylcytidine-3'-phosphate
  modified_base 21: mod_base = OTHER; note = 2'-O-methylcytidine-3'-phosphate attached to N-[tris(N-acetylgalactosamine-alkyl)-amidodecanoyl)]-4-hydr oxyprolinol Hyp-(N-acetylgalactosamine-alkyl)3
gagaagatgggctacaaggcc

SEQ ID NO: 2123 - RNA, 23 nt, synthetic construct
  misc_feature 1..23: note = Description of Artificial Sequence: Synthetic oligonucleotide
  source 1..23: mol_type = other RNA
  modified_base 1: mod_base = OTHER; note = 2'-O-methylguanosine-3'- phosphorothioate
  modified_base 2: mod_base = OTHER; note = 2'-fluoroguanosine-3'-phosphorothioate
  modified_base 3: mod_base = OTHER; note = 2'-O-methylcytidine-3'-phosphate
  modified_base 4: mod_base = OTHER; note = 2'-O-methylcytidine-3'-phosphate
  modified_base 5: mod_base = OTHER; note = 2'-O-methyluridine-3'-phosphate
  modified_base 6: mod_base = OTHER; note = 2'-fluorouridine-3'-phosphate
  modified_base 7: mod_base = OTHER; note = 2'-O-methylguanosine-3'-phosphate
  modified_base 8: mod_base = OTHER; note = 2'-fluorouridine-3'-phosphate
  modified_base 9: mod_base = OTHER; note = 2'-fluoroadenosine-3'-phosphate
  modified_base 10: mod_base = OTHER; note = 2'-O-methylguanosine-3'-phosphate
  modified_base 11: mod_base = OTHER; note = 2'-O-methylcytidine-3'-phosphate
  modified_base 12: mod_base = OTHER; note = 2'-O-methylcytidine-3'-phosphate
  modified_base 13: mod_base = OTHER; note = 2'-O-methylcytidine-3'-phosphate
  modified_base 14: mod_base = OTHER; note = 2'-fluoroadenosine-3'-phosphate
  modified_base 15: mod_base = OTHER; note = 2'-O-methyluridine-3'-phosphate
  modified_base 16: mod_base = OTHER; note = 2'-fluorocytidine-3'-phosphate
  modified_base 17: mod_base = OTHER; note = 2'-O-methyluridine-3'-phosphate
  modified_base 18: mod_base = OTHER; note = 2'-O-methyluridine-3'-phosphate
  modified_base 19: mod_base = OTHER; note = 2'-O-methylcytidine-3'-phosphate
  modified_base 20: mod_base = OTHER; note = 2'-O-methyluridine-3'-phosphate
  modified_base 21: mod_base = OTHER; note = 2'-O-methylcytidine-3'- phosphorothioate
  modified_base 22: mod_base = OTHER; note = 2'-O-methyluridine-3'-phosphorothioate
  modified_base 23: mod_base = OTHER; note = 2'-O-methylguanosine-3'-phosphate
ggccttgtagcccatcttctctg

SEQ ID NO: 2124 - RNA, 21 nt, synthetic construct
  misc_feature 1..21: note = Description of Artificial Sequence: Synthetic oligonucleotide
  source 1..21: mol_type = other RNA
  modified_base 1: mod_base = OTHER; note = 2'-O-methyladenosine-3'- phosphorothioate
  modified_base 2: mod_base = OTHER; note = 2'-O-methylguanosine-3'- phosphorothioate
  modified_base 3: mod_base = OTHER; note = 2'-O-methyladenosine-3'-phosphate
  modified_base 4: mod_base = OTHER; note = 2'-O-methyladenosine-3'-phosphate
  modified_base 5: mod_base = OTHER; note = 2'-O-methylguanosine-3'-phosphate
  modified_base 6: mod_base = OTHER; note = 2'-O-methyladenosine-3'-phosphate
  modified_base 7: mod_base = OTHER; note = 2'-fluorouridine-3'-phosphate
  modified_base 8: mod_base = OTHER; note = 2'-O-methylguanosine-3'-phosphate
  modified_base 9: mod_base = OTHER; note = 2'-fluoroguanosine-3'-phosphate
  modified_base 10: mod_base = OTHER; note = 2'-fluoroguanosine-3'-phosphate
  modified_base 11: mod_base = OTHER; note = 2'-fluorocytidine-3'-phosphate
  modified_base 12: mod_base = OTHER; note = 2'-O-methyluridine-3'-phosphate
  modified_base 13: mod_base = OTHER; note = 2'-O-methyladenosine-3'-phosphate
  modified_base 14: mod_base = OTHER; note = 2'-O-methylcytidine-3'-phosphate
  modified_base 15: mod_base = OTHER; note = 2'-O-methyladenosine-3'-phosphate
  modified_base 16: mod_base = OTHER; note = 2'-O-methyladenosine-3'-phosphate
  modified_base 17: mod_base = OTHER; note = 2'-O-methylguanosine-3'-phosphate
  modified_base 18: mod_base = OTHER; note = 2'-O-methylguanosine-3'-phosphate
  modified_base 19: mod_base = OTHER; note = 2'-O-methylcytidine-3'-phosphate
  modified_base 20: mod_base = OTHER; note = 2'-O-methylcytidine-3'-phosphate
  modified_base 21: mod_base = OTHER; note = 2'-O-methyladenosine-3'-phosphate attached to N-[tris(N-acetylgalactosamine-alkyl)-amidodecanoyl)]-4-hydr oxyprolinol Hyp-(N-acetylgalactosamine-alkyl)3
agaagatgggctacaaggcca

SEQ ID NO: 2125 - RNA, 23 nt, synthetic construct
  misc_feature 1..23: note = Description of Artificial Sequence: Synthetic oligonucleotide
  source 1..23: mol_type = other RNA
  modified_base 1: mod_base = OTHER; note = 2'-O-methyluridine-3'-phosphorothioate
  modified_base 2: mod_base = OTHER; note = 2'-fluoroguanosine-3'-phosphorothioate
  modified_base 3: mod_base = OTHER; note = 2'-O-methylguanosine-3'-phosphate
  modified_base 4: mod_base = OTHER; note = 2'-O-methylcytidine-3'-phosphate
  modified_base 5: mod_base = OTHER; note = 2'-O-methylcytidine-3'-phosphate
  modified_base 6: mod_base = OTHER; note = 2'-fluorouridine-3'-phosphate
  modified_base 7: mod_base = OTHER; note = 2'-O-methyluridine-3'-phosphate
  modified_base 8: mod_base = OTHER; note = 2'-fluoroguanosine-3'-phosphate
  modified_base 9: mod_base = OTHER; note = 2'-fluorouridine-3'-phosphate
  modified_base 10: mod_base = OTHER; note = 2'-O-methyladenosine-3'-phosphate
  modified_base 11: mod_base = OTHER; note = 2'-O-methylguanosine-3'-phosphate
  modified_base 12: mod_base = OTHER; note = 2'-O-methylcytidine-3'-phosphate
  modified_base 13: mod_base = OTHER; note = 2'-O-methylcytidine-3'-phosphate
  modified_base 14: mod_base = OTHER; note = 2'-fluorocytidine-3'-phosphate
  modified_base 15: mod_base = OTHER; note = 2'-O-methyladenosine-3'-phosphate
  modified_base 16: mod_base = OTHER; note = 2'-fluorouridine-3'-phosphate
  modified_base 17: mod_base = OTHER; note = 2'-O-methylcytidine-3'-phosphate
  modified_base 18: mod_base = OTHER; note = 2'-O-methyluridine-3'-phosphate
  modified_base 19: mod_base = OTHER; note = 2'-O-methyluridine-3'-phosphate
  modified_base 20: mod_base = OTHER; note = 2'-O-methylcytidine-3'-phosphate
  modified_base 21: mod_base = OTHER; note = 2'-O-methyluridine-3'-phosphorothioate
  modified_base 22: mod_base = OTHER; note = 2'-O-methylcytidine-3'- phosphorothioate
  modified_base 23: mod_base = OTHER; note = 2'-O-methyluridine-3'-phosphate
tggccttgtagcccatcttctct

SEQ ID NO: 2126 - RNA, 21 nt, synthetic construct
  misc_feature 1..21: note = Description of Artificial Sequence: Synthetic oligonucleotide
  source 1..21: mol_type = other RNA
  modified_base 1: mod_base = OTHER; note = 2'-O-methylguanosine-3'- phosphorothioate
  modified_base 2: mod_base = OTHER; note = 2'-O-methylguanosine-3'- phosphorothioate
  modified_base 3: mod_base = OTHER; note = 2'-O-methylcytidine-3'-phosphate
  modified_base 4: mod_base = OTHER; note = 2'-O-methyladenosine-3'-phosphate
  modified_base 5: mod_base = OTHER; note = 2'-O-methylguanosine-3'-phosphate
  modified_base 6: mod_base = OTHER; note = 2'-O-methyladenosine-3'-phosphate
  modified_base 7: mod_base = OTHER; note = 2'-fluoroguanosine-3'-phosphate
  modified_base 8: mod_base = OTHER; note = 2'-O-methyladenosine-3'-phosphate
  modified_base 9: mod_base = OTHER; note = 2'-fluoroadenosine-3'-phosphate
  modified_base 10: mod_base = OTHER; note = 2'-fluoroguanosine-3'-phosphate
  modified_base 11: mod_base = OTHER; note = 2'-fluoroadenosine-3'-phosphate
  modified_base 12: mod_base = OTHER; note = 2'-O-methyluridine-3'-phosphate
  modified_base 13: mod_base = OTHER; note = 2'-O-methylguanosine-3'-phosphate
  modified_base 14: mod_base = OTHER; note = 2'-O-methylguanosine-3'-phosphate
  modified_base 15: mod_base = OTHER; note = 2'-O-methylguanosine-3'-phosphate
  modified_base 16: mod_base = OTHER; note = 2'-O-methylcytidine-3'-phosphate
  modified_base 17: mod_base = OTHER; note = 2'-O-methyluridine-3'-phosphate
  modified_base 18: mod_base = OTHER; note = 2'-O-methyladenosine-3'-phosphate
  modified_base 19: mod_base = OTHER; note = 2'-O-methylcytidine-3'-phosphate
  modified_base 20: mod_base = OTHER; note = 2'-O-methyladenosine-3'-phosphate
  modified_base 21: mod_base = OTHER; note = 2'-O-methyladenosine-3'-phosphate attached to N-[tris(N-acetylgalactosamine-alkyl)-amidodecanoyl)]-4-hydr oxyprolinol Hyp-(N-acetylgalactosamine-alkyl)3
ggcagagaagatgggctacaa

SEQ ID NO: 2127 - RNA, 23 nt, synthetic construct
  misc_feature 1..23: note = Description of Artificial Sequence: Synthetic oligonucleotide
  source 1..23: mol_type = other RNA
  modified_base 1: mod_base = OTHER; note = 2'-O-methyluridine-3'-phosphorothioate
  modified_base 2: mod_base = OTHER; note = 2'-fluorouridine -3'-phosphorothioate
  modified_base 3: mod_base = OTHER; note = 2'-O-methylguanosine-3'-phosphate
  modified_base 4: mod_base = OTHER; note = 2'-O-methyluridine-3'-phosphate
  modified_base 5: mod_base = OTHER; note = 2'-O-methyladenosine-3'-phosphate
  modified_base 6: mod_base = OTHER; note = 2'-fluoroguanosine-3'-phosphate
  modified_base 7: mod_base = OTHER; note = 2'-O-methylcytidine-3'-phosphate
  modified_base 8: mod_base = OTHER; note = 2'-fluorocytidine-3'-phosphate
  modified_base 9: mod_base = OTHER; note = 2'-fluorocytidine-3'-phosphate
  modified_base 10: mod_base = OTHER; note = 2'-O-methyladenosine-3'-phosphate
  modified_base 11: mod_base = OTHER; note = 2'-O-methyluridine-3'-phosphate
  modified_base 12: mod_base = OTHER; note = 2'-O-methylcytidine-3'-phosphate
  modified_base 13: mod_base = OTHER; note = 2'-O-methyluridine-3'-phosphate
  modified_base 14: mod_base = OTHER; note = 2'-fluorouridine-3'-phosphate
  modified_base 15: mod_base = OTHER; note = 2'-O-methylcytidine-3'-phosphate
  modified_base 16: mod_base = OTHER; note = 2'-fluorouridine-3'-phosphate
  modified_base 17: mod_base = OTHER; note = 2'-O-methylcytidine-3'-phosphate
  modified_base 18: mod_base = OTHER; note = 2'-O-methyluridine-3'-phosphate
  modified_base 19: mod_base = OTHER; note = 2'-O-methylguanosine-3'-phosphate
  modified_base 20: mod_base = OTHER; note = 2'-O-methylcytidine-3'-phosphate
  modified_base 21: mod_base = OTHER; note = 2'-O-methylcytidine-3'- phosphorothioate
  modified_base 22: mod_base = OTHER; note = 2'-O-methyluridine-3'-phosphorothioate
  modified_base 23: mod_base = OTHER; note = 2'-O-methylguanosine-3'-phosphate
ttgtagcccatcttctctgcctg

SEQ ID NO: 2128 - RNA, 21 nt, synthetic construct
  misc_feature 1..21: note = Description of Artificial Sequence: Synthetic oligonucleotide
  source 1..21: mol_type = other RNA
  modified_base 1: mod_base = OTHER; note = 2'-O-methyladenosine-3'- phosphorothioate
  modified_base 2: mod_base = OTHER; note = 2'-O-methylguanosine-3'- phosphorothioate
  modified_base 3: mod_base = OTHER; note = 2'-O-methylguanosine-3'-phosphate
  modified_base 4: mod_base = OTHER; note = 2'-O-methylcytidine-3'-phosphate
  modified_base 5: mod_base = OTHER; note = 2'-O-methyladenosine-3'-phosphate
  modified_base 6: mod_base = OTHER; note = 2'-O-methylguanosine-3'-phosphate
  modified_base 7: mod_base = OTHER; note = 2'-fluoroadenosine-3'-phosphate
  modified_base 8: mod_base = OTHER; note = 2'-O-methylguanosine-3'-phosphate
  modified_base 9: mod_base = OTHER; note = 2'-fluoroadenosine-3'-phosphate
  modified_base 10: mod_base = OTHER; note = 2'-fluoroadenosine-3'-phosphate
  modified_base 11: mod_base = OTHER; note = 2'-fluoroguanosine-3'-phosphate
  modified_base 12: mod_base = OTHER; note = 2'-O-methyladenosine-3'-phosphate
  modified_base 13: mod_base = OTHER; note = 2'-O-methyluridine-3'-phosphate
  modified_base 14: mod_base = OTHER; note = 2'-O-methylguanosine-3'-phosphate
  modified_base 15: mod_base = OTHER; note = 2'-O-methylguanosine-3'-phosphate
  modified_base 16: mod_base = OTHER; note = 2'-O-methylguanosine-3'-phosphate
  modified_base 17: mod_base = OTHER; note = 2'-O-methylcytidine-3'-phosphate
  modified_base 18: mod_base = OTHER; note = 2'-O-methyluridine-3'-phosphate
  modified_base 19: mod_base = OTHER; note = 2'-O-methyladenosine-3'-phosphate
  modified_base 20: mod_base = OTHER; note = 2'-O-methylcytidine-3'-phosphate
  modified_base 21: mod_base = OTHER; note = 2'-O-methyladenosine-3'-phosphate attached to N-[tris(N-acetylgalactosamine-alkyl)-amidodecanoyl)]-4-hydr oxyprolinol Hyp-(N-acetylgalactosamine-alkyl)3
aggcagagaagatgggctaca

SEQ ID NO: 2129 - RNA, 23 nt, synthetic construct
  misc_feature 1..23: note = Description of Artificial Sequence: Synthetic oligonucleotide
  source 1..23: mol_type = other RNA
  modified_base 1: mod_base = OTHER; note = 2'-O-methyluridine-3'-phosphorothioate
  modified_base 2: mod_base = OTHER; note = 2'-fluoroguanosine-3'-phosphorothioate
  modified_base 3: mod_base = OTHER; note = 2'-O-methyluridine-3'-phosphate
  modified_base 4: mod_base = OTHER; note = 2'-O-methyladenosine-3'-phosphate
  modified_base 5: mod_base = OTHER; note = 2'-O-methylguanosine-3'-phosphate
  modified_base 6: mod_base = OTHER; note = 2'-fluorocytidine-3'-phosphate
  modified_base 7: mod_base = OTHER; note = 2'-O-methylcytidine-3'-phosphate
  modified_base 8: mod_base = OTHER; note = 2'-fluorocytidine-3'-phosphate
  modified_base 9: mod_base = OTHER; note = 2'-fluoroadenosine-3'-phosphate
  modified_base 10: mod_base = OTHER; note = 2'-O-methyluridine-3'-phosphate
  modified_base 11: mod_base = OTHER; note = 2'-O-methylcytidine-3'-phosphate
  modified_base 12: mod_base = OTHER; note = 2'-O-methyluridine-3'-phosphate
  modified_base 13: mod_base = OTHER; note = 2'-O-methyluridine-3'-phosphate
  modified_base 14: mod_base = OTHER; note = 2'-fluorocytidine-3'-phosphate
  modified_base 15: mod_base = OTHER; note = 2'-O-methyluridine-3'-phosphate
  modified_base 16: mod_base = OTHER; note = 2'-fluorocytidine-3'-phosphate
  modified_base 17: mod_base = OTHER; note = 2'-O-methyluridine-3'-phosphate
  modified_base 18: mod_base = OTHER; note = 2'-O-methylguanosine-3'-phosphate
  modified_base 19: mod_base = OTHER; note = 2'-O-methylcytidine-3'-phosphate
  modified_base 20: mod_base = OTHER; note = 2'-O-methylcytidine-3'-phosphate
  modified_base 21: mod_base = OTHER; note = 2'-O-methyluridine-3'-phosphorothioate
  modified_base 22: mod_base = OTHER; note = 2'-O-methylguanosine-3'- phosphorothioate
  modified_base 23: mod_base = OTHER; note = 2'-O-methylcytidine-3'-phosphate
tgtagcccatcttctctgcctgc

SEQ ID NO: 2130 - RNA, 21 nt, synthetic construct
  misc_feature 1..21: note = Description of Artificial Sequence: Synthetic oligonucleotide
  source 1..21: mol_type = other RNA
  modified_base 1: mod_base = OTHER; note = 2'-O-methyladenosine-3'- phosphorothioate
  modified_base 2: mod_base = OTHER; note = 2'-O-methyladenosine-3'- phosphorothioate
  modified_base 3: mod_base = OTHER; note = 2'-O-methylcytidine-3'-phosphate
  modified_base 4: mod_base = OTHER; note = 2'-O-methylguanosine-3'-phosphate
  modified_base 5: mod_base = OTHER; note = 2'-O-methylguanosine-3'-phosphate
  modified_base 6: mod_base = OTHER; note = 2'-O-methylguanosine-3'-phosphate
  modified_base 7: mod_base = OTHER; note = 2'-fluorocytidine-3'-phosphate
  modified_base 8: mod_base = OTHER; note = 2'-O-methyladenosine-3'-phosphate
  modified_base 9: mod_base = OTHER; note = 2'-fluorouridine-3'-phosphate
  modified_base 10: mod_base = OTHER; note = 2'-fluoroguanosine-3'-phosphate
  modified_base 11: mod_base = OTHER; note = 2'-fluoroadenosine-3'-phosphate
  modified_base 12: mod_base = OTHER; note = 2'-O-methyluridine-3'-phosphate
  modified_base 13: mod_base = OTHER; note = 2'-O-methylguanosine-3'-phosphate
  modified_base 14: mod_base = OTHER; note = 2'-O-methyluridine-3'-phosphate
  modified_base 15: mod_base = OTHER; note = 2'-O-methyluridine-3'-phosphate
  modified_base 16: mod_base = OTHER; note = 2'-O-methylguanosine-3'-phosphate
  modified_base 17: mod_base = OTHER; note = 2'-O-methyladenosine-3'-phosphate
  modified_base 18: mod_base = OTHER; note = 2'-O-methylguanosine-3'-phosphate
  modified_base 19: mod_base = OTHER; note = 2'-O-methyluridine-3'-phosphate
  modified_base 20: mod_base = OTHER; note = 2'-O-methyluridine-3'-phosphate
  modified_base 21: mod_base = OTHER; note = 2'-O-methylcytidine-3'-phosphate attached to N-[tris(N-acetylgalactosamine-alkyl)-amidodecanoyl)]-4-hydr oxyprolinol Hyp-(N-acetylgalactosamine-alkyl)3
aacgggcatgatgttgagttc

SEQ ID NO: 2131 - RNA, 23 nt, synthetic construct
  misc_feature 1..23: note = Description of Artificial Sequence: Synthetic oligonucleotide
  source 1..23: mol_type = other RNA
  modified_base 1: mod_base = OTHER; note = 2'-O-methylguanosine-3'- phosphorothioate
  modified_base 2: mod_base = OTHER; note = 2'-fluoroadenosine-3'-phosphorothioate
  modified_base 3: mod_base = OTHER; note = 2'-O-methyladenosine-3'-phosphate
  modified_base 4: mod_base = OTHER; note = 2'-O-methylcytidine-3'-phosphate
  modified_base 5: mod_base = OTHER; note = 2'-O-methyluridine-3'-phosphate
  modified_base 6: mod_base = OTHER; note = 2'-fluorocytidine-3'-phosphate
  modified_base 7: mod_base = OTHER; note = 2'-O-methyladenosine-3'-phosphate
  modified_base 8: mod_base = OTHER; note = 2'-fluoroadenosine-3'-phosphate
  modified_base 9: mod_base = OTHER; note = 2'-fluorocytidine-3'-phosphate
  modified_base 10: mod_base = OTHER; note = 2'-O-methyladenosine-3'-phosphate
  modified_base 11: mod_base = OTHER; note = 2'-O-methyluridine-3'-phosphate
  modified_base 12: mod_base = OTHER; note = 2'-O-methylcytidine-3'-phosphate
  modified_base 13: mod_base = OTHER; note = 2'-O-methyladenosine-3'-phosphate
  modified_base 14: mod_base = OTHER; note = 2'-fluorouridine-3'-phosphate
  modified_base 15: mod_base = OTHER; note = 2'-O-methylguanosine-3'-phosphate
  modified_base 16: mod_base = OTHER; note = 2'-fluorocytidine-3'-phosphate
  modified_base 17: mod_base = OTHER; note = 2'-O-methylcytidine-3'-phosphate
  modified_base 18: mod_base = OTHER; note = 2'-O-methylcytidine-3'-phosphate
  modified_base 19: mod_base = OTHER; note = 2'-O-methylguanosine-3'-phosphate
  modified_base 20: mod_base = OTHER; note = 2'-O-methyluridine-3'-phosphate
  modified_base 21: mod_base = OTHER; note = 2'-O-methyluridine-3'-phosphorothioate
  modified_base 22: mod_base = OTHER; note = 2'-O-methylcytidine-3'- phosphorothioate
  modified_base 23: mod_base = OTHER; note = 2'-O-methylcytidine-3'-phosphate
gaactcaacatcatgcccgttcc

SEQ ID NO: 2132 - RNA, 21 nt, synthetic construct
  misc_feature 1..21: note = Description of Artificial Sequence: Synthetic oligonucleotide
  source 1..21: mol_type = other RNA
  modified_base 1: mod_base = OTHER; note = 2'-O-methyladenosine-3'- phosphorothioate
  modified_base 2: mod_base = OTHER; note = 2'-O-methylcytidine-3'- phosphorothioate
  modified_base 3: mod_base = OTHER; note = 2'-O-methylguanosine-3'-phosphate
  modified_base 4: mod_base = OTHER; note = 2'-O-methylguanosine-3'-phosphate
  modified_base 5: mod_base = OTHER; note = 2'-O-methylguanosine-3'-phosphate
  modified_base 6: mod_base = OTHER; note = 2'-O-methylcytidine-3'-phosphate
  modified_base 7: mod_base = OTHER; note = 2'-fluoroadenosine-3'-phosphate
  modified_base 8: mod_base = OTHER; note = 2'-O-methyluridine-3'-phosphate
  modified_base 9: mod_base = OTHER; note = 2'-fluoroguanosine-3'-phosphate
  modified_base 10: mod_base = OTHER; note = 2'-fluoroadenosine-3'-phosphate
  modified_base 11: mod_base = OTHER; note = 2'-fluorouridine-3'-phosphate
  modified_base 12: mod_base = OTHER; note = 2'-O-methylguanosine-3'-phosphate
  modified_base 13: mod_base = OTHER; note = 2'-O-methyluridine-3'-phosphate
  modified_base 14: mod_base = OTHER; note = 2'-O-methyluridine-3'-phosphate
  modified_base 15: mod_base = OTHER; note = 2'-O-methylguanosine-3'-phosphate
  modified_base 16: mod_base = OTHER; note = 2'-O-methyladenosine-3'-phosphate
  modified_base 17: mod_base = OTHER; note = 2'-O-methylguanosine-3'-phosphate
  modified_base 18: mod_base = OTHER; note = 2'-O-methyluridine-3'-phosphate
  modified_base 19: mod_base = OTHER; note = 2'-O-methyluridine-3'-phosphate
  modified_base 20: mod_base = OTHER; note = 2'-O-methylcytidine-3'-phosphate
  modified_base 21: mod_base = OTHER; note = 2'-O-methylcytidine-3'-phosphate attached to N-[tris(N-acetylgalactosamine-alkyl)-amidodecanoyl)]-4-hydr oxyprolinol Hyp-(N-acetylgalactosamine-alkyl)3
acgggcatgatgttgagttcc

SEQ ID NO: 2133 - RNA, 23 nt, synthetic construct
  misc_feature 1..23: note = Description of Artificial Sequence: Synthetic oligonucleotide
  source 1..23: mol_type = other RNA
  modified_base 1: mod_base = OTHER; note = 2'-O-methylguanosine-3'- phosphorothioate
  modified_base 2: mod_base = OTHER; note = 2'-fluoroguanosine-3'-phosphorothioate
  modified_base 3: mod_base = OTHER; note = 2'-O-methyladenosine-3'-phosphate
  modified_base 4: mod_base = OTHER; note = 2'-O-methyladenosine-3'-phosphate
  modified_base 5: mod_base = OTHER; note = 2'-O-methylcytidine-3'-phosphate
  modified_base 6: mod_base = OTHER; note = 2'-fluorouridine-3'-phosphate
  modified_base 7: mod_base = OTHER; note = 2'-O-methylcytidine-3'-phosphate
  modified_base 8: mod_base = OTHER; note = 2'-fluoroadenosine-3'-phosphate
  modified_base 9: mod_base = OTHER; note = 2'-fluoroadenosine-3'-phosphate
  modified_base 10: mod_base = OTHER; note = 2'-O-methylcytidine-3'-phosphate
  modified_base 11: mod_base = OTHER; note = 2'-O-methyladenosine-3'-phosphate
  modified_base 12: mod_base = OTHER; note = 2'-O-methyluridine-3'-phosphate
  modified_base 13: mod_base = OTHER; note = 2'-O-methylcytidine-3'-phosphate
  modified_base 14: mod_base = OTHER; note = 2'-fluoroadenosine-3'-phosphate
  modified_base 15: mod_base = OTHER; note = 2'-O-methyluridine-3'-phosphate
  modified_base 16: mod_base = OTHER; note = 2'-fluoroguanosine-3'-phosphate
  modified_base 17: mod_base = OTHER; note = 2'-O-methylcytidine-3'-phosphate
  modified_base 18: mod_base = OTHER; note = 2'-O-methylcytidine-3'-phosphate
  modified_base 19: mod_base = OTHER; note = 2'-O-methylcytidine-3'-phosphate
  modified_base 20: mod_base = OTHER; note = 2'-O-methylguanosine-3'-phosphate
  modified_base 21: mod_base = OTHER; note = 2'-O-methyluridine-3'-phosphorothioate
  modified_base 22: mod_base = OTHER; note = 2'-O-methyluridine-3'-phosphorothioate
  modified_base 23: mod_base = OTHER; note = 2'-O-methylcytidine-3'-phosphate
ggaactcaacatcatgcccgttc

SEQ ID NO: 2134 - RNA, 21 nt, synthetic construct
  misc_feature 1..21: note = Description of Artificial Sequence: Synthetic oligonucleotide
  source 1..21: mol_type = other RNA
  modified_base 1: mod_base = OTHER; note = 2'-O-methyluridine-3'-phosphorothioate
  modified_base 2: mod_base = OTHER; note = 2'-O-methylguanosine-3'- phosphorothioate
  modified_base 3: mod_base = OTHER; note = 2'-O-methylguanosine-3'-phosphate
  modified_base 4: mod_base = OTHER; note = 2'-O-methylguanosine-3'-phosphate
  modified_base 5: mod_base = OTHER; note = 2'-O-methyladenosine-3'-phosphate
  modified_base 6: mod_base = OTHER; note = 2'-O-methyladenosine-3'-phosphate
  modified_base 7: mod_base = OTHER; note = 2'-fluorocytidine-3'-phosphate
  modified_base 8: mod_base = OTHER; note = 2'-O-methylguanosine-3'-phosphate
  modified_base 9: mod_base = OTHER; note = 2'-fluoroguanosine-3'-phosphate
  modified_base 10: mod_base = OTHER; note = 2'-fluoroguanosine-3'-phosphate
  modified_base 11: mod_base = OTHER; note = 2'-fluorocytidine-3'-phosphate
  modified_base 12: mod_base = OTHER; note = 2'-O-methyladenosine-3'-phosphate
  modified_base 13: mod_base = OTHER; note = 2'-O-methyluridine-3'-phosphate
  modified_base 14: mod_base = OTHER; note = 2'-O-methylguanosine-3'-phosphate
  modified_base 15: mod_base = OTHER; note = 2'-O-methyladenosine-3'-phosphate
  modified_base 16: mod_base = OTHER; note = 2'-O-methyluridine-3'-phosphate
  modified_base 17: mod_base = OTHER; note = 2'-O-methylguanosine-3'-phosphate
  modified_base 18: mod_base = OTHER; note = 2'-O-methyluridine-3'-phosphate
  modified_base 19: mod_base = OTHER; note = 2'-O-methyluridine-3'-phosphate
  modified_base 20: mod_base = OTHER; note = 2'-O-methylguanosine-3'-phosphate
  modified_base 21: mod_base = OTHER; note = 2'-O-methyladenosine-3'-phosphate attached to N-[tris(N-acetylgalactosamine-alkyl)-amidodecanoyl)]-4-hydr oxyprolinol Hyp-(N-acetylgalactosamine-alkyl)3
tgggaacgggcatgatgttga

SEQ ID NO: 2135 - RNA, 23 nt, synthetic construct
  misc_feature 1..23: note = Description of Artificial Sequence: Synthetic oligonucleotide
  source 1..23: mol_type = other RNA
  modified_base 1: mod_base = OTHER; note = 2'-O-methyluridine-3'-phosphorothioate
  modified_base 2: mod_base = OTHER; note = 2'-fluorocytidine-3'-phosphorothioate
  modified_base 3: mod_base = OTHER; note = 2'-O-methyladenosine-3'-phosphate
  modified_base 4: mod_base = OTHER; note = 2'-O-methyladenosine-3'-phosphate
  modified_base 5: mod_base = OTHER; note = 2'-O-methylcytidine-3'-phosphate
  modified_base 6: mod_base = OTHER; note = 2'-fluoroadenosine-3'-phosphate
  modified_base 7: mod_base = OTHER; note = 2'-O-methyluridine-3'-phosphate
  modified_base 8: mod_base = OTHER; note = 2'-fluorocytidine-3'-phosphate
  modified_base 9: mod_base = OTHER; note = 2'-fluoroadenosine-3'-phosphate
  modified_base 10: mod_base = OTHER; note = 2'-O-methyluridine-3'-phosphate
  modified_base 11: mod_base = OTHER; note = 2'-O-methylguanosine-3'-phosphate
  modified_base 12: mod_base = OTHER; note = 2'-O-methylcytidine-3'-phosphate
  modified_base 13: mod_base = OTHER; note = 2'-O-methylcytidine-3'-phosphate
  modified_base 14: mod_base = OTHER; note = 2'-fluorocytidine-3'-phosphate
  modified_base 15: mod_base = OTHER; note = 2'-O-methylguanosine-3'-phosphate
  modified_base 16: mod_base = OTHER; note = 2'-fluorouridine-3'-phosphate
  modified_base 17: mod_base = OTHER; note = 2'-O-methyluridine-3'-phosphate
  modified_base 18: mod_base = OTHER; note = 2'-O-methylcytidine-3'-phosphate
  modified_base 19: mod_base = OTHER; note = 2'-O-methylcytidine-3'-phosphate
  modified_base 20: mod_base = OTHER; note = 2'-O-methylcytidine-3'-phosphate
  modified_base 21: mod_base = OTHER; note = 2'-O-methyladenosine-3'- phosphorothioate
  modified_base 22: mod_base = OTHER; note = 2'-O-methylguanosine-3'- phosphorothioate
  modified_base 23: mod_base = OTHER; note = 2'-O-methylguanosine-3'-phosphate
tcaacatcatgcccgttcccagg

SEQ ID NO: 2136 - RNA, 21 nt, synthetic construct
  misc_feature 1..21: note = Description of Artificial Sequence: Synthetic oligonucleotide
  source 1..21: mol_type = other RNA
  modified_base 1: mod_base = OTHER; note = 2'-O-methylcytidine-3'- phosphorothioate
  modified_base 2: mod_base = OTHER; note = 2'-O-methyluridine-3'-phosphorothioate
  modified_base 3: mod_base = OTHER; note = 2'-O-methylguanosine-3'-phosphate
  modified_base 4: mod_base = OTHER; note = 2'-O-methylguanosine-3'-phosphate
  modified_base 5: mod_base = OTHER; note = 2'-O-methylguanosine-3'-phosphate
  modified_base 6: mod_base = OTHER; note = 2'-O-methyladenosine-3'-phosphate
  modified_base 7: mod_base = OTHER; note = 2'-fluoroadenosine-3'-phosphate
  modified_base 8: mod_base = OTHER; note = 2'-O-methylcytidine-3'-phosphate
  modified_base 9: mod_base = OTHER; note = 2'-fluoroguanosine-3'-phosphate
  modified_base 10: mod_base = OTHER; note = 2'-fluoroguanosine-3'-phosphate
  modified_base 11: mod_base = OTHER; note = 2'-fluoroguanosine-3'-phosphate
  modified_base 12: mod_base = OTHER; note = 2'-O-methylcytidine-3'-phosphate
  modified_base 13: mod_base = OTHER; note = 2'-O-methyladenosine-3'-phosphate
  modified_base 14: mod_base = OTHER; note = 2'-O-methyluridine-3'-phosphate
  modified_base 15: mod_base = OTHER; note = 2'-O-methylguanosine-3'-phosphate
  modified_base 16: mod_base = OTHER; note = 2'-O-methyladenosine-3'-phosphate
  modified_base 17: mod_base = OTHER; note = 2'-O-methyluridine-3'-phosphate
  modified_base 18: mod_base = OTHER; note = 2'-O-methylguanosine-3'-phosphate
  modified_base 19: mod_base = OTHER; note = 2'-O-methyluridine-3'-phosphate
  modified_base 20: mod_base = OTHER; note = 2'-O-methyluridine-3'-phosphate
  modified_base 21: mod_base = OTHER; note = 2'-O-methylguanosine-3'-phosphate attached to N-[tris(N-acetylgalactosamine-alkyl)-amidodecanoyl)]-4-hydr oxyprolinol Hyp-(N-acetylgalactosamine-alkyl)3
ctgggaacgggcatgatgttg

SEQ ID NO: 2137 - RNA, 23 nt, synthetic construct
  misc_feature 1..23: note = Description of Artificial Sequence: Synthetic oligonucleotide
  source 1..23: mol_type = other RNA
  modified_base 1: mod_base = OTHER; note = 2'-O-methylcytidine-3'- phosphorothioate
  modified_base 2: mod_base = OTHER; note = 2'-fluoroadenosine-3'-phosphorothioate
  modified_base 3: mod_base = OTHER; note = 2'-O-methyladenosine-3'-phosphate
  modified_base 4: mod_base = OTHER; note = 2'-O-methylcytidine-3'-phosphate
  modified_base 5: mod_base = OTHER; note = 2'-O-methyladenosine-3'-phosphate
  modified_base 6: mod_base = OTHER; note = 2'-fluorouridine-3'-phosphate
  modified_base 7: mod_base = OTHER; note = 2'-O-methylcytidine-3'-phosphate
  modified_base 8: mod_base = OTHER; note = 2'-fluoroadenosine-3'-phosphate
  modified_base 9: mod_base = OTHER; note = 2'-fluorouridine-3'-phosphate
  modified_base 10: mod_base = OTHER; note = 2'-O-methylguanosine-3'-phosphate
  modified_base 11: mod_base = OTHER; note = 2'-O-methylcytidine-3'-phosphate
  modified_base 12: mod_base = OTHER; note = 2'-O-methylcytidine-3'-phosphate
  modified_base 13: mod_base = OTHER; note = 2'-O-methylcytidine-3'-phosphate
  modified_base 14: mod_base = OTHER; note = 2'-fluoroguanosine-3'-phosphate
  modified_base 15: mod_base = OTHER; note = 2'-O-methyluridine-3'-phosphate
  modified_base 16: mod_base = OTHER; note = 2'-fluorouridine-3'-phosphate
  modified_base 17: mod_base = OTHER; note = 2'-O-methylcytidine-3'-phosphate
  modified_base 18: mod_base = OTHER; note = 2'-O-methylcytidine-3'-phosphate
  modified_base 19: mod_base = OTHER; note = 2'-O-methylcytidine-3'-phosphate
  modified_base 20: mod_base = OTHER; note = 2'-O-methyladenosine-3'-phosphate
  modified_base 21: mod_base = OTHER; note = 2'-O-methylguanosine-3'- phosphorothioate
  modified_base 22: mod_base = OTHER; note = 2'-O-methylguanosine-3'- phosphorothioate
  modified_base 23: mod_base = OTHER; note = 2'-O-methylguanosine-3'-phosphate
caacatcatgcccgttcccaggg

SEQ ID NO: 2138 - RNA, 21 nt, synthetic construct
  misc_feature 1..21: note = Description of Artificial Sequence: Synthetic oligonucleotide
  source 1..21: mol_type = other RNA
  modified_base 1: mod_base = OTHER; note = 2'-O-methyladenosine-3'- phosphorothioate
  modified_base 2: mod_base = OTHER; note = 2'-O-methyluridine-3'-phosphorothioate
  modified_base 3: mod_base = OTHER; note = 2'-O-methylguanosine-3'-phosphate
  modified_base 4: mod_base = OTHER; note = 2'-O-methyluridine-3'-phosphate
  modified_base 5: mod_base = OTHER; note = 2'-O-methylguanosine-3'-phosphate
  modified_base 6: mod_base = OTHER; note = 2'-O-methylguanosine-3'-phosphate
  modified_base 7: mod_base = OTHER; note = 2'-fluorocytidine-3'-phosphate
  modified_base 8: mod_base = OTHER; note = 2'-O-methyluridine-3'-phosphate
  modified_base 9: mod_base = OTHER; note = 2'-fluoroadenosine-3'-phosphate
  modified_base 10: mod_base = OTHER; note = 2'-fluoroadenosine-3'-phosphate
  modified_base 11: mod_base = OTHER; note = 2'-fluoroadenosine-3'-phosphate
  modified_base 12: mod_base = OTHER; note = 2'-O-methylguanosine-3'-phosphate
  modified_base 13: mod_base = OTHER; note = 2'-O-methylcytidine-3'-phosphate
  modified_base 14: mod_base = OTHER; note = 2'-O-methyladenosine-3'-phosphate
  modified_base 15: mod_base = OTHER; note = 2'-O-methyladenosine-3'-phosphate
  modified_base 16: mod_base = OTHER; note = 2'-O-methyluridine-3'-phosphate
  modified_base 17: mod_base = OTHER; note = 2'-O-methyladenosine-3'-phosphate
  modified_base 18: mod_base = OTHER; note = 2'-O-methylguanosine-3'-phosphate
  modified_base 19: mod_base = OTHER; note = 2'-O-methyladenosine-3'-phosphate
  modified_base 20: mod_base = OTHER; note = 2'-O-methylcytidine-3'-phosphate
  modified_base 21: mod_base = OTHER; note = 2'-O-methylcytidine-3'-phosphate attached to N-[tris(N-acetylgalactosamine-alkyl)-amidodecanoyl)]-4-hydr oxyprolinol Hyp-(N-acetylgalactosamine-alkyl)3
atgtggctaaagcaatagacc

SEQ ID NO: 2139 - RNA, 23 nt, synthetic construct
  misc_feature 1..23: note = Description of Artificial Sequence: Synthetic oligonucleotide
  source 1..23: mol_type = other RNA
  modified_base 1: mod_base = OTHER; note = 2'-O-methylguanosine-3'- phosphorothioate
  modified_base 2: mod_base = OTHER; note = 2'-fluoroguanosine-3'-phosphorothioate
  modified_base 3: mod_base = OTHER; note = 2'-O-methyluridine-3'-phosphate
  modified_base 4: mod_base = OTHER; note = 2'-O-methylcytidine-3'-phosphate
  modified_base 5: mod_base = OTHER; note = 2'-O-methyluridine-3'-phosphate
  modified_base 6: mod_base = OTHER; note = 2'-fluoroadenosine-3'-phosphate
  modified_base 7: mod_base = OTHER; note = 2'-O-methyluridine-3'-phosphate
  modified_base 8: mod_base = OTHER; note = 2'-fluorouridine-3'-phosphate
  modified_base 9: mod_base = OTHER; note = 2'-fluoroguanosine-3'-phosphate
  modified_base 10: mod_base = OTHER; note = 2'-O-methylcytidine-3'-phosphate
  modified_base 11: mod_base = OTHER; note = 2'-O-methyluridine-3'-phosphate
  modified_base 12: mod_base = OTHER; note = 2'-O-methyluridine-3'-phosphate
  modified_base 13: mod_base = OTHER; note = 2'-O-methyluridine-3'-phosphate
  modified_base 14: mod_base = OTHER; note = 2'-fluoroadenosine-3'-phosphate
  modified_base 15: mod_base = OTHER; note = 2'-O-methylguanosine-3'-phosphate
  modified_base 16: mod_base = OTHER; note = 2'-fluorocytidine-3'-phosphate
  modified_base 17: mod_base = OTHER; note = 2'-O-methylcytidine-3'-phosphate
  modified_base 18: mod_base = OTHER; note = 2'-O-methyladenosine-3'-phosphate
  modified_base 19: mod_base = OTHER; note = 2'-O-methylcytidine-3'-phosphate
  modified_base 20: mod_base = OTHER; note = 2'-O-methyladenosine-3'-phosphate
  modified_base 21: mod_base = OTHER; note = 2'-O-methyluridine-3'-phosphorothioate
  modified_base 22: mod_base = OTHER; note = 2'-O-methyladenosine-3'- phosphorothioate
  modified_base 23: mod_base = OTHER; note = 2'-O-methyluridine-3'-phosphate
ggtctattgctttagccacatat

SEQ ID NO: 2140 - RNA, 21 nt, synthetic construct
  misc_feature 1..21: note = Description of Artificial Sequence: Synthetic oligonucleotide
  source 1..21: mol_type = other RNA
  modified_base 1: mod_base = OTHER; note = 2'-O-methyluridine-3'-phosphorothioate
  modified_base 2: mod_base = OTHER; note = 2'-O-methylguanosine-3'- phosphorothioate
  modified_base 3: mod_base = OTHER; note = 2'-O-methyluridine-3'-phosphate
  modified_base 4: mod_base = OTHER; note = 2'-O-methylguanosine-3'-phosphate
  modified_base 5: mod_base = OTHER; note = 2'-O-methylguanosine-3'-phosphate
  modified_base 6: mod_base = OTHER; note = 2'-O-methylcytidine-3'-phosphate
  modified_base 7: mod_base = OTHER; note = 2'-fluorouridine-3'-phosphate
  modified_base 8: mod_base = OTHER; note = 2'-O-methyladenosine-3'-phosphate
  modified_base 9: mod_base = OTHER; note = 2'-fluoroadenosine-3'-phosphate
  modified_base 10: mod_base = OTHER; note = 2'-fluoroadenosine-3'-phosphate
  modified_base 11: mod_base = OTHER; note = 2'-fluoroguanosine-3'-phosphate
  modified_base 12: mod_base = OTHER; note = 2'-O-methylcytidine-3'-phosphate
  modified_base 13: mod_base = OTHER; note = 2'-O-methyladenosine-3'-phosphate
  modified_base 14: mod_base = OTHER; note = 2'-O-methyladenosine-3'-phosphate
  modified_base 15: mod_base = OTHER; note = 2'-O-methyluridine-3'-phosphate
  modified_base 16: mod_base = OTHER; note = 2'-O-methyladenosine-3'-phosphate
  modified_base 17: mod_base = OTHER; note = 2'-O-methylguanosine-3'-phosphate
  modified_base 18: mod_base = OTHER; note = 2'-O-methyladenosine-3'-phosphate
  modified_base 19: mod_base = OTHER; note = 2'-O-methylcytidine-3'-phosphate
  modified_base 20: mod_base = OTHER; note = 2'-O-methylcytidine-3'-phosphate
  modified_base 21: mod_base = OTHER; note = 2'-O-methylcytidine-3'-phosphate attached to N-[tris(N-acetylgalactosamine-alkyl)-amidodecanoyl)]-4-hydr oxyprolinol Hyp-(N-acetylgalactosamine-alkyl)3
tgtggctaaagcaatagaccc

SEQ ID NO: 2141 - RNA, 23 nt, synthetic construct
  misc_feature 1..23: note = Description of Artificial Sequence: Synthetic oligonucleotide
  source 1..23: mol_type = other RNA
  modified_base 1: mod_base = OTHER; note = 2'-O-methylguanosine-3'- phosphorothioate
  modified_base 2: mod_base = OTHER; note = 2'-fluoroguanosine-3'-phosphorothioate
  modified_base 3: mod_base = OTHER; note = 2'-O-methylguanosine-3'-phosphate
  modified_base 4: mod_base = OTHER; note = 2'-O-methyluridine-3'-phosphate
  modified_base 5: mod_base = OTHER; note = 2'-O-methylcytidine-3'-phosphate
  modified_base 6: mod_base = OTHER; note = 2'-fluorouridine-3'-phosphate
  modified_base 7: mod_base = OTHER; note = 2'-O-methyladenosine-3'-phosphate
  modified_base 8: mod_base = OTHER; note = 2'-fluorouridine-3'-phosphate
  modified_base 9: mod_base = OTHER; note = 2'-fluorouridine-3'-phosphate
  modified_base 10: mod_base = OTHER; note = 2'-O-methylguanosine-3'-phosphate
  modified_base 11: mod_base = OTHER; note = 2'-O-methylcytidine-3'-phosphate
  modified_base 12: mod_base = OTHER; note = 2'-O-methyluridine-3'-phosphate
  modified_base 13: mod_base = OTHER; note = 2'-O-methyluridine-3'-phosphate
  modified_base 14: mod_base = OTHER; note = 2'-fluorouridine-3'-phosphate
  modified_base 15: mod_base = OTHER; note = 2'-O-methyladenosine-3'-phosphate
  modified_base 16: mod_base = OTHER; note = 2'-fluoroguanosine-3'-phosphate
  modified_base 17: mod_base = OTHER; note = 2'-O-methylcytidine-3'-phosphate
  modified_base 18: mod_base = OTHER; note = 2'-O-methylcytidine-3'-phosphate
  modified_base 19: mod_base = OTHER; note = 2'-O-methyladenosine-3'-phosphate
  modified_base 20: mod_base = OTHER; note = 2'-O-methylcytidine-3'-phosphate
  modified_base 21: mod_base = OTHER; note = 2'-O-methyladenosine-3'- phosphorothioate
  modified_base 22: mod_base = OTHER; note = 2'-O-methyluridine-3'-phosphorothioate
  modified_base 23: mod_base = OTHER; note = 2'-O-methyladenosine-3'-phosphate
gggtctattgctttagccacata

SEQ ID NO: 2142 - RNA, 21 nt, synthetic construct
  misc_feature 1..21: note = Description of Artificial Sequence: Synthetic oligonucleotide
  source 1..21: mol_type = other RNA
  modified_base 1: mod_base = OTHER; note = 2'-O-methylguanosine-3'- phosphorothioate
  modified_base 2: mod_base = OTHER; note = 2'-O-methylcytidine-3'- phosphorothioate
  modified_base 3: mod_base = OTHER; note = 2'-O-methyladenosine-3'-phosphate
  modified_base 4: mod_base = OTHER; note = 2'-O-methyluridine-3'-phosphate
  modified_base 5: mod_base = OTHER; note = 2'-O-methyladenosine-3'-phosphate
  modified_base 6: mod_base = OTHER; note = 2'-O-methyluridine-3'-phosphate
  modified_base 7: mod_base = OTHER; note = 2'-fluoroguanosine-3'-phosphate
  modified_base 8: mod_base = OTHER; note = 2'-O-methyluridine-3'-phosphate
  modified_base 9: mod_base = OTHER; note = 2'-fluoroguanosine-3'-phosphate
  modified_base 10: mod_base = OTHER; note = 2'-fluoroguanosine-3'-phosphate
  modified_base 11: mod_base = OTHER; note = 2'-fluorocytidine-3'-phosphate
  modified_base 12: mod_base = OTHER; note = 2'-O-methyluridine-3'-phosphate
  modified_base 13: mod_base = OTHER; note = 2'-O-methyladenosine-3'-phosphate
  modified_base 14: mod_base = OTHER; note = 2'-O-methyladenosine-3'-phosphate
  modified_base 15: mod_base = OTHER; note = 2'-O-methyladenosine-3'-phosphate
  modified_base 16: mod_base = OTHER; note = 2'-O-methylguanosine-3'-phosphate
  modified_base 17: mod_base = OTHER; note = 2'-O-methylcytidine-3'-phosphate
  modified_base 18: mod_base = OTHER; note = 2'-O-methyladenosine-3'-phosphate
  modified_base 19: mod_base = OTHER; note = 2'-O-methyladenosine-3'-phosphate
  modified_base 20: mod_base = OTHER; note = 2'-O-methyluridine-3'-phosphate
  modified_base 21: mod_base = OTHER; note = 2'-O-methyladenosine-3'-phosphate attached to N-[tris(N-acetylgalactosamine-alkyl)-amidodecanoyl)]-4-hydr oxyprolinol Hyp-(N-acetylgalactosamine-alkyl)3
gcatatgtggctaaagcaata

SEQ ID NO: 2143 - RNA, 23 nt, synthetic construct
  misc_feature 1..23: note = Description of Artificial Sequence: Synthetic oligonucleotide
  source 1..23: mol_type = other RNA
  modified_base 1: mod_base = OTHER; note = 2'-O-methyluridine-3'-phosphorothioate
  modified_base 2: mod_base = OTHER; note = 2'-fluoroadenosine-3'-phosphorothioate
  modified_base 3: mod_base = OTHER; note = 2'-O-methyluridine-3'-phosphate
  modified_base 4: mod_base = OTHER; note = 2'-O-methyluridine-3'-phosphate
  modified_base 5: mod_base = OTHER; note = 2'-O-methylguanosine-3'-phosphate
  modified_base 6: mod_base = OTHER; note = 2'-fluorocytidine-3'-phosphate
  modified_base 7: mod_base = OTHER; note = 2'-O-methyluridine-3'-phosphate
  modified_base 8: mod_base = OTHER; note = 2'-fluorouridine-3'-phosphate
  modified_base 9: mod_base = OTHER; note = 2'-fluorouridine-3'-phosphate
  modified_base 10: mod_base = OTHER; note = 2'-O-methyladenosine-3'-phosphate
  modified_base 11: mod_base = OTHER; note = 2'-O-methylguanosine-3'-phosphate
  modified_base 12: mod_base = OTHER; note = 2'-O-methylcytidine-3'-phosphate
  modified_base 13: mod_base = OTHER; note = 2'-O-methylcytidine-3'-phosphate
  modified_base 14: mod_base = OTHER; note = 2'-fluoroadenosine-3'-phosphate
  modified_base 15: mod_base = OTHER; note = 2'-O-methylcytidine-3'-phosphate
  modified_base 16: mod_base = OTHER; note = 2'-fluoroadenosine-3'-phosphate
  modified_base 17: mod_base = OTHER; note = 2'-O-methyluridine-3'-phosphate
  modified_base 18: mod_base = OTHER; note = 2'-O-methyladenosine-3'-phosphate
  modified_base 19: mod_base = OTHER; note = 2'-O-methyluridine-3'-phosphate
  modified_base 20: mod_base = OTHER; note = 2'-O-methylguanosine-3'-phosphate
  modified_base 21: mod_base = OTHER; note = 2'-O-methylcytidine-3'- phosphorothioate
  modified_base 22: mod_base = OTHER; note = 2'-O-methyladenosine-3'- phosphorothioate
  modified_base 23: mod_base = OTHER; note = 2'-O-methylguanosine-3'-phosphate
tattgctttagccacatatgcag

SEQ ID NO: 2144 - RNA, 21 nt, synthetic construct
  misc_feature 1..21: note = Description of Artificial Sequence: Synthetic oligonucleotide
  source 1..21: mol_type = other RNA
  modified_base 1: mod_base = OTHER; note = 2'-O-methyluridine-3'-phosphorothioate
  modified_base 2: mod_base = OTHER; note = 2'-O-methylguanosine-3'- phosphorothioate
  modified_base 3: mod_base = OTHER; note = 2'-O-methylcytidine-3'-phosphate
  modified_base 4: mod_base = OTHER; note = 2'-O-methyladenosine-3'-phosphate
  modified_base 5: mod_base = OTHER; note = 2'-O-methyluridine-3'-phosphate
  modified_base 6: mod_base = OTHER; note = 2'-O-methyladenosine-3'-phosphate
  modified_base 7: mod_base = OTHER; note = 2'-fluorouridine-3'-phosphate
  modified_base 8: mod_base = OTHER; note = 2'-O-methylguanosine-3'-phosphate
  modified_base 9: mod_base = OTHER; note = 2'-fluorouridine-3'-phosphate
  modified_base 10: mod_base = OTHER; note = 2'-fluoroguanosine-3'-phosphate
  modified_base 11: mod_base = OTHER; note = 2'-fluoroguanosine-3'-phosphate
  modified_base 12: mod_base = OTHER; note = 2'-O-methylcytidine-3'-phosphate
  modified_base 13: mod_base = OTHER; note = 2'-O-methyluridine-3'-phosphate
  modified_base 14: mod_base = OTHER; note = 2'-O-methyladenosine-3'-phosphate
  modified_base 15: mod_base = OTHER; note = 2'-O-methyladenosine-3'-phosphate
  modified_base 16: mod_base = OTHER; note = 2'-O-methyladenosine-3'-phosphate
  modified_base 17: mod_base = OTHER; note = 2'-O-methylguanosine-3'-phosphate
  modified_base 18: mod_base = OTHER; note = 2'-O-methylcytidine-3'-phosphate
  modified_base 19: mod_base = OTHER; note = 2'-O-methyladenosine-3'-phosphate
  modified_base 20: mod_base = OTHER; note = 2'-O-methyladenosine-3'-phosphate
  modified_base 21: mod_base = OTHER; note = 2'-O-methyluridine-3'-phosphate attached to N-[tris(N-acetylgalactosamine-alkyl)-amidodecanoyl)]-4-hydr oxyprolinol Hyp-(N-acetylgalactosamine-alkyl)3
tgcatatgtggctaaagcaat

SEQ ID NO: 2145 - RNA, 23 nt, synthetic construct
  misc_feature 1..23: note = Description of Artificial Sequence: Synthetic oligonucleotide
  source 1..23: mol_type = other RNA
  modified_base 1: mod_base = OTHER; note = 2'-O-methyladenosine-3'- phosphorothioate
  modified_base 2: mod_base = OTHER; note = 2'-fluorouridine -3'-phosphorothioate
  modified_base 3: mod_base = OTHER; note = 2'-O-methyluridine-3'-phosphate
  modified_base 4: mod_base = OTHER; note = 2'-O-methylguanosine-3'-phosphate
  modified_base 5: mod_base = OTHER; note = 2'-O-methylcytidine-3'-phosphate
  modified_base 6: mod_base = OTHER; note = 2'-fluorouridine-3'-phosphate
  modified_base 7: mod_base = OTHER; note = 2'-O-methyluridine-3'-phosphate
  modified_base 8: mod_base = OTHER; note = 2'-fluorouridine-3'-phosphate
  modified_base 9: mod_base = OTHER; note = 2'-fluoroadenosine-3'-phosphate
  modified_base 10: mod_base = OTHER; note = 2'-O-methylguanosine-3'-phosphate
  modified_base 11: mod_base = OTHER; note = 2'-O-methylcytidine-3'-phosphate
  modified_base 12: mod_base = OTHER; note = 2'-O-methylcytidine-3'-phosphate
  modified_base 13: mod_base = OTHER; note = 2'-O-methyladenosine-3'-phosphate
  modified_base 14: mod_base = OTHER; note = 2'-fluorocytidine-3'-phosphate
  modified_base 15: mod_base = OTHER; note = 2'-O-methyladenosine-3'-phosphate
  modified_base 16: mod_base = OTHER; note = 2'-fluorouridine-3'-phosphate
  modified_base 17: mod_base = OTHER; note = 2'-O-methyladenosine-3'-phosphate
  modified_base 18: mod_base = OTHER; note = 2'-O-methyluridine-3'-phosphate
  modified_base 19: mod_base = OTHER; note = 2'-O-methylguanosine-3'-phosphate
  modified_base 20: mod_base = OTHER; note = 2'-O-methylcytidine-3'-phosphate
  modified_base 21: mod_base = OTHER; note = 2'-O-methyladenosine-3'- phosphorothioate
  modified_base 22: mod_base = OTHER; note = 2'-O-methylguanosine-3'- phosphorothioate
  modified_base 23: mod_base = OTHER; note = 2'-O-methylcytidine-3'-phosphate
attgctttagccacatatgcagc

SEQ ID NO: 2146 - RNA, 21 nt, synthetic construct
  misc_feature 1..21: note = Description of Artificial Sequence: Synthetic oligonucleotide
  source 1..21: mol_type = other RNA
  modified_base 1: mod_base = OTHER; note = 2'-O-methyladenosine-3'- phosphorothioate
  modified_base 2: mod_base = OTHER; note = 2'-O-methylguanosine-3'- phosphorothioate
  modified_base 3: mod_base = OTHER; note = 2'-O-methylguanosine-3'-phosphate
  modified_base 4: mod_base = OTHER; note = 2'-O-methyladenosine-3'-phosphate
  modified_base 5: mod_base = OTHER; note = 2'-O-methyluridine-3'-phosphate
  modified_base 6: mod_base = OTHER; note = 2'-O-methylguanosine-3'-phosphate
  modified_base 7: mod_base = OTHER; note = 2'-fluorocytidine-3'-phosphate
  modified_base 8: mod_base = OTHER; note = 2'-O-methyluridine-3'-phosphate
  modified_base 9: mod_base = OTHER; note = 2'-fluorocytidine-3'-phosphate
  modified_base 10: mod_base = OTHER; note = 2'-fluorocytidine-3'-phosphate
  modified_base 11: mod_base = OTHER; note = 2'-fluoroguanosine-3'-phosphate
  modified_base 12: mod_base = OTHER; note = 2'-O-methylguanosine-3'-phosphate
  modified_base 13: mod_base = OTHER; note = 2'-O-methyladenosine-3'-phosphate
  modified_base 14: mod_base = OTHER; note = 2'-O-methyladenosine-3'-phosphate
  modified_base 15: mod_base = OTHER; note = 2'-O-methyluridine-3'-phosphate
  modified_base 16: mod_base = OTHER; note = 2'-O-methylguanosine-3'-phosphate
  modified_base 17: mod_base = OTHER; note = 2'-O-methyluridine-3'-phosphate
  modified_base 18: mod_base = OTHER; note = 2'-O-methyluridine-3'-phosphate
  modified_base 19: mod_base = OTHER; note = 2'-O-methylguanosine-3'-phosphate
  modified_base 20: mod_base = OTHER; note = 2'-O-methylcytidine-3'-phosphate
  modified_base 21: mod_base = OTHER; note = 2'-O-methyluridine-3'-phosphate attached to N-[tris(N-acetylgalactosamine-alkyl)-amidodecanoyl)]-4-hydr oxyprolinol Hyp-(N-acetylgalactosamine-alkyl)3
aggatgctccggaatgttgct

SEQ ID NO: 2147 - RNA, 23 nt, synthetic construct
  misc_feature 1..23: note = Description of Artificial Sequence: Synthetic oligonucleotide
  source 1..23: mol_type = other RNA
  modified_base 1: mod_base = OTHER; note = 2'-O-methyladenosine-3'- phosphorothioate
  modified_base 2: mod_base = OTHER; note = 2'-fluoroguanosine-3'-phosphorothioate
  modified_base 3: mod_base = OTHER; note = 2'-O-methylcytidine-3'-phosphate
  modified_base 4: mod_base = OTHER; note = 2'-O-methyladenosine-3'-phosphate
  modified_base 5: mod_base = OTHER; note = 2'-O-methyladenosine-3'-phosphate
  modified_base 6: mod_base = OTHER; note = 2'-fluorocytidine-3'-phosphate
  modified_base 7: mod_base = OTHER; note = 2'-O-methyladenosine-3'-phosphate
  modified_base 8: mod_base = OTHER; note = 2'-fluorouridine-3'-phosphate
  modified_base 9: mod_base = OTHER; note = 2'-fluorouridine-3'-phosphate
  modified_base 10: mod_base = OTHER; note = 2'-O-methylcytidine-3'-phosphate
  modified_base 11: mod_base = OTHER; note = 2'-O-methylcytidine-3'-phosphate
  modified_base 12: mod_base = OTHER; note = 2'-O-methylguanosine-3'-phosphate
  modified_base 13: mod_base = OTHER; note = 2'-O-methylguanosine-3'-phosphate
  modified_base 14: mod_base = OTHER; note = 2'-fluoroadenosine-3'-phosphate
  modified_base 15: mod_base = OTHER; note = 2'-O-methylguanosine-3'-phosphate
  modified_base 16: mod_base = OTHER; note = 2'-fluorocytidine-3'-phosphate
  modified_base 17: mod_base = OTHER; note = 2'-O-methyladenosine-3'-phosphate
  modified_base 18: mod_base = OTHER; note = 2'-O-methyluridine-3'-phosphate
  modified_base 19: mod_base = OTHER; note = 2'-O-methylcytidine-3'-phosphate
  modified_base 20: mod_base = OTHER; note = 2'-O-methylcytidine-3'-phosphate
  modified_base 21: mod_base = OTHER; note = 2'-O-methyluridine-3'-phosphorothioate
  modified_base 22: mod_base = OTHER; note = 2'-O-methyluridine-3'-phosphorothioate
  modified_base 23: mod_base = OTHER; note = 2'-O-methylguanosine-3'-phosphate
agcaacattccggagcatccttg

SEQ ID NO: 2148 - RNA, 21 nt, synthetic construct
  misc_feature 1..21: note = Description of Artificial Sequence: Synthetic oligonucleotide
  source 1..21: mol_type = other RNA
  modified_base 1: mod_base = OTHER; note = 2'-O-methylguanosine-3'- phosphorothioate
  modified_base 2: mod_base = OTHER; note = 2'-O-methylguanosine-3'- phosphorothioate
  modified_base 3: mod_base = OTHER; note = 2'-O-methyladenosine-3'-phosphate
  modified_base 4: mod_base = OTHER; note = 2'-O-methyluridine-3'-phosphate
  modified_base 5: mod_base = OTHER; note = 2'-O-methylguanosine-3'-phosphate
  modified_base 6: mod_base = OTHER; note = 2'-O-methylcytidine-3'-phosphate
  modified_base 7: mod_base = OTHER; note = 2'-fluorouridine-3'-phosphate
  modified_base 8: mod_base = OTHER; note = 2'-O-methylcytidine-3'-phosphate
  modified_base 9: mod_base = OTHER; note = 2'-fluorocytidine-3'-phosphate
  modified_base 10: mod_base = OTHER; note = 2'-fluoroguanosine-3'-phosphate
  modified_base 11: mod_base = OTHER; note = 2'-fluoroguanosine-3'-phosphate
  modified_base 12: mod_base = OTHER; note = 2'-O-methyladenosine-3'-phosphate
  modified_base 13: mod_base = OTHER; note = 2'-O-methyladenosine-3'-phosphate
  modified_base 14: mod_base = OTHER; note = 2'-O-methyluridine-3'-phosphate
  modified_base 15: mod_base = OTHER; note = 2'-O-methylguanosine-3'-phosphate
  modified_base 16: mod_base = OTHER; note = 2'-O-methyluridine-3'-phosphate
  modified_base 17: mod_base = OTHER; note = 2'-O-methyluridine-3'-phosphate
  modified_base 18: mod_base = OTHER; note = 2'-O-methylguanosine-3'-phosphate
  modified_base 19: mod_base = OTHER; note = 2'-O-methylcytidine-3'-phosphate
  modified_base 20: mod_base = OTHER; note = 2'-O-methyluridine-3'-phosphate
  modified_base 21: mod_base = OTHER; note = 2'-O-methylguanosine-3'-phosphate attached to N-[tris(N-acetylgalactosamine-alkyl)-amidodecanoyl)]-4-hydr oxyprolinol Hyp-(N-acetylgalactosamine-alkyl)3
ggatgctccggaatgttgctg

SEQ ID NO: 2149 - RNA, 23 nt, synthetic construct
  misc_feature 1..23: note = Description of Artificial Sequence: Synthetic oligonucleotide
  source 1..23: mol_type = other RNA
  modified_base 1: mod_base = OTHER; note = 2'-O-methylcytidine-3'- phosphorothioate
  modified_base 2: mod_base = OTHER; note = 2'-fluoroadenosine-3'-phosphorothioate
  modified_base 3: mod_base = OTHER; note = 2'-O-methylguanosine-3'-phosphate
  modified_base 4: mod_base = OTHER; note = 2'-O-methylcytidine-3'-phosphate
  modified_base 5: mod_base = OTHER; note = 2'-O-methyladenosine-3'-phosphate
  modified_base 6: mod_base = OTHER; note = 2'-fluoroadenosine-3'-phosphate
  modified_base 7: mod_base = OTHER; note = 2'-O-methylcytidine-3'-phosphate
  modified_base 8: mod_base = OTHER; note = 2'-fluoroadenosine-3'-phosphate
  modified_base 9: mod_base = OTHER; note = 2'-fluorouridine-3'-phosphate
  modified_base 10: mod_base = OTHER; note = 2'-O-methyluridine-3'-phosphate
  modified_base 11: mod_base = OTHER; note = 2'-O-methylcytidine-3'-phosphate
  modified_base 12: mod_base = OTHER; note = 2'-O-methylcytidine-3'-phosphate
  modified_base 13: mod_base = OTHER; note = 2'-O-methylguanosine-3'-phosphate
  modified_base 14: mod_base = OTHER; note = 2'-fluoroguanosine-3'-phosphate
  modified_base 15: mod_base = OTHER; note = 2'-O-methyladenosine-3'-phosphate
  modified_base 16: mod_base = OTHER; note = 2'-fluoroguanosine-3'-phosphate
  modified_base 17: mod_base = OTHER; note = 2'-O-methylcytidine-3'-phosphate
  modified_base 18: mod_base = OTHER; note = 2'-O-methyladenosine-3'-phosphate
  modified_base 19: mod_base = OTHER; note = 2'-O-methyluridine-3'-phosphate
  modified_base 20: mod_base = OTHER; note = 2'-O-methylcytidine-3'-phosphate
  modified_base 21: mod_base = OTHER; note = 2'-O-methylcytidine-3'- phosphorothioate
  modified_base 22: mod_base = OTHER; note = 2'-O-methyluridine-3'-phosphorothioate
  modified_base 23: mod_base = OTHER; note = 2'-O-methyluridine-3'-phosphate
cagcaacattccggagcatcctt

SEQ ID NO: 2150 - RNA, 21 nt, synthetic construct
  misc_feature 1..21: note = Description of Artificial Sequence: Synthetic oligonucleotide
  source 1..21: mol_type = other RNA
  modified_base 1: mod_base = OTHER; note = 2'-O-methyluridine-3'-phosphorothioate
  modified_base 2: mod_base = OTHER; note = 2'-O-methylcytidine-3'- phosphorothioate
  modified_base 3: mod_base = OTHER; note = 2'-O-methylcytidine-3'-phosphate
  modified_base 4: mod_base = OTHER; note = 2'-O-methyladenosine-3'-phosphate
  modified_base 5: mod_base = OTHER; note = 2'-O-methyladenosine-3'-phosphate
  modified_base 6: mod_base = OTHER; note = 2'-O-methylguanosine-3'-phosphate
  modified_base 7: mod_base = OTHER; note = 2'-fluoroguanosine-3'-phosphate
  modified_base 8: mod_base = OTHER; note = 2'-O-methyladenosine-3'-phosphate
  modified_base 9: mod_base = OTHER; note = 2'-fluorouridine-3'-phosphate
  modified_base 10: mod_base = OTHER; note = 2'-fluoroguanosine-3'-phosphate
  modified_base 11: mod_base = OTHER; note = 2'-fluorocytidine-3'-phosphate
  modified_base 12: mod_base = OTHER; note = 2'-O-methyluridine-3'-phosphate
  modified_base 13: mod_base = OTHER; note = 2'-O-methylcytidine-3'-phosphate
  modified_base 14: mod_base = OTHER; note = 2'-O-methylcytidine-3'-phosphate
  modified_base 15: mod_base = OTHER; note = 2'-O-methylguanosine-3'-phosphate
  modified_base 16: mod_base = OTHER; note = 2'-O-methylguanosine-3'-phosphate
  modified_base 17: mod_base = OTHER; note = 2'-O-methyladenosine-3'-phosphate
  modified_base 18: mod_base = OTHER; note = 2'-O-methyladenosine-3'-phosphate
  modified_base 19: mod_base = OTHER; note = 2'-O-methyluridine-3'-phosphate
  modified_base 20: mod_base = OTHER; note = 2'-O-methylguanosine-3'-phosphate
  modified_base 21: mod_base = OTHER; note = 2'-O-methyluridine-3'-phosphate attached to N-[tris(N-acetylgalactosamine-alkyl)-amidodecanoyl)]-4-hydr oxyprolinol Hyp-(N-acetylgalactosamine-alkyl)3
tccaaggatgctccggaatgt

SEQ ID NO: 2151 - RNA, 23 nt, synthetic construct
  misc_feature 1..23: note = Description of Artificial Sequence: Synthetic oligonucleotide
  source 1..23: mol_type = other RNA
  modified_base 1: mod_base = OTHER; note = 2'-O-methyladenosine-3'- phosphorothioate
  modified_base 2: mod_base = OTHER; note = 2'-fluorocytidine-3'-phosphorothioate
  modified_base 3: mod_base = OTHER; note = 2'-O-methyladenosine-3'-phosphate
  modified_base 4: mod_base = OTHER; note = 2'-O-methyluridine-3'-phosphate
  modified_base 5: mod_base = OTHER; note = 2'-O-methyluridine-3'-phosphate
  modified_base 6: mod_base = OTHER; note = 2'-fluorocytidine-3'-phosphate
  modified_base 7: mod_base = OTHER; note = 2'-O-methylcytidine-3'-phosphate
  modified_base 8: mod_base = OTHER; note = 2'-fluoroguanosine-3'-phosphate
  modified_base 9: mod_base = OTHER; note = 2'-fluoroguanosine-3'-phosphate
  modified_base 10: mod_base = OTHER; note = 2'-O-methyladenosine-3'-phosphate
  modified_base 11: mod_base = OTHER; note = 2'-O-methylguanosine-3'-phosphate
  modified_base 12: mod_base = OTHER; note = 2'-O-methylcytidine-3'-phosphate
  modified_base 13: mod_base = OTHER; note = 2'-O-methyladenosine-3'-phosphate
  modified_base 14: mod_base = OTHER; note = 2'-fluorouridine-3'-phosphate
  modified_base 15: mod_base = OTHER; note = 2'-O-methylcytidine-3'-phosphate
  modified_base 16: mod_base = OTHER; note = 2'-fluorocytidine-3'-phosphate
  modified_base 17: mod_base = OTHER; note = 2'-O-methyluridine-3'-phosphate
  modified_base 18: mod_base = OTHER; note = 2'-O-methyluridine-3'-phosphate
  modified_base 19: mod_base = OTHER; note = 2'-O-methylguanosine-3'-phosphate
  modified_base 20: mod_base = OTHER; note = 2'-O-methylguanosine-3'-phosphate
  modified_base 21: mod_base = OTHER; note = 2'-O-methyladenosine-3'- phosphorothioate
  modified_base 22: mod_base = OTHER; note = 2'-O-methyluridine-3'-phosphorothioate
  modified_base 23: mod_base = OTHER; note = 2'-O-methyladenosine-3'-phosphate
acattccggagcatccttggata

SEQ ID NO: 2152 - RNA, 21 nt, synthetic construct
  misc_feature 1..21: note = Description of Artificial Sequence: Synthetic oligonucleotide
  source 1..21: mol_type = other RNA
  modified_base 1: mod_base = OTHER; note = 2'-O-methyladenosine-3'- phosphorothioate
  modified_base 2: mod_base = OTHER; note = 2'-O-methyluridine-3'-phosphorothioate
  modified_base 3: mod_base = OTHER; note = 2'-O-methylcytidine-3'-phosphate
  modified_base 4: mod_base = OTHER; note = 2'-O-methylcytidine-3'-phosphate
  modified_base 5: mod_base = OTHER; note = 2'-O-methyladenosine-3'-phosphate
  modified_base 6: mod_base = OTHER; note = 2'-O-methyladenosine-3'-phosphate
  modified_base 7: mod_base = OTHER; note = 2'-fluoroguanosine-3'-phosphate
  modified_base 8: mod_base = OTHER; note = 2'-O-methylguanosine-3'-phosphate
  modified_base 9: mod_base = OTHER; note = 2'-fluoroadenosine-3'-phosphate
  modified_base 10: mod_base = OTHER; note = 2'-fluorouridine-3'-phosphate
  modified_base 11: mod_base = OTHER; note = 2'-fluoroguanosine-3'-phosphate
  modified_base 12: mod_base = OTHER; note = 2'-O-methylcytidine-3'-phosphate
  modified_base 13: mod_base = OTHER; note = 2'-O-methyluridine-3'-phosphate
  modified_base 14: mod_base = OTHER; note = 2'-O-methylcytidine-3'-phosphate
  modified_base 15: mod_base = OTHER; note = 2'-O-methylcytidine-3'-phosphate
  modified_base 16: mod_base = OTHER; note = 2'-O-methylguanosine-3'-phosphate
  modified_base 17: mod_base = OTHER; note = 2'-O-methylguanosine-3'-phosphate
  modified_base 18: mod_base = OTHER; note = 2'-O-methyladenosine-3'-phosphate
  modified_base 19: mod_base = OTHER; note = 2'-O-methyladenosine-3'-phosphate
  modified_base 20: mod_base = OTHER; note = 2'-O-methyluridine-3'-phosphate
  modified_base 21: mod_base = OTHER; note = 2'-O-methylguanosine-3'-phosphate attached to N-[tris(N-acetylgalactosamine-alkyl)-amidodecanoyl)]-4-hydr oxyprolinol Hyp-(N-acetylgalactosamine-alkyl)3
atccaaggatgctccggaatg

SEQ ID NO: 2153 - RNA, 23 nt, synthetic construct
  misc_feature 1..23: note = Description of Artificial Sequence: Synthetic oligonucleotide
  source 1..23: mol_type = other RNA
  modified_base 1: mod_base = OTHER; note = 2'-O-methylcytidine-3'- phosphorothioate
  modified_base 2: mod_base = OTHER; note = 2'-fluoroadenosine-3'-phosphorothioate
  modified_base 3: mod_base = OTHER; note = 2'-O-methyluridine-3'-phosphate
  modified_base 4: mod_base = OTHER; note = 2'-O-methyluridine-3'-phosphate
  modified_base 5: mod_base = OTHER; note = 2'-O-methylcytidine-3'-phosphate
  modified_base 6: mod_base = OTHER; note = 2'-fluorocytidine-3'-phosphate
  modified_base 7: mod_base = OTHER; note = 2'-O-methylguanosine-3'-phosphate
  modified_base 8: mod_base = OTHER; note = 2'-fluoroguanosine-3'-phosphate
  modified_base 9: mod_base = OTHER; note = 2'-fluoroadenosine-3'-phosphate
  modified_base 10: mod_base = OTHER; note = 2'-O-methylguanosine-3'-phosphate
  modified_base 11: mod_base = OTHER; note = 2'-O-methylcytidine-3'-phosphate
  modified_base 12: mod_base = OTHER; note = 2'-O-methyladenosine-3'-phosphate
  modified_base 13: mod_base = OTHER; note = 2'-O-methyluridine-3'-phosphate
  modified_base 14: mod_base = OTHER; note = 2'-fluorocytidine-3'-phosphate
  modified_base 15: mod_base = OTHER; note = 2'-O-methylcytidine-3'-phosphate
  modified_base 16: mod_base = OTHER; note = 2'-fluorouridine-3'-phosphate
  modified_base 17: mod_base = OTHER; note = 2'-O-methyluridine-3'-phosphate
  modified_base 18: mod_base = OTHER; note = 2'-O-methylguanosine-3'-phosphate
  modified_base 19: mod_base = OTHER; note = 2'-O-methylguanosine-3'-phosphate
  modified_base 20: mod_base = OTHER; note = 2'-O-methyladenosine-3'-phosphate
  modified_base 21: mod_base = OTHER; note = 2'-O-methyluridine-3'-phosphorothioate
  modified_base 22: mod_base = OTHER; note = 2'-O-methyladenosine-3'- phosphorothioate
  modified_base 23: mod_base = OTHER; note = 2'-O-methylcytidine-3'-phosphate
cattccggagcatccttggatac

SEQ ID NO: 2154 - RNA, 21 nt, synthetic construct
  misc_feature 1..21: note = Description of Artificial Sequence: Synthetic oligonucleotide
  source 1..21: mol_type = other RNA
  modified_base 1: mod_base = OTHER; note = 2'-O-methyluridine-3'-phosphorothioate
  modified_base 2: mod_base = OTHER; note = 2'-O-methylcytidine-3'- phosphorothioate
  modified_base 3: mod_base = OTHER; note = 2'-O-methyladenosine-3'-phosphate
  modified_base 4: mod_base = OTHER; note = 2'-O-methylcytidine-3'-phosphate
  modified_base 5: mod_base = OTHER; note = 2'-O-methyladenosine-3'-phosphate
  modified_base 6: mod_base = OTHER; note = 2'-O-methyluridine-3'-phosphate
  modified_base 7: mod_base = OTHER; note = 2'-fluorocytidine-3'-phosphate
  modified_base 8: mod_base = OTHER; note = 2'-O-methyluridine-3'-phosphate
  modified_base 9: mod_base = OTHER; note = 2'-fluorouridine-3'-phosphate
  modified_base 10: mod_base = OTHER; note = 2'-fluorouridine-3'-phosphate
  modified_base 11: mod_base = OTHER; note = 2'-fluoroadenosine-3'-phosphate
  modified_base 12: mod_base = OTHER; note = 2'-O-methylguanosine-3'-phosphate
  modified_base 13: mod_base = OTHER; note = 2'-O-methyluridine-3'-phosphate
  modified_base 14: mod_base = OTHER; note = 2'-O-methylguanosine-3'-phosphate
  modified_base 15: mod_base = OTHER; note = 2'-O-methyluridine-3'-phosphate
  modified_base 16: mod_base = OTHER; note = 2'-O-methylcytidine-3'-phosphate
  modified_base 17: mod_base = OTHER; note = 2'-O-methyluridine-3'-phosphate
  modified_base 18: mod_base = OTHER; note = 2'-O-methylguanosine-3'-phosphate
  modified_base 19: mod_base = OTHER; note = 2'-O-methyladenosine-3'-phosphate
  modified_base 20: mod_base = OTHER; note = 2'-O-methyladenosine-3'-phosphate
  modified_base 21: mod_base = OTHER; note = 2'-O-methyluridine-3'-phosphate attached to N-[tris(N-acetylgalactosamine-alkyl)-amidodecanoyl)]-4-hydr oxyprolinol Hyp-(N-acetylgalactosamine-alkyl)3
tcacatctttagtgtctgaat

SEQ ID NO: 2155 - RNA, 23 nt, synthetic construct
  misc_feature 1..23: note = Description of Artificial Sequence: Synthetic oligonucleotide
  source 1..23: mol_type = other RNA
  modified_base 1: mod_base = OTHER; note = 2'-O-methyladenosine-3'- phosphorothioate
  modified_base 2: mod_base = OTHER; note = 2'-fluorouridine -3'-phosphorothioate
  modified_base 3: mod_base = OTHER; note = 2'-O-methyluridine-3'-phosphate
  modified_base 4: mod_base = OTHER; note = 2'-O-methylcytidine-3'-phosphate
  modified_base 5: mod_base = OTHER; note = 2'-O-methyladenosine-3'-phosphate
  modified_base 6: mod_base = OTHER; note = 2'-fluoroguanosine-3'-phosphate
  modified_base 7: mod_base = OTHER; note = 2'-O-methyladenosine-3'-phosphate
  modified_base 8: mod_base = OTHER; note = 2'-fluorocytidine-3'-phosphate
  modified_base 9: mod_base = OTHER; note = 2'-fluoroadenosine-3'-phosphate
  modified_base 10: mod_base = OTHER; note = 2'-O-methylcytidine-3'-phosphate
  modified_base 11: mod_base = OTHER; note = 2'-O-methyluridine-3'-phosphate
  modified_base 12: mod_base = OTHER; note = 2'-O-methyladenosine-3'-phosphate
  modified_base 13: mod_base = OTHER; note = 2'-O-methyladenosine-3'-phosphate
  modified_base 14: mod_base = OTHER; note = 2'-fluoroadenosine-3'-phosphate
  modified_base 15: mod_base = OTHER; note = 2'-O-methylguanosine-3'-phosphate
  modified_base 16: mod_base = OTHER; note = 2'-fluoroadenosine-3'-phosphate
  modified_base 17: mod_base = OTHER; note = 2'-O-methyluridine-3'-phosphate
  modified_base 18: mod_base = OTHER; note = 2'-O-methylguanosine-3'-phosphate
  modified_base 19: mod_base = OTHER; note = 2'-O-methyluridine-3'-phosphate
  modified_base 20: mod_base = OTHER; note = 2'-O-methylguanosine-3'-phosphate
  modified_base 21: mod_base = OTHER; note = 2'-O-methyladenosine-3'- phosphorothioate
  modified_base 22: mod_base = OTHER; note = 2'-O-methyluridine-3'-phosphorothioate
  modified_base 23: mod_base = OTHER; note = 2'-O-methyluridine-3'-phosphate
attcagacactaaagatgtgatt

SEQ ID NO: 2156 - RNA, 21 nt, synthetic construct
  misc_feature 1..21: note = Description of Artificial Sequence: Synthetic oligonucleotide
  source 1..21: mol_type = other RNA
  modified_base 1: mod_base = OTHER; note = 2'-O-methylcytidine-3'- phosphorothioate
  modified_base 2: mod_base = OTHER; note = 2'-O-methyladenosine-3'- phosphorothioate
  modified_base 3: mod_base = OTHER; note = 2'-O-methylcytidine-3'-phosphate
  modified_base 4: mod_base = OTHER; note = 2'-O-methyladenosine-3'-phosphate
  modified_base 5: mod_base = OTHER; note = 2'-O-methyluridine-3'-phosphate
  modified_base 6: mod_base = OTHER; note = 2'-O-methylcytidine-3'-phosphate
  modified_base 7: mod_base = OTHER; note = 2'-fluorouridine-3'-phosphate
  modified_base 8: mod_base = OTHER; note = 2'-O-methyluridine-3'-phosphate
  modified_base 9: mod_base = OTHER; note = 2'-fluorouridine-3'-phosphate
  modified_base 10: mod_base = OTHER; note = 2'-fluoroadenosine-3'-phosphate
  modified_base 11: mod_base = OTHER; note = 2'-fluoroguanosine-3'-phosphate
  modified_base 12: mod_base = OTHER; note = 2'-O-methyluridine-3'-phosphate
  modified_base 13: mod_base = OTHER; note = 2'-O-methylguanosine-3'-phosphate
  modified_base 14: mod_base = OTHER; note = 2'-O-methyluridine-3'-phosphate
  modified_base 15: mod_base = OTHER; note = 2'-O-methylcytidine-3'-phosphate
  modified_base 16: mod_base = OTHER; note = 2'-O-methyluridine-3'-phosphate
  modified_base 17: mod_base = OTHER; note = 2'-O-methylguanosine-3'-phosphate
  modified_base 18: mod_base = OTHER; note = 2'-O-methyladenosine-3'-phosphate
  modified_base 19: mod_base = OTHER; note = 2'-O-methyladenosine-3'-phosphate
  modified_base 20: mod_base = OTHER; note = 2'-O-methyluridine-3'-phosphate
  modified_base 21: mod_base = OTHER; note = 2'-O-methyladenosine-3'-phosphate attached to N-[tris(N-acetylgalactosamine-alkyl)-amidodecanoyl)]-4-hydr oxyprolinol Hyp-(N-acetylgalactosamine-alkyl)3
cacatctttagtgtctgaata

SEQ ID NO: 2157 - RNA, 23 nt, synthetic construct
  misc_feature 1..23: note = Description of Artificial Sequence: Synthetic oligonucleotide
  source 1..23: mol_type = other RNA
  modified_base 1: mod_base = OTHER; note = 2'-O-methyluridine-3'-phosphorothioate
  modified_base 2: mod_base = OTHER; note = 2'-fluoroadenosine-3'-phosphorothioate
  modified_base 3: mod_base = OTHER; note = 2'-O-methyluridine-3'-phosphate
  modified_base 4: mod_base = OTHER; note = 2'-O-methyluridine-3'-phosphate
  modified_base 5: mod_base = OTHER; note = 2'-O-methylcytidine-3'-phosphate
  modified_base 6: mod_base = OTHER; note = 2'-fluoroadenosine-3'-phosphate
  modified_base 7: mod_base = OTHER; note = 2'-O-methylguanosine-3'-phosphate
  modified_base 8: mod_base = OTHER; note = 2'-fluoroadenosine-3'-phosphate
  modified_base 9: mod_base = OTHER; note = 2'-fluorocytidine-3'-phosphate
  modified_base 10: mod_base = OTHER; note = 2'-O-methyladenosine-3'-phosphate
  modified_base 11: mod_base = OTHER; note = 2'-O-methylcytidine-3'-phosphate
  modified_base 12: mod_base = OTHER; note = 2'-O-methyluridine-3'-phosphate
  modified_base 13: mod_base = OTHER; note = 2'-O-methyladenosine-3'-phosphate
  modified_base 14: mod_base = OTHER; note = 2'-fluoroadenosine-3'-phosphate
  modified_base 15: mod_base = OTHER; note = 2'-O-methyladenosine-3'-phosphate
  modified_base 16: mod_base = OTHER; note = 2'-fluoroguanosine-3'-phosphate
  modified_base 17: mod_base = OTHER; note = 2'-O-methyladenosine-3'-phosphate
  modified_base 18: mod_base = OTHER; note = 2'-O-methyluridine-3'-phosphate
  modified_base 19: mod_base = OTHER; note = 2'-O-methylguanosine-3'-phosphate
  modified_base 20: mod_base = OTHER; note = 2'-O-methyluridine-3'-phosphate
  modified_base 21: mod_base = OTHER; note = 2'-O-methylguanosine-3'- phosphorothioate
  modified_base 22: mod_base = OTHER; note = 2'-O-methyladenosine-3'- phosphorothioate
  modified_base 23: mod_base = OTHER; note = 2'-O-methyluridine-3'-phosphate
tattcagacactaaagatgtgat

SEQ ID NO: 2158 - RNA, 21 nt, synthetic construct
  misc_feature 1..21: note = Description of Artificial Sequence: Synthetic oligonucleotide
  source 1..21: mol_type = other RNA
  modified_base 1: mod_base = OTHER; note = 2'-O-methylcytidine-3'- phosphorothioate
  modified_base 2: mod_base = OTHER; note = 2'-O-methylcytidine-3'- phosphorothioate
  modified_base 3: mod_base = OTHER; note = 2'-O-methyladenosine-3'-phosphate
  modified_base 4: mod_base = OTHER; note = 2'-O-methyladenosine-3'-phosphate
  modified_base 5: mod_base = OTHER; note = 2'-O-methyluridine-3'-phosphate
  modified_base 6: mod_base = OTHER; note = 2'-O-methylcytidine-3'-phosphate
  modified_base 7: mod_base = OTHER; note = 2'-fluoroadenosine-3'-phosphate
  modified_base 8: mod_base = OTHER; note = 2'-O-methylcytidine-3'-phosphate
  modified_base 9: mod_base = OTHER; note = 2'-fluoroadenosine-3'-phosphate
  modified_base 10: mod_base = OTHER; note = 2'-fluorouridine-3'-phosphate
  modified_base 11: mod_base = OTHER; note = 2'-fluorocytidine-3'-phosphate
  modified_base 12: mod_base = OTHER; note = 2'-O-methyluridine-3'-phosphate
  modified_base 13: mod_base = OTHER; note = 2'-O-methyluridine-3'-phosphate
  modified_base 14: mod_base = OTHER; note = 2'-O-methyluridine-3'-phosphate
  modified_base 15: mod_base = OTHER; note = 2'-O-methyladenosine-3'-phosphate
  modified_base 16: mod_base = OTHER; note = 2'-O-methylguanosine-3'-phosphate
  modified_base 17: mod_base = OTHER; note = 2'-O-methyluridine-3'-phosphate
  modified_base 18: mod_base = OTHER; note = 2'-O-methylguanosine-3'-phosphate
  modified_base 19: mod_base = OTHER; note = 2'-O-methyluridine-3'-phosphate
  modified_base 20: mod_base = OTHER; note = 2'-O-methylcytidine-3'-phosphate
  modified_base 21: mod_base = OTHER; note = 2'-O-methyluridine-3'-phosphate attached to N-[tris(N-acetylgalactosamine-alkyl)-amidodecanoyl)]-4-hydr oxyprolinol Hyp-(N-acetylgalactosamine-alkyl)3
ccaatcacatctttagtgtct

SEQ ID NO: 2159 - RNA, 23 nt, synthetic construct
  misc_feature 1..23: note = Description of Artificial Sequence: Synthetic oligonucleotide
  source 1..23: mol_type = other RNA
  modified_base 1: mod_base = OTHER; note = 2'-O-methyladenosine-3'- phosphorothioate
  modified_base 2: mod_base = OTHER; note = 2'-fluoroguanosine-3'-phosphorothioate
  modified_base 3: mod_base = OTHER; note = 2'-O-methyladenosine-3'-phosphate
  modified_base 4: mod_base = OTHER; note = 2'-O-methylcytidine-3'-phosphate
  modified_base 5: mod_base = OTHER; note = 2'-O-methyladenosine-3'-phosphate
  modified_base 6: mod_base = OTHER; note = 2'-fluorocytidine-3'-phosphate
  modified_base 7: mod_base = OTHER; note = 2'-O-methyluridine-3'-phosphate
  modified_base 8: mod_base = OTHER; note = 2'-fluoroadenosine-3'-phosphate
  modified_base 9: mod_base = OTHER; note = 2'-fluoroadenosine-3'-phosphate
  modified_base 10: mod_base = OTHER; note = 2'-O-methyladenosine-3'-phosphate
  modified_base 11: mod_base = OTHER; note = 2'-O-methylguanosine-3'-phosphate
  modified_base 12: mod_base = OTHER; note = 2'-O-methyladenosine-3'-phosphate
  modified_base 13: mod_base = OTHER; note = 2'-O-methyluridine-3'-phosphate
  modified_base 14: mod_base = OTHER; note = 2'-fluoroguanosine-3'-phosphate
  modified_base 15: mod_base = OTHER; note = 2'-O-methyluridine-3'-phosphate
  modified_base 16: mod_base = OTHER; note = 2'-fluoroguanosine-3'-phosphate
  modified_base 17: mod_base = OTHER; note = 2'-O-methyladenosine-3'-phosphate
  modified_base 18: mod_base = OTHER; note = 2'-O-methyluridine-3'-phosphate
  modified_base 19: mod_base = OTHER; note = 2'-O-methyluridine-3'-phosphate
  modified_base 20: mod_base = OTHER; note = 2'-O-methylguanosine-3'-phosphate
  modified_base 21: mod_base = OTHER; note = 2'-O-methylguanosine-3'- phosphorothioate
  modified_base 22: mod_base = OTHER; note = 2'-O-methyladenosine-3'- phosphorothioate
  modified_base 23: mod_base = OTHER; note = 2'-O-methyladenosine-3'-phosphate
agacactaaagatgtgattggaa

SEQ ID NO: 2160 - RNA, 21 nt, synthetic construct
  misc_feature 1..21: note = Description of Artificial Sequence: Synthetic oligonucleotide
  source 1..21: mol_type = other RNA
  modified_base 1: mod_base = OTHER; note = 2'-O-methyluridine-3'-phosphorothioate
  modified_base 2: mod_base = OTHER; note = 2'-O-methylcytidine-3'- phosphorothioate
  modified_base 3: mod_base = OTHER; note = 2'-O-methylcytidine-3'-phosphate
  modified_base 4: mod_base = OTHER; note = 2'-O-methyladenosine-3'-phosphate
  modified_base 5: mod_base = OTHER; note = 2'-O-methyladenosine-3'-phosphate
  modified_base 6: mod_base = OTHER; note = 2'-O-methyluridine-3'-phosphate
  modified_base 7: mod_base = OTHER; note = 2'-fluorocytidine-3'-phosphate
  modified_base 8: mod_base = OTHER; note = 2'-O-methyladenosine-3'-phosphate
  modified_base 9: mod_base = OTHER; note = 2'-fluorocytidine-3'-phosphate
  modified_base 10: mod_base = OTHER; note = 2'-fluoroadenosine-3'-phosphate
  modified_base 11: mod_base = OTHER; note = 2'-fluorouridine-3'-phosphate
  modified_base 12: mod_base = OTHER; note = 2'-O-methylcytidine-3'-phosphate
  modified_base 13: mod_base = OTHER; note = 2'-O-methyluridine-3'-phosphate
  modified_base 14: mod_base = OTHER; note = 2'-O-methyluridine-3'-phosphate
  modified_base 15: mod_base = OTHER; note = 2'-O-methyluridine-3'-phosphate
  modified_base 16: mod_base = OTHER; note = 2'-O-methyladenosine-3'-phosphate
  modified_base 17: mod_base = OTHER; note = 2'-O-methylguanosine-3'-phosphate
  modified_base 18: mod_base = OTHER; note = 2'-O-methyluridine-3'-phosphate
  modified_base 19: mod_base = OTHER; note = 2'-O-methylguanosine-3'-phosphate
  modified_base 20: mod_base = OTHER; note = 2'-O-methyluridine-3'-phosphate
  modified_base 21: mod_base = OTHER; note = 2'-O-methylcytidine-3'-phosphate attached to N-[tris(N-acetylgalactosamine-alkyl)-amidodecanoyl)]-4-hydr oxyprolinol Hyp-(N-acetylgalactosamine-alkyl)3
tccaatcacatctttagtgtc

SEQ ID NO: 2161 - RNA, 23 nt, synthetic construct
  misc_feature 1..23: note = Description of Artificial Sequence: Synthetic oligonucleotide
  source 1..23: mol_type = other RNA
  modified_base 1: mod_base = OTHER; note = 2'-O-methylguanosine-3'- phosphorothioate
  modified_base 2: mod_base = OTHER; note = 2'-fluoroadenosine-3'-phosphorothioate
  modified_base 3: mod_base = OTHER; note = 2'-O-methylcytidine-3'-phosphate
  modified_base 4: mod_base = OTHER; note = 2'-O-methyladenosine-3'-phosphate
  modified_base 5: mod_base = OTHER; note = 2'-O-methylcytidine-3'-phosphate
  modified_base 6: mod_base = OTHER; note = 2'-fluorouridine-3'-phosphate
  modified_base 7: mod_base = OTHER; note = 2'-O-methyladenosine-3'-phosphate
  modified_base 8: mod_base = OTHER; note = 2'-fluoroadenosine-3'-phosphate
  modified_base 9: mod_base = OTHER; note = 2'-fluoroadenosine-3'-phosphate
  modified_base 10: mod_base = OTHER; note = 2'-O-methylguanosine-3'-phosphate
  modified_base 11: mod_base = OTHER; note = 2'-O-methyladenosine-3'-phosphate
  modified_base 12: mod_base = OTHER; note = 2'-O-methyluridine-3'-phosphate
  modified_base 13: mod_base = OTHER; note = 2'-O-methylguanosine-3'-phosphate
  modified_base 14: mod_base = OTHER; note = 2'-fluorouridine-3'-phosphate
  modified_base 15: mod_base = OTHER; note = 2'-O-methylguanosine-3'-phosphate
  modified_base 16: mod_base = OTHER; note = 2'-fluoroadenosine-3'-phosphate
  modified_base 17: mod_base = OTHER; note = 2'-O-methyluridine-3'-phosphate
  modified_base 18: mod_base = OTHER; note = 2'-O-methyluridine-3'-phosphate
  modified_base 19: mod_base = OTHER; note = 2'-O-methylguanosine-3'-phosphate
  modified_base 20: mod_base = OTHER; note = 2'-O-methylguanosine-3'-phosphate
  modified_base 21: mod_base = OTHER; note = 2'-O-methyladenosine-3'- phosphorothioate
  modified_base 22: mod_base = OTHER; note = 2'-O-methyladenosine-3'- phosphorothioate
  modified_base 23: mod_base = OTHER; note = 2'-O-methyladenosine-3'-phosphate
gacactaaagatgtgattggaaa

SEQ ID NO: 2162 - RNA, 21 nt, synthetic construct
  misc_feature 1..21: note = Description of Artificial Sequence: Synthetic oligonucleotide
  source 1..21: mol_type = other RNA
  modified_base 1: mod_base = OTHER; note = 2'-O-methyladenosine-3'- phosphorothioate
  modified_base 2: mod_base = OTHER; note = 2'-O-methyladenosine-3'- phosphorothioate
  modified_base 3: mod_base = OTHER; note = 2'-O-methyladenosine-3'-phosphate
  modified_base 4: mod_base = OTHER; note = 2'-O-methyluridine-3'-phosphate
  modified_base 5: mod_base = OTHER; note = 2'-O-methylguanosine-3'-phosphate
  modified_base 6: mod_base = OTHER; note = 2'-O-methyluridine-3'-phosphate
  modified_base 7: mod_base = OTHER; note = 2'-fluoroguanosine-3'-phosphate
  modified_base 8: mod_base = OTHER; note = 2'-O-methyluridine-3'-phosphate
  modified_base 9: mod_base = OTHER; note = 2'-fluorouridine-3'-phosphate
  modified_base 10: mod_base = OTHER; note = 2'-fluorouridine-3'-phosphate
  modified_base 11: mod_base = OTHER; note = 2'-fluoroadenosine-3'-phosphate
  modified_base 12: mod_base = OTHER; note = 2'-O-methylguanosine-3'-phosphate
  modified_base 13: mod_base = OTHER; note = 2'-O-methyladenosine-3'-phosphate
  modified_base 14: mod_base = OTHER; note = 2'-O-methylcytidine-3'-phosphate
  modified_base 15: mod_base = OTHER; note = 2'-O-methyladenosine-3'-phosphate
  modified_base 16: mod_base = OTHER; note = 2'-O-methyladenosine-3'-phosphate
  modified_base 17: mod_base = OTHER; note = 2'-O-methylcytidine-3'-phosphate
  modified_base 18: mod_base = OTHER; note = 2'-O-methylguanosine-3'-phosphate
  modified_base 19: mod_base = OTHER; note = 2'-O-methyluridine-3'-phosphate
  modified_base 20: mod_base = OTHER; note = 2'-O-methylcytidine-3'-phosphate
  modified_base 21: mod_base = OTHER; note = 2'-O-methyladenosine-3'-phosphate attached to N-[tris(N-acetylgalactosamine-alkyl)-amidodecanoyl)]-4-hydr oxyprolinol Hyp-(N-acetylgalactosamine-alkyl)3
aaatgtgtttagacaacgtca

SEQ ID NO: 2163 - RNA, 23 nt, synthetic construct
  misc_feature 1..23: note = Description of Artificial Sequence: Synthetic oligonucleotide
  source 1..23: mol_type = other RNA
  modified_base 1: mod_base = OTHER; note = 2'-O-methyluridine-3'-phosphorothioate
  modified_base 2: mod_base = OTHER; note = 2'-fluoroguanosine-3'-phosphorothioate
  modified_base 3: mod_base = OTHER; note = 2'-O-methyladenosine-3'-phosphate
  modified_base 4: mod_base = OTHER; note = 2'-O-methylcytidine-3'-phosphate
  modified_base 5: mod_base = OTHER; note = 2'-O-methylguanosine-3'-phosphate
  modified_base 6: mod_base = OTHER; note = 2'-fluorouridine-3'-phosphate
  modified_base 7: mod_base = OTHER; note = 2'-O-methyluridine-3'-phosphate
  modified_base 8: mod_base = OTHER; note = 2'-fluoroguanosine-3'-phosphate
  modified_base 9: mod_base = OTHER; note = 2'-fluorouridine-3'-phosphate
  modified_base 10: mod_base = OTHER; note = 2'-O-methylcytidine-3'-phosphate
  modified_base 11: mod_base = OTHER; note = 2'-O-methyluridine-3'-phosphate
  modified_base 12: mod_base = OTHER; note = 2'-O-methyladenosine-3'-phosphate
  modified_base 13: mod_base = OTHER; note = 2'-O-methyladenosine-3'-phosphate
  modified_base 14: mod_base = OTHER; note = 2'-fluoroadenosine-3'-phosphate
  modified_base 15: mod_base = OTHER; note = 2'-O-methylcytidine-3'-phosphate
  modified_base 16: mod_base = OTHER; note = 2'-fluoroadenosine-3'-phosphate
  modified_base 17: mod_base = OTHER; note = 2'-O-methylcytidine-3'-phosphate
  modified_base 18: mod_base = OTHER; note = 2'-O-methyladenosine-3'-phosphate
  modified_base 19: mod_base = OTHER; note = 2'-O-methyluridine-3'-phosphate
  modified_base 20: mod_base = OTHER; note = 2'-O-methyluridine-3'-phosphate
  modified_base 21: mod_base = OTHER; note = 2'-O-methyluridine-3'-phosphorothioate
  modified_base 22: mod_base = OTHER; note = 2'-O-methyluridine-3'-phosphorothioate
  modified_base 23: mod_base = OTHER; note = 2'-O-methylcytidine-3'-phosphate
tgacgttgtctaaacacattttc

SEQ ID NO: 2164 - RNA, 21 nt, synthetic construct
  misc_feature 1..21: note = Description of Artificial Sequence: Synthetic oligonucleotide
  source 1..21: mol_type = other RNA
  modified_base 1: mod_base = OTHER; note = 2'-O-methyladenosine-3'- phosphorothioate
  modified_base 2: mod_base = OTHER; note = 2'-O-methyladenosine-3'- phosphorothioate
  modified_base 3: mod_base = OTHER; note = 2'-O-methyluridine-3'-phosphate
  modified_base 4: mod_base = OTHER; note = 2'-O-methylguanosine-3'-phosphate
  modified_base 5: mod_base = OTHER; note = 2'-O-methyluridine-3'-phosphate
  modified_base 6: mod_base = OTHER; note = 2'-O-methylguanosine-3'-phosphate
  modified_base 7: mod_base = OTHER; note = 2'-fluorouridine-3'-phosphate
  modified_base 8: mod_base = OTHER; note = 2'-O-methyluridine-3'-phosphate
  modified_base 9: mod_base = OTHER; note = 2'-fluorouridine-3'-phosphate
  modified_base 10: mod_base = OTHER; note = 2'-fluoroadenosine-3'-phosphate
  modified_base 11: mod_base = OTHER; note = 2'-fluoroguanosine-3'-phosphate
  modified_base 12: mod_base = OTHER; note = 2'-O-methyladenosine-3'-phosphate
  modified_base 13: mod_base = OTHER; note = 2'-O-methylcytidine-3'-phosphate
  modified_base 14: mod_base = OTHER; note = 2'-O-methyladenosine-3'-phosphate
  modified_base 15: mod_base = OTHER; note = 2'-O-methyladenosine-3'-phosphate
  modified_base 16: mod_base = OTHER; note = 2'-O-methylcytidine-3'-phosphate
  modified_base 17: mod_base = OTHER; note = 2'-O-methylguanosine-3'-phosphate
  modified_base 18: mod_base = OTHER; note = 2'-O-methyluridine-3'-phosphate
  modified_base 19: mod_base = OTHER; note = 2'-O-methylcytidine-3'-phosphate
  modified_base 20: mod_base = OTHER; note = 2'-O-methyladenosine-3'-phosphate
  modified_base 21: mod_base = OTHER; note = 2'-O-methyluridine-3'-phosphate attached to N-[tris(N-acetylgalactosamine-alkyl)-amidodecanoyl)]-4-hydr oxyprolinol Hyp-(N-acetylgalactosamine-alkyl)3
aatgtgtttagacaacgtcat

SEQ ID NO: 2165 - RNA, 23 nt, synthetic construct
  misc_feature 1..23: note = Description of Artificial Sequence: Synthetic oligonucleotide
  source 1..23: mol_type = other RNA
  modified_base 1: mod_base = OTHER; note = 2'-O-methyladenosine-3'- phosphorothioate
  modified_base 2: mod_base = OTHER; note = 2'-fluorouridine -3'-phosphorothioate
  modified_base 3: mod_base = OTHER; note = 2'-O-methylguanosine-3'-phosphate
  modified_base 4: mod_base = OTHER; note = 2'-O-methyladenosine-3'-phosphate
  modified_base 5: mod_base = OTHER; note = 2'-O-methylcytidine-3'-phosphate
  modified_base 6: mod_base = OTHER; note = 2'-fluoroguanosine-3'-phosphate
  modified_base 7: mod_base = OTHER; note = 2'-O-methyluridine-3'-phosphate
  modified_base 8: mod_base = OTHER; note = 2'-fluorouridine-3'-phosphate
  modified_base 9: mod_base = OTHER; note = 2'-fluoroguanosine-3'-phosphate
  modified_base 10: mod_base = OTHER; note = 2'-O-methyluridine-3'-phosphate
  modified_base 11: mod_base = OTHER; note = 2'-O-methylcytidine-3'-phosphate
  modified_base 12: mod_base = OTHER; note = 2'-O-methyluridine-3'-phosphate
  modified_base 13: mod_base = OTHER; note = 2'-O-methyladenosine-3'-phosphate
  modified_base 14: mod_base = OTHER; note = 2'-fluoroadenosine-3'-phosphate
  modified_base 15: mod_base = OTHER; note = 2'-O-methyladenosine-3'-phosphate
  modified_base 16: mod_base = OTHER; note = 2'-fluorocytidine-3'-phosphate
  modified_base 17: mod_base = OTHER; note = 2'-O-methyladenosine-3'-phosphate
  modified_base 18: mod_base = OTHER; note = 2'-O-methylcytidine-3'-phosphate
  modified_base 19: mod_base = OTHER; note = 2'-O-methyladenosine-3'-phosphate
  modified_base 20: mod_base = OTHER; note = 2'-O-methyluridine-3'-phosphate
  modified_base 21: mod_base = OTHER; note = 2'-O-methyluridine-3'-phosphorothioate
  modified_base 22: mod_base = OTHER; note = 2'-O-methyluridine-3'-phosphorothioate
  modified_base 23: mod_base = OTHER; note = 2'-O-methyluridine-3'-phosphate
atgacgttgtctaaacacatttt

SEQ ID NO: 2166 - RNA, 21 nt, synthetic construct
  misc_feature 1..21: note = Description of Artificial Sequence: Synthetic oligonucleotide
  source 1..21: mol_type = other RNA
  modified_base 1: mod_base = OTHER; note = 2'-O-methyluridine-3'-phosphorothioate
  modified_base 2: mod_base = OTHER; note = 2'-O-methyluridine-3'-phosphorothioate
  modified_base 3: mod_base = OTHER; note = 2'-O-methylguanosine-3'-phosphate
  modified_base 4: mod_base = OTHER; note = 2'-O-methyladenosine-3'-phosphate
  modified_base 5: mod_base = OTHER; note = 2'-O-methyladenosine-3'-phosphate
  modified_base 6: mod_base = OTHER; note = 2'-O-methyladenosine-3'-phosphate
  modified_base 7: mod_base = OTHER; note = 2'-fluoroadenosine-3'-phosphate
  modified_base 8: mod_base = OTHER; note = 2'-O-methyluridine-3'-phosphate
  modified_base 9: mod_base = OTHER; note = 2'-fluoroguanosine-3'-phosphate
  modified_base 10: mod_base = OTHER; note = 2'-fluorouridine-3'-phosphate
  modified_base 11: mod_base = OTHER; note = 2'-fluoroguanosine-3'-phosphate
  modified_base 12: mod_base = OTHER; note = 2'-O-methyluridine-3'-phosphate
  modified_base 13: mod_base = OTHER; note = 2'-O-methyluridine-3'-phosphate
  modified_base 14: mod_base = OTHER; note = 2'-O-methyluridine-3'-phosphate
  modified_base 15: mod_base = OTHER; note = 2'-O-methyladenosine-3'-phosphate
  modified_base 16: mod_base = OTHER; note = 2'-O-methylguanosine-3'-phosphate
  modified_base 17: mod_base = OTHER; note = 2'-O-methyladenosine-3'-phosphate
  modified_base 18: mod_base = OTHER; note = 2'-O-methylcytidine-3'-phosphate
  modified_base 19: mod_base = OTHER; note = 2'-O-methyladenosine-3'-phosphate
  modified_base 20: mod_base = OTHER; note = 2'-O-methyladenosine-3'-phosphate
  modified_base 21: mod_base = OTHER; note = 2'-O-methylcytidine-3'-phosphate attached to N-[tris(N-acetylgalactosamine-alkyl)-amidodecanoyl)]-4-hydr oxyprolinol Hyp-(N-acetylgalactosamine-alkyl)3
ttgaaaatgtgtttagacaac

SEQ ID NO: 2167 - RNA, 23 nt, synthetic construct
  misc_feature 1..23: note = Description of Artificial Sequence: Synthetic oligonucleotide
  source 1..23: mol_type = other RNA
  modified_base 1: mod_base = OTHER; note = 2'-O-methylguanosine-3'- phosphorothioate
  modified_base 2: mod_base = OTHER; note = 2'-fluorouridine -3'-phosphorothioate
  modified_base 3: mod_base = OTHER; note = 2'-O-methyluridine-3'-phosphate
  modified_base 4: mod_base = OTHER; note = 2'-O-methylguanosine-3'-phosphate
  modified_base 5: mod_base = OTHER; note = 2'-O-methyluridine-3'-phosphate
  modified_base 6: mod_base = OTHER; note = 2'-fluorocytidine-3'-phosphate
  modified_base 7: mod_base = OTHER; note = 2'-O-methyluridine-3'-phosphate
  modified_base 8: mod_base = OTHER; note = 2'-fluoroadenosine-3'-phosphate
  modified_base 9: mod_base = OTHER; note = 2'-fluoroadenosine-3'-phosphate
  modified_base 10: mod_base = OTHER; note = 2'-O-methyladenosine-3'-phosphate
  modified_base 11: mod_base = OTHER; note = 2'-O-methylcytidine-3'-phosphate
  modified_base 12: mod_base = OTHER; note = 2'-O-methyladenosine-3'-phosphate
  modified_base 13: mod_base = OTHER; note = 2'-O-methylcytidine-3'-phosphate
  modified_base 14: mod_base = OTHER; note = 2'-fluoroadenosine-3'-phosphate
  modified_base 15: mod_base = OTHER; note = 2'-O-methyluridine-3'-phosphate
  modified_base 16: mod_base = OTHER; note = 2'-fluorouridine-3'-phosphate
  modified_base 17: mod_base = OTHER; note = 2'-O-methyluridine-3'-phosphate
  modified_base 18: mod_base = OTHER; note = 2'-O-methyluridine-3'-phosphate
  modified_base 19: mod_base = OTHER; note = 2'-O-methylcytidine-3'-phosphate
  modified_base 20: mod_base = OTHER; note = 2'-O-methyladenosine-3'-phosphate
  modified_base 21: mod_base = OTHER; note = 2'-O-methyladenosine-3'- phosphorothioate
  modified_base 22: mod_base = OTHER; note = 2'-O-methyluridine-3'-phosphorothioate
  modified_base 23: mod_base = OTHER; note = 2'-O-methylguanosine-3'-phosphate
gttgtctaaacacattttcaatg

SEQ ID NO: 2168 - RNA, 21 nt, synthetic construct
  misc_feature 1..21: note = Description of Artificial Sequence: Synthetic oligonucleotide
  source 1..21: mol_type = other RNA
  modified_base 1: mod_base = OTHER; note = 2'-O-methyladenosine-3'- phosphorothioate
  modified_base 2: mod_base = OTHER; note = 2'-O-methyluridine-3'-phosphorothioate
  modified_base 3: mod_base = OTHER; note = 2'-O-methyluridine-3'-phosphate
  modified_base 4: mod_base = OTHER; note = 2'-O-methylguanosine-3'-phosphate
  modified_base 5: mod_base = OTHER; note = 2'-O-methyladenosine-3'-phosphate
  modified_base 6: mod_base = OTHER; note = 2'-O-methyladenosine-3'-phosphate
  modified_base 7: mod_base = OTHER; note = 2'-fluoroadenosine-3'-phosphate
  modified_base 8: mod_base = OTHER; note = 2'-O-methyladenosine-3'-phosphate
  modified_base 9: mod_base = OTHER; note = 2'-fluorouridine-3'-phosphate
  modified_base 10: mod_base = OTHER; note = 2'-fluoroguanosine-3'-phosphate
  modified_base 11: mod_base = OTHER; note = 2'-fluorouridine-3'-phosphate
  modified_base 12: mod_base = OTHER; note = 2'-O-methylguanosine-3'-phosphate
  modified_base 13: mod_base = OTHER; note = 2'-O-methyluridine-3'-phosphate
  modified_base 14: mod_base = OTHER; note = 2'-O-methyluridine-3'-phosphate
  modified_base 15: mod_base = OTHER; note = 2'-O-methyluridine-3'-phosphate
  modified_base 16: mod_base = OTHER; note = 2'-O-methyladenosine-3'-phosphate
  modified_base 17: mod_base = OTHER; note = 2'-O-methylguanosine-3'-phosphate
  modified_base 18: mod_base = OTHER; note = 2'-O-methyladenosine-3'-phosphate
  modified_base 19: mod_base = OTHER; note = 2'-O-methylcytidine-3'-phosphate
  modified_base 20: mod_base = OTHER; note = 2'-O-methyladenosine-3'-phosphate
  modified_base 21: mod_base = OTHER; note = 2'-O-methyladenosine-3'-phosphate attached to N-[tris(N-acetylgalactosamine-alkyl)-amidodecanoyl)]-4-hydr oxyprolinol Hyp-(N-acetylgalactosamine-alkyl)3
attgaaaatgtgtttagacaa

SEQ ID NO: 2169 - RNA, 23 nt, synthetic construct
  misc_feature 1..23: note = Description of Artificial Sequence: Synthetic oligonucleotide
  source 1..23: mol_type = other RNA
  modified_base 1: mod_base = OTHER; note = 2'-O-methyluridine-3'-phosphorothioate
  modified_base 2: mod_base = OTHER; note = 2'-fluorouridine -3'-phosphorothioate
  modified_base 3: mod_base = OTHER; note = 2'-O-methylguanosine-3'-phosphate
  modified_base 4: mod_base = OTHER; note = 2'-O-methyluridine-3'-phosphate
  modified_base 5: mod_base = OTHER; note = 2'-O-methylcytidine-3'-phosphate
  modified_base 6: mod_base = OTHER; note = 2'-fluorouridine-3'-phosphate
  modified_base 7: mod_base = OTHER; note = 2'-O-methyladenosine-3'-phosphate
  modified_base 8: mod_base = OTHER; note = 2'-fluoroadenosine-3'-phosphate
  modified_base 9: mod_base = OTHER; note = 2'-fluoroadenosine-3'-phosphate
  modified_base 10: mod_base = OTHER; note = 2'-O-methylcytidine-3'-phosphate
  modified_base 11: mod_base = OTHER; note = 2'-O-methyladenosine-3'-phosphate
  modified_base 12: mod_base = OTHER; note = 2'-O-methylcytidine-3'-phosphate
  modified_base 13: mod_base = OTHER; note = 2'-O-methyladenosine-3'-phosphate
  modified_base 14: mod_base = OTHER; note = 2'-fluorouridine-3'-phosphate
  modified_base 15: mod_base = OTHER; note = 2'-O-methyluridine-3'-phosphate
  modified_base 16: mod_base = OTHER; note = 2'-fluorouridine-3'-phosphate
  modified_base 17: mod_base = OTHER; note = 2'-O-methyluridine-3'-phosphate
  modified_base 18: mod_base = OTHER; note = 2'-O-methylcytidine-3'-phosphate
  modified_base 19: mod_base = OTHER; note = 2'-O-methyladenosine-3'-phosphate
  modified_base 20: mod_base = OTHER; note = 2'-O-methyladenosine-3'-phosphate
  modified_base 21: mod_base = OTHER; note = 2'-O-methyluridine-3'-phosphorothioate
  modified_base 22: mod_base = OTHER; note = 2'-O-methylguanosine-3'- phosphorothioate
  modified_base 23: mod_base = OTHER; note = 2'-O-methyluridine-3'-phosphate
ttgtctaaacacattttcaatgt

SEQ ID NO: 2170 - RNA, 21 nt, synthetic construct
  misc_feature 1..21: note = Description of Artificial Sequence: Synthetic oligonucleotide
  source 1..21: mol_type = other RNA
  modified_base 1: mod_base = OTHER; note = 2'-O-methyluridine-3'-phosphorothioate
  modified_base 2: mod_base = OTHER; note = 2'-O-methyladenosine-3'- phosphorothioate
  modified_base 3: mod_base = OTHER; note = 2'-O-methylcytidine-3'-phosphate
  modified_base 4: mod_base = OTHER; note = 2'-O-methyluridine-3'-phosphate
  modified_base 5: mod_base = OTHER; note = 2'-O-methyladenosine-3'-phosphate
  modified_base 6: mod_base = OTHER; note = 2'-O-methyladenosine-3'-phosphate
  modified_base 7: mod_base = OTHER; note = 2'-fluoroadenosine-3'-phosphate
  modified_base 8: mod_base = OTHER; note = 2'-O-methylguanosine-3'-phosphate
  modified_base 9: mod_base = OTHER; note = 2'-fluoroguanosine-3'-phosphate
  modified_base 10: mod_base = OTHER; note = 2'-fluoroadenosine-3'-phosphate
  modified_base 11: mod_base = OTHER; note = 2'-fluoroadenosine-3'-phosphate
  modified_base 12: mod_base = OTHER; note = 2'-O-methylguanosine-3'-phosphate
  modified_base 13: mod_base = OTHER; note = 2'-O-methyladenosine-3'-phosphate
  modified_base 14: mod_base = OTHER; note = 2'-O-methyladenosine-3'-phosphate
  modified_base 15: mod_base = OTHER; note = 2'-O-methyluridine-3'-phosphate
  modified_base 16: mod_base = OTHER; note = 2'-O-methyluridine-3'-phosphate
  modified_base 17: mod_base = OTHER; note = 2'-O-methylcytidine-3'-phosphate
  modified_base 18: mod_base = OTHER; note = 2'-O-methylcytidine-3'-phosphate
  modified_base 19: mod_base = OTHER; note = 2'-O-methylguanosine-3'-phosphate
  modified_base 20: mod_base = OTHER; note = 2'-O-methylguanosine-3'-phosphate
  modified_base 21: mod_base = OTHER; note = 2'-O-methyluridine-3'-phosphate attached to N-[tris(N-acetylgalactosamine-alkyl)-amidodecanoyl)]-4-hydr oxyprolinol Hyp-(N-acetylgalactosamine-alkyl)3
tactaaaggaagaattccggt

SEQ ID NO: 2171 - RNA, 23 nt, synthetic construct
  misc_feature 1..23: note = Description of Artificial Sequence: Synthetic oligonucleotide
  source 1..23: mol_type = other RNA
  modified_base 1: mod_base = OTHER; note = 2'-O-methyladenosine-3'- phosphorothioate
  modified_base 2: mod_base = OTHER; note = 2'-fluorocytidine-3'-phosphorothioate
  modified_base 3: mod_base = OTHER; note = 2'-O-methylcytidine-3'-phosphate
  modified_base 4: mod_base = OTHER; note = 2'-O-methylguanosine-3'-phosphate
  modified_base 5: mod_base = OTHER; note = 2'-O-methylguanosine-3'-phosphate
  modified_base 6: mod_base = OTHER; note = 2'-fluoroadenosine-3'-phosphate
  modified_base 7: mod_base = OTHER; note = 2'-O-methyladenosine-3'-phosphate
  modified_base 8: mod_base = OTHER; note = 2'-fluorouridine-3'-phosphate
  modified_base 9: mod_base = OTHER; note = 2'-fluorouridine-3'-phosphate
  modified_base 10: mod_base = OTHER; note = 2'-O-methylcytidine-3'-phosphate
  modified_base 11: mod_base = OTHER; note = 2'-O-methyluridine-3'-phosphate
  modified_base 12: mod_base = OTHER; note = 2'-O-methyluridine-3'-phosphate
  modified_base 13: mod_base = OTHER; note = 2'-O-methylcytidine-3'-phosphate
  modified_base 14: mod_base = OTHER; note = 2'-fluorocytidine-3'-phosphate
  modified_base 15: mod_base = OTHER; note = 2'-O-methyluridine-3'-phosphate
  modified_base 16: mod_base = OTHER; note = 2'-fluorouridine-3'-phosphate
  modified_base 17: mod_base = OTHER; note = 2'-O-methyluridine-3'-phosphate
  modified_base 18: mod_base = OTHER; note = 2'-O-methyladenosine-3'-phosphate
  modified_base 19: mod_base = OTHER; note = 2'-O-methylguanosine-3'-phosphate
  modified_base 20: mod_base = OTHER; note = 2'-O-methyluridine-3'-phosphate
  modified_base 21: mod_base = OTHER; note = 2'-O-methyladenosine-3'- phosphorothioate
  modified_base 22: mod_base = OTHER; note = 2'-O-methyluridine-3'-phosphorothioate
  modified_base 23: mod_base = OTHER; note = 2'-O-methylcytidine-3'-phosphate
accggaattcttcctttagtatc

SEQ ID NO: 2172 - RNA, 21 nt, synthetic construct
  misc_feature 1..21: note = Description of Artificial Sequence: Synthetic oligonucleotide
  source 1..21: mol_type = other RNA
  modified_base 1: mod_base = OTHER; note = 2'-O-methyladenosine-3'- phosphorothioate
  modified_base 2: mod_base = OTHER; note = 2'-O-methylcytidine-3'- phosphorothioate
  modified_base 3: mod_base = OTHER; note = 2'-O-methyluridine-3'-phosphate
  modified_base 4: mod_base = OTHER; note = 2'-O-methyladenosine-3'-phosphate
  modified_base 5: mod_base = OTHER; note = 2'-O-methyladenosine-3'-phosphate
  modified_base 6: mod_base = OTHER; note = 2'-O-methyladenosine-3'-phosphate
  modified_base 7: mod_base = OTHER; note = 2'-fluoroguanosine-3'-phosphate
  modified_base 8: mod_base = OTHER; note = 2'-O-methylguanosine-3'-phosphate
  modified_base 9: mod_base = OTHER; note = 2'-fluoroadenosine-3'-phosphate
  modified_base 10: mod_base = OTHER; note = 2'-fluoroadenosine-3'-phosphate
  modified_base 11: mod_base = OTHER; note = 2'-fluoroguanosine-3'-phosphate
  modified_base 12: mod_base = OTHER; note = 2'-O-methyladenosine-3'-phosphate
  modified_base 13: mod_base = OTHER; note = 2'-O-methyladenosine-3'-phosphate
  modified_base 14: mod_base = OTHER; note = 2'-O-methyluridine-3'-phosphate
  modified_base 15: mod_base = OTHER; note = 2'-O-methyluridine-3'-phosphate
  modified_base 16: mod_base = OTHER; note = 2'-O-methylcytidine-3'-phosphate
  modified_base 17: mod_base = OTHER; note = 2'-O-methylcytidine-3'-phosphate
  modified_base 18: mod_base = OTHER; note = 2'-O-methylguanosine-3'-phosphate
  modified_base 19: mod_base = OTHER; note = 2'-O-methylguanosine-3'-phosphate
  modified_base 20: mod_base = OTHER; note = 2'-O-methyluridine-3'-phosphate
  modified_base 21: mod_base = OTHER; note = 2'-O-methyluridine-3'-phosphate attached to N-[tris(N-acetylgalactosamine-alkyl)-amidodecanoyl)]-4-hydr oxyprolinol Hyp-(N-acetylgalactosamine-alkyl)3
actaaaggaagaattccggtt

SEQ ID NO: 2173 - RNA, 23 nt, synthetic construct
  misc_feature 1..23: note = Description of Artificial Sequence: Synthetic oligonucleotide
  source 1..23: mol_type = other RNA
  modified_base 1: mod_base = OTHER; note = 2'-O-methyladenosine-3'- phosphorothioate
  modified_base 2: mod_base = OTHER; note = 2'-fluoroadenosine-3'-phosphorothioate
  modified_base 3: mod_base = OTHER; note = 2'-O-methylcytidine-3'-phosphate
  modified_base 4: mod_base = OTHER; note = 2'-O-methylcytidine-3'-phosphate
  modified_base 5: mod_base = OTHER; note = 2'-O-methylguanosine-3'-phosphate
  modified_base 6: mod_base = OTHER; note = 2'-fluoroguanosine-3'-phosphate
  modified_base 7: mod_base = OTHER; note = 2'-O-methyladenosine-3'-phosphate
  modified_base 8: mod_base = OTHER; note = 2'-fluoroadenosine-3'-phosphate
  modified_base 9: mod_base = OTHER; note = 2'-fluorouridine-3'-phosphate
  modified_base 10: mod_base = OTHER; note = 2'-O-methyluridine-3'-phosphate
  modified_base 11: mod_base = OTHER; note = 2'-O-methylcytidine-3'-phosphate
  modified_base 12: mod_base = OTHER; note = 2'-O-methyluridine-3'-phosphate
  modified_base 13: mod_base = OTHER; note = 2'-O-methyluridine-3'-phosphate
  modified_base 14: mod_base = OTHER; note = 2'-fluorocytidine-3'-phosphate
  modified_base 15: mod_base = OTHER; note = 2'-O-methylcytidine-3'-phosphate
  modified_base 16: mod_base = OTHER; note = 2'-fluorouridine-3'-phosphate
  modified_base 17: mod_base = OTHER; note = 2'-O-methyluridine-3'-phosphate
  modified_base 18: mod_base = OTHER; note = 2'-O-methyluridine-3'-phosphate
  modified_base 19: mod_base = OTHER; note = 2'-O-methyladenosine-3'-phosphate
  modified_base 20: mod_base = OTHER; note = 2'-O-methylguanosine-3'-phosphate
  modified_base 21: mod_base = OTHER; note = 2'-O-methyluridine-3'-phosphorothioate
  modified_base 22: mod_base = OTHER; note = 2'-O-methyladenosine-3'- phosphorothioate
  modified_base 23: mod_base = OTHER; note = 2'-O-methyluridine-3'-phosphate
aaccggaattcttcctttagtat

SEQ ID NO: 2174 - RNA, 21 nt, synthetic construct
  misc_feature 1..21: note = Description of Artificial Sequence: Synthetic oligonucleotide
  source 1..21: mol_type = other RNA
  modified_base 1: mod_base = OTHER; note = 2'-O-methylguanosine-3'- phosphorothioate
  modified_base 2: mod_base = OTHER; note = 2'-O-methyladenosine-3'- phosphorothioate
  modified_base 3: mod_base = OTHER; note = 2'-O-methylguanosine-3'-phosphate
  modified_base 4: mod_base = OTHER; note = 2'-O-methyladenosine-3'-phosphate
  modified_base 5: mod_base = OTHER; note = 2'-O-methyluridine-3'-phosphate
  modified_base 6: mod_base = OTHER; note = 2'-O-methyladenosine-3'-phosphate
  modified_base 7: mod_base = OTHER; note = 2'-fluorocytidine-3'-phosphate
  modified_base 8: mod_base = OTHER; note = 2'-O-methyluridine-3'-phosphate
  modified_base 9: mod_base = OTHER; note = 2'-fluoroadenosine-3'-phosphate
  modified_base 10: mod_base = OTHER; note = 2'-fluoroadenosine-3'-phosphate
  modified_base 11: mod_base = OTHER; note = 2'-fluoroadenosine-3'-phosphate
  modified_base 12: mod_base = OTHER; note = 2'-O-methylguanosine-3'-phosphate
  modified_base 13: mod_base = OTHER; note = 2'-O-methylguanosine-3'-phosphate
  modified_base 14: mod_base = OTHER; note = 2'-O-methyladenosine-3'-phosphate
  modified_base 15: mod_base = OTHER; note = 2'-O-methyladenosine-3'-phosphate
  modified_base 16: mod_base = OTHER; note = 2'-O-methylguanosine-3'-phosphate
  modified_base 17: mod_base = OTHER; note = 2'-O-methyladenosine-3'-phosphate
  modified_base 18: mod_base = OTHER; note = 2'-O-methyladenosine-3'-phosphate
  modified_base 19: mod_base = OTHER; note = 2'-O-methyluridine-3'-phosphate
  modified_base 20: mod_base = OTHER; note = 2'-O-methyluridine-3'-phosphate
  modified_base 21: mod_base = OTHER; note = 2'-O-methylcytidine-3'-phosphate attached to N-[tris(N-acetylgalactosamine-alkyl)-amidodecanoyl)]-4-hydr oxyprolinol Hyp-(N-acetylgalactosamine-alkyl)3
gagatactaaaggaagaattc

SEQ ID NO: 2175 - RNA, 23 nt, synthetic construct
  misc_feature 1..23: note = Description of Artificial Sequence: Synthetic oligonucleotide
  source 1..23: mol_type = other RNA
  modified_base 1: mod_base = OTHER; note = 2'-O-methylguanosine-3'- phosphorothioate
  modified_base 2: mod_base = OTHER; note = 2'-fluoroadenosine-3'-phosphorothioate
  modified_base 3: mod_base = OTHER; note = 2'-O-methyladenosine-3'-phosphate
  modified_base 4: mod_base = OTHER; note = 2'-O-methyluridine-3'-phosphate
  modified_base 5: mod_base = OTHER; note = 2'-O-methyluridine-3'-phosphate
  modified_base 6: mod_base = OTHER; note = 2'-fluorocytidine-3'-phosphate
  modified_base 7: mod_base = OTHER; note = 2'-O-methyluridine-3'-phosphate
  modified_base 8: mod_base = OTHER; note = 2'-fluorouridine-3'-phosphate
  modified_base 9: mod_base = OTHER; note = 2'-fluorocytidine-3'-phosphate
  modified_base 10: mod_base = OTHER; note = 2'-O-methylcytidine-3'-phosphate
  modified_base 11: mod_base = OTHER; note = 2'-O-methyluridine-3'-phosphate
  modified_base 12: mod_base = OTHER; note = 2'-O-methyluridine-3'-phosphate
  modified_base 13: mod_base = OTHER; note = 2'-O-methyluridine-3'-phosphate
  modified_base 14: mod_base = OTHER; note = 2'-fluoroadenosine-3'-phosphate
  modified_base 15: mod_base = OTHER; note = 2'-O-methylguanosine-3'-phosphate
  modified_base 16: mod_base = OTHER; note = 2'-fluorouridine-3'-phosphate
  modified_base 17: mod_base = OTHER; note = 2'-O-methyladenosine-3'-phosphate
  modified_base 18: mod_base = OTHER; note = 2'-O-methyluridine-3'-phosphate
  modified_base 19: mod_base = OTHER; note = 2'-O-methylcytidine-3'-phosphate
  modified_base 20: mod_base = OTHER; note = 2'-O-methyluridine-3'-phosphate
  modified_base 21: mod_base = OTHER; note = 2'-O-methylcytidine-3'- phosphorothioate
  modified_base 22: mod_base = OTHER; note = 2'-O-methylguanosine-3'- phosphorothioate
  modified_base 23: mod_base = OTHER; note = 2'-O-methyladenosine-3'-phosphate
gaattcttcctttagtatctcga

SEQ ID NO: 2176 - RNA, 21 nt, synthetic construct
  misc_feature 1..21: note = Description of Artificial Sequence: Synthetic oligonucleotide
  source 1..21: mol_type = other RNA
  modified_base 1: mod_base = OTHER; note = 2'-O-methylcytidine-3'- phosphorothioate
  modified_base 2: mod_base = OTHER; note = 2'-O-methylguanosine-3'- phosphorothioate
  modified_base 3: mod_base = OTHER; note = 2'-O-methyladenosine-3'-phosphate
  modified_base 4: mod_base = OTHER; note = 2'-O-methylguanosine-3'-phosphate
  modified_base 5: mod_base = OTHER; note = 2'-O-methyladenosine-3'-phosphate
  modified_base 6: mod_base = OTHER; note = 2'-O-methyluridine-3'-phosphate
  modified_base 7: mod_base = OTHER; note = 2'-fluoroadenosine-3'-phosphate
  modified_base 8: mod_base = OTHER; note = 2'-O-methylcytidine-3'-phosphate
  modified_base 9: mod_base = OTHER; note = 2'-fluorouridine-3'-phosphate
  modified_base 10: mod_base = OTHER; note = 2'-fluoroadenosine-3'-phosphate
  modified_base 11: mod_base = OTHER; note = 2'-fluoroadenosine-3'-phosphate
  modified_base 12: mod_base = OTHER; note = 2'-O-methyladenosine-3'-phosphate
  modified_base 13: mod_base = OTHER; note = 2'-O-methylguanosine-3'-phosphate
  modified_base 14: mod_base = OTHER; note = 2'-O-methylguanosine-3'-phosphate
  modified_base 15: mod_base = OTHER; note = 2'-O-methyladenosine-3'-phosphate
  modified_base 16: mod_base = OTHER; note = 2'-O-methyladenosine-3'-phosphate
  modified_base 17: mod_base = OTHER; note = 2'-O-methylguanosine-3'-phosphate
  modified_base 18: mod_base = OTHER; note = 2'-O-methyladenosine-3'-phosphate
  modified_base 19: mod_base = OTHER; note = 2'-O-methyladenosine-3'-phosphate
  modified_base 20: mod_base = OTHER; note = 2'-O-methyluridine-3'-phosphate
  modified_base 21: mod_base = OTHER; note = 2'-O-methyluridine-3'-phosphate attached to N-[tris(N-acetylgalactosamine-alkyl)-amidodecanoyl)]-4-hydr oxyprolinol Hyp-(N-acetylgalactosamine-alkyl)3
cgagatactaaaggaagaatt

SEQ ID NO: 2177 - RNA, 23 nt, synthetic construct
  misc_feature 1..23: note = Description of Artificial Sequence: Synthetic oligonucleotide
  source 1..23: mol_type = other RNA
  modified_base 1: mod_base = OTHER; note = 2'-O-methyladenosine-3'- phosphorothioate
  modified_base 2: mod_base = OTHER; note = 2'-fluoroadenosine-3'-phosphorothioate
  modified_base 3: mod_base = OTHER; note = 2'-O-methyluridine-3'-phosphate
  modified_base 4: mod_base = OTHER; note = 2'-O-methyluridine-3'-phosphate
  modified_base 5: mod_base = OTHER; note = 2'-O-methylcytidine-3'-phosphate
  modified_base 6: mod_base = OTHER; note = 2'-fluorouridine-3'-phosphate
  modified_base 7: mod_base = OTHER; note = 2'-O-methyluridine-3'-phosphate
  modified_base 8: mod_base = OTHER; note = 2'-fluorocytidine-3'-phosphate
  modified_base 9: mod_base = OTHER; note = 2'-fluorocytidine-3'-phosphate
  modified_base 10: mod_base = OTHER; note = 2'-O-methyluridine-3'-phosphate
  modified_base 11: mod_base = OTHER; note = 2'-O-methyluridine-3'-phosphate
  modified_base 12: mod_base = OTHER; note = 2'-O-methyluridine-3'-phosphate
  modified_base 13: mod_base = OTHER; note = 2'-O-methyladenosine-3'-phosphate
  modified_base 14: mod_base = OTHER; note = 2'-fluoroguanosine-3'-phosphate
  modified_base 15: mod_base = OTHER; note = 2'-O-methyluridine-3'-phosphate
  modified_base 16: mod_base = OTHER; note = 2'-fluoroadenosine-3'-phosphate
  modified_base 17: mod_base = OTHER; note = 2'-O-methyluridine-3'-phosphate
  modified_base 18: mod_base = OTHER; note = 2'-O-methylcytidine-3'-phosphate
  modified_base 19: mod_base = OTHER; note = 2'-O-methyluridine-3'-phosphate
  modified_base 20: mod_base = OTHER; note = 2'-O-methylcytidine-3'-phosphate
  modified_base 21: mod_base = OTHER; note = 2'-O-methylguanosine-3'- phosphorothioate
  modified_base 22: mod_base = OTHER; note = 2'-O-methyladenosine-3'- phosphorothioate
  modified_base 23: mod_base = OTHER; note = 2'-O-methylguanosine-3'-phosphate
aattcttcctttagtatctcgag

SEQ ID NO: 2178 - RNA, 21 nt, synthetic construct
  misc_feature 1..21: note = Description of Artificial Sequence: Synthetic oligonucleotide
  source 1..21: mol_type = other RNA
  modified_base 1: mod_base = OTHER; note = 2'-O-methyladenosine-3'- phosphorothioate
  modified_base 2: mod_base = OTHER; note = 2'-O-methyladenosine-3'- phosphorothioate
  modified_base 3: mod_base = OTHER; note = 2'-O-methylcytidine-3'-phosphate
  modified_base 4: mod_base = OTHER; note = 2'-O-methyluridine-3'-phosphate
  modified_base 5: mod_base = OTHER; note = 2'-O-methyluridine-3'-phosphate
  modified_base 6: mod_base = OTHER; note = 2'-O-methyluridine-3'-phosphate
  modified_base 7: mod_base = OTHER; note = 2'-fluoroguanosine-3'-phosphate
  modified_base 8: mod_base = OTHER; note = 2'-O-methylguanosine-3'-phosphate
  modified_base 9: mod_base = OTHER; note = 2'-fluorocytidine-3'-phosphate
  modified_base 10: mod_base = OTHER; note = 2'-fluorouridine-3'-phosphate
  modified_base 11: mod_base = OTHER; note = 2'-fluoroguanosine-3'-phosphate
  modified_base 12: mod_base = OTHER; note = 2'-O-methyladenosine-3'-phosphate
  modified_base 13: mod_base = OTHER; note = 2'-O-methyluridine-3'-phosphate
  modified_base 14: mod_base = OTHER; note = 2'-O-methyladenosine-3'-phosphate
  modified_base 15: mod_base = OTHER; note = 2'-O-methyladenosine-3'-phosphate
  modified_base 16: mod_base = OTHER; note = 2'-O-methyluridine-3'-phosphate
  modified_base 17: mod_base = OTHER; note = 2'-O-methyladenosine-3'-phosphate
  modified_base 18: mod_base = OTHER; note = 2'-O-methyluridine-3'-phosphate
  modified_base 19: mod_base = OTHER; note = 2'-O-methyluridine-3'-phosphate
  modified_base 20: mod_base = OTHER; note = 2'-O-methylguanosine-3'-phosphate
  modified_base 21: mod_base = OTHER; note = 2'-O-methylcytidine-3'-phosphate attached to N-[tris(N-acetylgalactosamine-alkyl)-amidodecanoyl)]-4-hydr oxyprolinol Hyp-(N-acetylgalactosamine-alkyl)3
aactttggctgataatattgc

SEQ ID NO: 2179 - RNA, 23 nt, synthetic construct
  misc_feature 1..23: note = Description of Artificial Sequence: Synthetic oligonucleotide
  source 1..23: mol_type = other RNA
  modified_base 1: mod_base = OTHER; note = 2'-O-methylguanosine-3'- phosphorothioate
  modified_base 2: mod_base = OTHER; note = 2'-fluorocytidine-3'-phosphorothioate
  modified_base 3: mod_base = OTHER; note = 2'-O-methyladenosine-3'-phosphate
  modified_base 4: mod_base = OTHER; note = 2'-O-methyladenosine-3'-phosphate
  modified_base 5: mod_base = OTHER; note = 2'-O-methyluridine-3'-phosphate
  modified_base 6: mod_base = OTHER; note = 2'-fluoroadenosine-3'-phosphate
  modified_base 7: mod_base = OTHER; note = 2'-O-methyluridine-3'-phosphate
  modified_base 8: mod_base = OTHER; note = 2'-fluorouridine-3'-phosphate
  modified_base 9: mod_base = OTHER; note = 2'-fluoroadenosine-3'-phosphate
  modified_base 10: mod_base = OTHER; note = 2'-O-methyluridine-3'-phosphate
  modified_base 11: mod_base = OTHER; note = 2'-O-methylcytidine-3'-phosphate
  modified_base 12: mod_base = OTHER; note = 2'-O-methyladenosine-3'-phosphate
  modified_base 13: mod_base = OTHER; note = 2'-O-methylguanosine-3'-phosphate
  modified_base 14: mod_base = OTHER; note = 2'-fluorocytidine-3'-phosphate
  modified_base 15: mod_base = OTHER; note = 2'-O-methylcytidine-3'-phosphate
  modified_base 16: mod_base = OTHER; note = 2'-fluoroadenosine-3'-phosphate
  modified_base 17: mod_base = OTHER; note = 2'-O-methyladenosine-3'-phosphate
  modified_base 18: mod_base = OTHER; note = 2'-O-methyladenosine-3'-phosphate
  modified_base 19: mod_base = OTHER; note = 2'-O-methylguanosine-3'-phosphate
  modified_base 20: mod_base = OTHER; note = 2'-O-methyluridine-3'-phosphate
  modified_base 21: mod_base = OTHER; note = 2'-O-methyluridine-3'-phosphorothioate
  modified_base 22: mod_base = OTHER; note = 2'-O-methyluridine-3'-phosphorothioate
  modified_base 23: mod_base = OTHER; note = 2'-O-methylcytidine-3'-phosphate
gcaatattatcagccaaagtttc

SEQ ID NO: 2180 - RNA, 21 nt, synthetic construct
  misc_feature 1..21: note = Description of Artificial Sequence: Synthetic oligonucleotide
  source 1..21: mol_type = other RNA
  modified_base 1: mod_base = OTHER; note = 2'-O-methyladenosine-3'- phosphorothioate
  modified_base 2: mod_base = OTHER; note = 2'-O-methylcytidine-3'- phosphorothioate
  modified_base 3: mod_base = OTHER; note = 2'-O-methyluridine-3'-phosphate
  modified_base 4: mod_base = OTHER; note = 2'-O-methyluridine-3'-phosphate
  modified_base 5: mod_base = OTHER; note = 2'-O-methyluridine-3'-phosphate
  modified_base 6: mod_base = OTHER; note = 2'-O-methylguanosine-3'-phosphate
  modified_base 7: mod_base = OTHER; note = 2'-fluoroguanosine-3'-phosphate
  modified_base 8: mod_base = OTHER; note = 2'-O-methylcytidine-3'-phosphate
  modified_base 9: mod_base = OTHER; note = 2'-fluorouridine-3'-phosphate
  modified_base 10: mod_base = OTHER; note = 2'-fluoroguanosine-3'-phosphate
  modified_base 11: mod_base = OTHER; note = 2'-fluoroadenosine-3'-phosphate
  modified_base 12: mod_base = OTHER; note = 2'-O-methyluridine-3'-phosphate
  modified_base 13: mod_base = OTHER; note = 2'-O-methyladenosine-3'-phosphate
  modified_base 14: mod_base = OTHER; note = 2'-O-methyladenosine-3'-phosphate
  modified_base 15: mod_base = OTHER; note = 2'-O-methyluridine-3'-phosphate
  modified_base 16: mod_base = OTHER; note = 2'-O-methyladenosine-3'-phosphate
  modified_base 17: mod_base = OTHER; note = 2'-O-methyluridine-3'-phosphate
  modified_base 18: mod_base = OTHER; note = 2'-O-methyluridine-3'-phosphate
  modified_base 19: mod_base = OTHER; note = 2'-O-methylguanosine-3'-phosphate
  modified_base 20: mod_base = OTHER; note = 2'-O-methylcytidine-3'-phosphate
  modified_base 21: mod_base = OTHER; note = 2'-O-methyladenosine-3'-phosphate attached to N-[tris(N-acetylgalactosamine-alkyl)-amidodecanoyl)]-4-hydr oxyprolinol Hyp-(N-acetylgalactosamine-alkyl)3
actttggctgataatattgca

SEQ ID NO: 2181 - RNA, 23 nt, synthetic construct
  misc_feature 1..23: note = Description of Artificial Sequence: Synthetic oligonucleotide
  source 1..23: mol_type = other RNA
  modified_base 1: mod_base = OTHER; note = 2'-O-methyluridine-3'-phosphorothioate
  modified_base 2: mod_base = OTHER; note = 2'-fluoroguanosine-3'-phosphorothioate
  modified_base 3: mod_base = OTHER; note = 2'-O-methylcytidine-3'-phosphate
  modified_base 4: mod_base = OTHER; note = 2'-O-methyladenosine-3'-phosphate
  modified_base 5: mod_base = OTHER; note = 2'-O-methyladenosine-3'-phosphate
  modified_base 6: mod_base = OTHER; note = 2'-fluorouridine-3'-phosphate
  modified_base 7: mod_base = OTHER; note = 2'-O-methyladenosine-3'-phosphate
  modified_base 8: mod_base = OTHER; note = 2'-fluorouridine-3'-phosphate
  modified_base 9: mod_base = OTHER; note = 2'-fluorouridine-3'-phosphate
  modified_base 10: mod_base = OTHER; note = 2'-O-methyladenosine-3'-phosphate
  modified_base 11: mod_base = OTHER; note = 2'-O-methyluridine-3'-phosphate
  modified_base 12: mod_base = OTHER; note = 2'-O-methylcytidine-3'-phosphate
  modified_base 13: mod_base = OTHER; note = 2'-O-methyladenosine-3'-phosphate
  modified_base 14: mod_base = OTHER; note = 2'-fluoroguanosine-3'-phosphate
  modified_base 15: mod_base = OTHER; note = 2'-O-methylcytidine-3'-phosphate
  modified_base 16: mod_base = OTHER; note = 2'-fluorocytidine-3'-phosphate
  modified_base 17: mod_base = OTHER; note = 2'-O-methyladenosine-3'-phosphate
  modified_base 18: mod_base = OTHER; note = 2'-O-methyladenosine-3'-phosphate
  modified_base 19: mod_base = OTHER; note = 2'-O-methyladenosine-3'-phosphate
  modified_base 20: mod_base = OTHER; note = 2'-O-methylguanosine-3'-phosphate
  modified_base 21: mod_base = OTHER; note = 2'-O-methyluridine-3'-phosphorothioate
  modified_base 22: mod_base = OTHER; note = 2'-O-methyluridine-3'-phosphorothioate
  modified_base 23: mod_base = OTHER; note = 2'-O-methyluridine-3'-phosphate
tgcaatattatcagccaaagttt

SEQ ID NO: 2182 - RNA, 21 nt, synthetic construct
  misc_feature 1..21: note = Description of Artificial Sequence: Synthetic oligonucleotide
  source 1..21: mol_type = other RNA
  modified_base 1: mod_base = OTHER; note = 2'-O-methyladenosine-3'- phosphorothioate
  modified_base 2: mod_base = OTHER; note = 2'-O-methyladenosine-3'- phosphorothioate
  modified_base 3: mod_base = OTHER; note = 2'-O-methylguanosine-3'-phosphate
  modified_base 4: mod_base = OTHER; note = 2'-O-methyladenosine-3'-phosphate
  modified_base 5: mod_base = OTHER; note = 2'-O-methyladenosine-3'-phosphate
  modified_base 6: mod_base = OTHER; note = 2'-O-methyladenosine-3'-phosphate
  modified_base 7: mod_base = OTHER; note = 2'-fluorocytidine-3'-phosphate
  modified_base 8: mod_base = OTHER; note = 2'-O-methyluridine-3'-phosphate
  modified_base 9: mod_base = OTHER; note = 2'-fluorouridine-3'-phosphate
  modified_base 10: mod_base = OTHER; note = 2'-fluorouridine-3'-phosphate
  modified_base 11: mod_base = OTHER; note = 2'-fluoroguanosine-3'-phosphate
  modified_base 12: mod_base = OTHER; note = 2'-O-methylguanosine-3'-phosphate
  modified_base 13: mod_base = OTHER; note = 2'-O-methylcytidine-3'-phosphate
  modified_base 14: mod_base = OTHER; note = 2'-O-methyluridine-3'-phosphate
  modified_base 15: mod_base = OTHER; note = 2'-O-methylguanosine-3'-phosphate
  modified_base 16: mod_base = OTHER; note = 2'-O-methyladenosine-3'-phosphate
  modified_base 17: mod_base = OTHER; note = 2'-O-methyluridine-3'-phosphate
  modified_base 18: mod_base = OTHER; note = 2'-O-methyladenosine-3'-phosphate
  modified_base 19: mod_base = OTHER; note = 2'-O-methyladenosine-3'-phosphate
  modified_base 20: mod_base = OTHER; note = 2'-O-methyluridine-3'-phosphate
  modified_base 21: mod_base = OTHER; note = 2'-O-methyladenosine-3'-phosphate attached to N-[tris(N-acetylgalactosamine-alkyl)-amidodecanoyl)]-4-hydr oxyprolinol Hyp-(N-acetylgalactosamine-alkyl)3
aagaaactttggctgataata

SEQ ID NO: 2183 - RNA, 23 nt, synthetic construct
  misc_feature 1..23: note = Description of Artificial Sequence: Synthetic oligonucleotide
  source 1..23: mol_type = other RNA
  modified_base 1: mod_base = OTHER; note = 2'-O-methyluridine-3'-phosphorothioate
  modified_base 2: mod_base = OTHER; note = 2'-fluoroadenosine-3'-phosphorothioate
  modified_base 3: mod_base = OTHER; note = 2'-O-methyluridine-3'-phosphate
  modified_base 4: mod_base = OTHER; note = 2'-O-methyluridine-3'-phosphate
  modified_base 5: mod_base = OTHER; note = 2'-O-methyladenosine-3'-phosphate
  modified_base 6: mod_base = OTHER; note = 2'-fluorouridine-3'-phosphate
  modified_base 7: mod_base = OTHER; note = 2'-O-methylcytidine-3'-phosphate
  modified_base 8: mod_base = OTHER; note = 2'-fluoroadenosine-3'-phosphate
  modified_base 9: mod_base = OTHER; note = 2'-fluoroguanosine-3'-phosphate
  modified_base 10: mod_base = OTHER; note = 2'-O-methylcytidine-3'-phosphate
  modified_base 11: mod_base = OTHER; note = 2'-O-methylcytidine-3'-phosphate
  modified_base 12: mod_base = OTHER; note = 2'-O-methyladenosine-3'-phosphate
  modified_base 13: mod_base = OTHER; note = 2'-O-methyladenosine-3'-phosphate
  modified_base 14: mod_base = OTHER; note = 2'-fluoroadenosine-3'-phosphate
  modified_base 15: mod_base = OTHER; note = 2'-O-methylguanosine-3'-phosphate
  modified_base 16: mod_base = OTHER; note = 2'-fluorouridine-3'-phosphate
  modified_base 17: mod_base = OTHER; note = 2'-O-methyluridine-3'-phosphate
  modified_base 18: mod_base = OTHER; note = 2'-O-methyluridine-3'-phosphate
  modified_base 19: mod_base = OTHER; note = 2'-O-methylcytidine-3'-phosphate
  modified_base 20: mod_base = OTHER; note = 2'-O-methyluridine-3'-phosphate
  modified_base 21: mod_base = OTHER; note = 2'-O-methyluridine-3'-phosphorothioate
  modified_base 22: mod_base = OTHER; note = 2'-O-methylcytidine-3'- phosphorothioate
  modified_base 23: mod_base = OTHER; note = 2'-O-methyladenosine-3'-phosphate
tattatcagccaaagtttcttca

SEQ ID NO: 2184 - RNA, 21 nt, synthetic construct
  misc_feature 1..21: note = Description of Artificial Sequence: Synthetic oligonucleotide
  source 1..21: mol_type = other RNA
  modified_base 1: mod_base = OTHER; note = 2'-O-methylguanosine-3'- phosphorothioate
  modified_base 2: mod_base = OTHER; note = 2'-O-methyladenosine-3'- phosphorothioate
  modified_base 3: mod_base = OTHER; note = 2'-O-methyladenosine-3'-phosphate
  modified_base 4: mod_base = OTHER; note = 2'-O-methylguanosine-3'-phosphate
  modified_base 5: mod_base = OTHER; note = 2'-O-methyladenosine-3'-phosphate
  modified_base 6: mod_base = OTHER; note = 2'-O-methyladenosine-3'-phosphate
  modified_base 7: mod_base = OTHER; note = 2'-fluoroadenosine-3'-phosphate
  modified_base 8: mod_base = OTHER; note = 2'-O-methylcytidine-3'-phosphate
  modified_base 9: mod_base = OTHER; note = 2'-fluorouridine-3'-phosphate
  modified_base 10: mod_base = OTHER; note = 2'-fluorouridine-3'-phosphate
  modified_base 11: mod_base = OTHER; note = 2'-fluorouridine-3'-phosphate
  modified_base 12: mod_base = OTHER; note = 2'-O-methylguanosine-3'-phosphate
  modified_base 13: mod_base = OTHER; note = 2'-O-methylguanosine-3'-phosphate
  modified_base 14: mod_base = OTHER; note = 2'-O-methylcytidine-3'-phosphate
  modified_base 15: mod_base = OTHER; note = 2'-O-methyluridine-3'-phosphate
  modified_base 16: mod_base = OTHER; note = 2'-O-methylguanosine-3'-phosphate
  modified_base 17: mod_base = OTHER; note = 2'-O-methyladenosine-3'-phosphate
  modified_base 18: mod_base = OTHER; note = 2'-O-methyluridine-3'-phosphate
  modified_base 19: mod_base = OTHER; note = 2'-O-methyladenosine-3'-phosphate
  modified_base 20: mod_base = OTHER; note = 2'-O-methyladenosine-3'-phosphate
  modified_base 21: mod_base = OTHER; note = 2'-O-methyluridine-3'-phosphate attached to N-[tris(N-acetylgalactosamine-alkyl)-amidodecanoyl)]-4-hydr oxyprolinol Hyp-(N-acetylgalactosamine-alkyl)3
gaagaaactttggctgataat

SEQ ID NO: 2185 - RNA, 23 nt, synthetic construct
  misc_feature 1..23: note = Description of Artificial Sequence: Synthetic oligonucleotide
  source 1..23: mol_type = other RNA
  modified_base 1: mod_base = OTHER; note = 2'-O-methyladenosine-3'- phosphorothioate
  modified_base 2: mod_base = OTHER; note = 2'-fluorouridine -3'-phosphorothioate
  modified_base 3: mod_base = OTHER; note = 2'-O-methyluridine-3'-phosphate
  modified_base 4: mod_base = OTHER; note = 2'-O-methyladenosine-3'-phosphate
  modified_base 5: mod_base = OTHER; note = 2'-O-methyluridine-3'-phosphate
  modified_base 6: mod_base = OTHER; note = 2'-fluorocytidine-3'-phosphate
  modified_base 7: mod_base = OTHER; note = 2'-O-methyladenosine-3'-phosphate
  modified_base 8: mod_base = OTHER; note = 2'-fluoroguanosine-3'-phosphate
  modified_base 9: mod_base = OTHER; note = 2'-fluorocytidine-3'-phosphate
  modified_base 10: mod_base = OTHER; note = 2'-O-methylcytidine-3'-phosphate
  modified_base 11: mod_base = OTHER; note = 2'-O-methyladenosine-3'-phosphate
  modified_base 12: mod_base = OTHER; note = 2'-O-methyladenosine-3'-phosphate
  modified_base 13: mod_base = OTHER; note = 2'-O-methyladenosine-3'-phosphate
  modified_base 14: mod_base = OTHER; note = 2'-fluoroguanosine-3'-phosphate
  modified_base 15: mod_base = OTHER; note = 2'-O-methyluridine-3'-phosphate
  modified_base 16: mod_base = OTHER; note = 2'-fluorouridine-3'-phosphate
  modified_base 17: mod_base = OTHER; note = 2'-O-methyluridine-3'-phosphate
  modified_base 18: mod_base = OTHER; note = 2'-O-methylcytidine-3'-phosphate
  modified_base 19: mod_base = OTHER; note = 2'-O-methyluridine-3'-phosphate
  modified_base 20: mod_base = OTHER; note = 2'-O-methyluridine-3'-phosphate
  modified_base 21: mod_base = OTHER; note = 2'-O-methylcytidine-3'- phosphorothioate
  modified_base 22: mod_base = OTHER; note = 2'-O-methyladenosine-3'- phosphorothioate
  modified_base 23: mod_base = OTHER; note = 2'-O-methyluridine-3'-phosphate
attatcagccaaagtttcttcat

SEQ ID NO: 2186 - RNA, 21 nt, synthetic construct
  misc_feature 1..21: note = Description of Artificial Sequence: Synthetic oligonucleotide
  source 1..21: mol_type = other RNA
  modified_base 1: mod_base = OTHER; note = 2'-O-methyladenosine-3'- phosphorothioate
  modified_base 2: mod_base = OTHER; note = 2'-O-methyladenosine-3'- phosphorothioate
  modified_base 3: mod_base = OTHER; note = 2'-O-methyladenosine-3'-phosphate
  modified_base 4: mod_base = OTHER; note = 2'-O-methyluridine-3'-phosphate
  modified_base 5: mod_base = OTHER; note = 2'-O-methylguanosine-3'-phosphate
  modified_base 6: mod_base = OTHER; note = 2'-O-methylguanosine-3'-phosphate
  modified_base 7: mod_base = OTHER; note = 2'-fluorocytidine-3'-phosphate
  modified_base 8: mod_base = OTHER; note = 2'-O-methyluridine-3'-phosphate
  modified_base 9: mod_base = OTHER; note = 2'-fluoroguanosine-3'-phosphate
  modified_base 10: mod_base = OTHER; note = 2'-fluoroadenosine-3'-phosphate
  modified_base 11: mod_base = OTHER; note = 2'-fluoroguanosine-3'-phosphate
  modified_base 12: mod_base = OTHER; note = 2'-O-methyladenosine-3'-phosphate
  modified_base 13: mod_base = OTHER; note = 2'-O-methyladenosine-3'-phosphate
  modified_base 14: mod_base = OTHER; note = 2'-O-methylguanosine-3'-phosphate
  modified_base 15: mod_base = OTHER; note = 2'-O-methyladenosine-3'-phosphate
  modified_base 16: mod_base = OTHER; note = 2'-O-methylcytidine-3'-phosphate
  modified_base 17: mod_base = OTHER; note = 2'-O-methyluridine-3'-phosphate
  modified_base 18: mod_base = OTHER; note = 2'-O-methylguanosine-3'-phosphate
  modified_base 19: mod_base = OTHER; note = 2'-O-methyladenosine-3'-phosphate
  modified_base 20: mod_base = OTHER; note = 2'-O-methylcytidine-3'-phosphate
  modified_base 21: mod_base = OTHER; note = 2'-O-methyladenosine-3'-phosphate attached to N-[tris(N-acetylgalactosamine-alkyl)-amidodecanoyl)]-4-hydr oxyprolinol Hyp-(N-acetylgalactosamine-alkyl)3
aaatggctgagaagactgaca

SEQ ID NO: 2187 - RNA, 23 nt, synthetic construct
  misc_feature 1..23: note = Description of Artificial Sequence: Synthetic oligonucleotide
  source 1..23: mol_type = other RNA
  modified_base 1: mod_base = OTHER; note = 2'-O-methyluridine-3'-phosphorothioate
  modified_base 2: mod_base = OTHER; note = 2'-fluoroguanosine-3'-phosphorothioate
  modified_base 3: mod_base = OTHER; note = 2'-O-methyluridine-3'-phosphate
  modified_base 4: mod_base = OTHER; note = 2'-O-methylcytidine-3'-phosphate
  modified_base 5: mod_base = OTHER; note = 2'-O-methyladenosine-3'-phosphate
  modified_base 6: mod_base = OTHER; note = 2'-fluoroguanosine-3'-phosphate
  modified_base 7: mod_base = OTHER; note = 2'-O-methyluridine-3'-phosphate
  modified_base 8: mod_base = OTHER; note = 2'-fluorocytidine-3'-phosphate
  modified_base 9: mod_base = OTHER; note = 2'-fluorouridine-3'-phosphate
  modified_base 10: mod_base = OTHER; note = 2'-O-methyluridine-3'-phosphate
  modified_base 11: mod_base = OTHER; note = 2'-O-methylcytidine-3'-phosphate
  modified_base 12: mod_base = OTHER; note = 2'-O-methyluridine-3'-phosphate
  modified_base 13: mod_base = OTHER; note = 2'-O-methylcytidine-3'-phosphate
  modified_base 14: mod_base = OTHER; note = 2'-fluoroadenosine-3'-phosphate
  modified_base 15: mod_base = OTHER; note = 2'-O-methylguanosine-3'-phosphate
  modified_base 16: mod_base = OTHER; note = 2'-fluorocytidine-3'-phosphate
  modified_base 17: mod_base = OTHER; note = 2'-O-methylcytidine-3'-phosphate
  modified_base 18: mod_base = OTHER; note = 2'-O-methyladenosine-3'-phosphate
  modified_base 19: mod_base = OTHER; note = 2'-O-methyluridine-3'-phosphate
  modified_base 20: mod_base = OTHER; note = 2'-O-methyluridine-3'-phosphate
  modified_base 21: mod_base = OTHER; note = 2'-O-methyluridine-3'-phosphorothioate
  modified_base 22: mod_base = OTHER; note = 2'-O-methylguanosine-3'- phosphorothioate
  modified_base 23: mod_base = OTHER; note = 2'-O-methyladenosine-3'-phosphate
tgtcagtcttctcagccatttga

SEQ ID NO: 2188 - RNA, 21 nt, synthetic construct
  misc_feature 1..21: note = Description of Artificial Sequence: Synthetic oligonucleotide
  source 1..21: mol_type = other RNA
  modified_base 1: mod_base = OTHER; note = 2'-O-methyladenosine-3'- phosphorothioate
  modified_base 2: mod_base = OTHER; note = 2'-O-methyladenosine-3'- phosphorothioate
  modified_base 3: mod_base = OTHER; note = 2'-O-methyluridine-3'-phosphate
  modified_base 4: mod_base = OTHER; note = 2'-O-methylguanosine-3'-phosphate
  modified_base 5: mod_base = OTHER; note = 2'-O-methylguanosine-3'-phosphate
  modified_base 6: mod_base = OTHER; note = 2'-O-methylcytidine-3'-phosphate
  modified_base 7: mod_base = OTHER; note = 2'-fluorouridine-3'-phosphate
  modified_base 8: mod_base = OTHER; note = 2'-O-methylguanosine-3'-phosphate
  modified_base 9: mod_base = OTHER; note = 2'-fluoroadenosine-3'-phosphate
  modified_base 10: mod_base = OTHER; note = 2'-fluoroguanosine-3'-phosphate
  modified_base 11: mod_base = OTHER; note = 2'-fluoroadenosine-3'-phosphate
  modified_base 12: mod_base = OTHER; note = 2'-O-methyladenosine-3'-phosphate
  modified_base 13: mod_base = OTHER; note = 2'-O-methylguanosine-3'-phosphate
  modified_base 14: mod_base = OTHER; note = 2'-O-methyladenosine-3'-phosphate
  modified_base 15: mod_base = OTHER; note = 2'-O-methylcytidine-3'-phosphate
  modified_base 16: mod_base = OTHER; note = 2'-O-methyluridine-3'-phosphate
  modified_base 17: mod_base = OTHER; note = 2'-O-methylguanosine-3'-phosphate
  modified_base 18: mod_base = OTHER; note = 2'-O-methyladenosine-3'-phosphate
  modified_base 19: mod_base = OTHER; note = 2'-O-methylcytidine-3'-phosphate
  modified_base 20: mod_base = OTHER; note = 2'-O-methyladenosine-3'-phosphate
  modified_base 21: mod_base = OTHER; note = 2'-O-methyluridine-3'-phosphate attached to N-[tris(N-acetylgalactosamine-alkyl)-amidodecanoyl)]-4-hydr oxyprolinol Hyp-(N-acetylgalactosamine-alkyl)3
aatggctgagaagactgacat

SEQ ID NO: 2189 - RNA, 23 nt, synthetic construct
  misc_feature 1..23: note = Description of Artificial Sequence: Synthetic oligonucleotide
  source 1..23: mol_type = other RNA
  modified_base 1: mod_base = OTHER; note = 2'-O-methyladenosine-3'- phosphorothioate
  modified_base 2: mod_base = OTHER; note = 2'-fluorouridine -3'-phosphorothioate
  modified_base 3: mod_base = OTHER; note = 2'-O-methylguanosine-3'-phosphate
  modified_base 4: mod_base = OTHER; note = 2'-O-methyluridine-3'-phosphate
  modified_base 5: mod_base = OTHER; note = 2'-O-methylcytidine-3'-phosphate
  modified_base 6: mod_base = OTHER; note = 2'-fluoroadenosine-3'-phosphate
  modified_base 7: mod_base = OTHER; note = 2'-O-methylguanosine-3'-phosphate
  modified_base 8: mod_base = OTHER; note = 2'-fluorouridine-3'-phosphate
  modified_base 9: mod_base = OTHER; note = 2'-fluorocytidine-3'-phosphate
  modified_base 10: mod_base = OTHER; note = 2'-O-methyluridine-3'-phosphate
  modified_base 11: mod_base = OTHER; note = 2'-O-methyluridine-3'-phosphate
  modified_base 12: mod_base = OTHER; note = 2'-O-methylcytidine-3'-phosphate
  modified_base 13: mod_base = OTHER; note = 2'-O-methyluridine-3'-phosphate
  modified_base 14: mod_base = OTHER; note = 2'-fluorocytidine-3'-phosphate
  modified_base 15: mod_base = OTHER; note = 2'-O-methyladenosine-3'-phosphate
  modified_base 16: mod_base = OTHER; note = 2'-fluoroguanosine-3'-phosphate
  modified_base 17: mod_base = OTHER; note = 2'-O-methylcytidine-3'-phosphate
  modified_base 18: mod_base = OTHER; note = 2'-O-methylcytidine-3'-phosphate
  modified_base 19: mod_base = OTHER; note = 2'-O-methyladenosine-3'-phosphate
  modified_base 20: mod_base = OTHER; note = 2'-O-methyluridine-3'-phosphate
  modified_base 21: mod_base = OTHER; note = 2'-O-methyluridine-3'-phosphorothioate
  modified_base 22: mod_base = OTHER; note = 2'-O-methyluridine-3'-phosphorothioate
  modified_base 23: mod_base = OTHER; note = 2'-O-methylguanosine-3'-phosphate
atgtcagtcttctcagccatttg

SEQ ID NO: 2190 - RNA, 21 nt, synthetic construct
  misc_feature 1..21: note = Description of Artificial Sequence: Synthetic oligonucleotide
  source 1..21: mol_type = other RNA
  modified_base 1: mod_base = OTHER; note = 2'-O-methyluridine-3'-phosphorothioate
  modified_base 2: mod_base = OTHER; note = 2'-O-methyladenosine-3'- phosphorothioate
  modified_base 3: mod_base = OTHER; note = 2'-O-methyluridine-3'-phosphate
  modified_base 4: mod_base = OTHER; note = 2'-O-methylcytidine-3'-phosphate
  modified_base 5: mod_base = OTHER; note = 2'-O-methyladenosine-3'-phosphate
  modified_base 6: mod_base = OTHER; note = 2'-O-methyladenosine-3'-phosphate
  modified_base 7: mod_base = OTHER; note = 2'-fluoroadenosine-3'-phosphate
  modified_base 8: mod_base = OTHER; note = 2'-O-methyluridine-3'-phosphate
  modified_base 9: mod_base = OTHER; note = 2'-fluoroguanosine-3'-phosphate
  modified_base 10: mod_base = OTHER; note = 2'-fluoroguanosine-3'-phosphate
  modified_base 11: mod_base = OTHER; note = 2'-fluorocytidine-3'-phosphate
  modified_base 12: mod_base = OTHER; note = 2'-O-methyluridine-3'-phosphate
  modified_base 13: mod_base = OTHER; note = 2'-O-methylguanosine-3'-phosphate
  modified_base 14: mod_base = OTHER; note = 2'-O-methyladenosine-3'-phosphate
  modified_base 15: mod_base = OTHER; note = 2'-O-methylguanosine-3'-phosphate
  modified_base 16: mod_base = OTHER; note = 2'-O-methyladenosine-3'-phosphate
  modified_base 17: mod_base = OTHER; note = 2'-O-methyladenosine-3'-phosphate
  modified_base 18: mod_base = OTHER; note = 2'-O-methylguanosine-3'-phosphate
  modified_base 19: mod_base = OTHER; note = 2'-O-methyladenosine-3'-phosphate
  modified_base 20: mod_base = OTHER; note = 2'-O-methylcytidine-3'-phosphate
  modified_base 21: mod_base = OTHER; note = 2'-O-methyluridine-3'-phosphate attached to N-[tris(N-acetylgalactosamine-alkyl)-amidodecanoyl)]-4-hydr oxyprolinol Hyp-(N-acetylgalactosamine-alkyl)3
tatcaaatggctgagaagact

SEQ ID NO: 2191 - RNA, 23 nt, synthetic construct
  misc_feature 1..23: note = Description of Artificial Sequence: Synthetic oligonucleotide
  source 1..23: mol_type = other RNA
  modified_base 1: mod_base = OTHER; note = 2'-O-methyladenosine-3'- phosphorothioate
  modified_base 2: mod_base = OTHER; note = 2'-fluoroguanosine-3'-phosphorothioate
  modified_base 3: mod_base = OTHER; note = 2'-O-methyluridine-3'-phosphate
  modified_base 4: mod_base = OTHER; note = 2'-O-methylcytidine-3'-phosphate
  modified_base 5: mod_base = OTHER; note = 2'-O-methyluridine-3'-phosphate
  modified_base 6: mod_base = OTHER; note = 2'-fluorouridine-3'-phosphate
  modified_base 7: mod_base = OTHER; note = 2'-O-methylcytidine-3'-phosphate
  modified_base 8: mod_base = OTHER; note = 2'-fluorouridine-3'-phosphate
  modified_base 9: mod_base = OTHER; note = 2'-fluorocytidine-3'-phosphate
  modified_base 10: mod_base = OTHER; note = 2'-O-methyladenosine-3'-phosphate
  modified_base 11: mod_base = OTHER; note = 2'-O-methylguanosine-3'-phosphate
  modified_base 12: mod_base = OTHER; note = 2'-O-methylcytidine-3'-phosphate
  modified_base 13: mod_base = OTHER; note = 2'-O-methylcytidine-3'-phosphate
  modified_base 14: mod_base = OTHER; note = 2'-fluoroadenosine-3'-phosphate
  modified_base 15: mod_base = OTHER; note = 2'-O-methyluridine-3'-phosphate
  modified_base 16: mod_base = OTHER; note = 2'-fluorouridine-3'-phosphate
  modified_base 17: mod_base = OTHER; note = 2'-O-methyluridine-3'-phosphate
  modified_base 18: mod_base = OTHER; note = 2'-O-methylguanosine-3'-phosphate
  modified_base 19: mod_base = OTHER; note = 2'-O-methyladenosine-3'-phosphate
  modified_base 20: mod_base = OTHER; note = 2'-O-methyluridine-3'-phosphate
  modified_base 21: mod_base = OTHER; note = 2'-O-methyladenosine-3'- phosphorothioate
  modified_base 22: mod_base = OTHER; note = 2'-O-methyluridine-3'-phosphorothioate
  modified_base 23: mod_base = OTHER; note = 2'-O-methylcytidine-3'-phosphate
agtcttctcagccatttgatatc

SEQ ID NO: 2192 - RNA, 21 nt, synthetic construct
  misc_feature 1..21: note = Description of Artificial Sequence: Synthetic oligonucleotide
  source 1..21: mol_type = other RNA
  modified_base 1: mod_base = OTHER; note = 2'-O-methyladenosine-3'- phosphorothioate
  modified_base 2: mod_base = OTHER; note = 2'-O-methyluridine-3'-phosphorothioate
  modified_base 3: mod_base = OTHER; note = 2'-O-methyladenosine-3'-phosphate
  modified_base 4: mod_base = OTHER; note = 2'-O-methyluridine-3'-phosphate
  modified_base 5: mod_base = OTHER; note = 2'-O-methylcytidine-3'-phosphate
  modified_base 6: mod_base = OTHER; note = 2'-O-methyladenosine-3'-phosphate
  modified_base 7: mod_base = OTHER; note = 2'-fluoroadenosine-3'-phosphate
  modified_base 8: mod_base = OTHER; note = 2'-O-methyladenosine-3'-phosphate
  modified_base 9: mod_base = OTHER; note = 2'-fluorouridine-3'-phosphate
  modified_base 10: mod_base = OTHER; note = 2'-fluoroguanosine-3'-phosphate
  modified_base 11: mod_base = OTHER; note = 2'-fluoroguanosine-3'-phosphate
  modified_base 12: mod_base = OTHER; note = 2'-O-methylcytidine-3'-phosphate
  modified_base 13: mod_base = OTHER; note = 2'-O-methyluridine-3'-phosphate
  modified_base 14: mod_base = OTHER; note = 2'-O-methylguanosine-3'-phosphate
  modified_base 15: mod_base = OTHER; note = 2'-O-methyladenosine-3'-phosphate
  modified_base 16: mod_base = OTHER; note = 2'-O-methylguanosine-3'-phosphate
  modified_base 17: mod_base = OTHER; note = 2'-O-methyladenosine-3'-phosphate
  modified_base 18: mod_base = OTHER; note = 2'-O-methyladenosine-3'-phosphate
  modified_base 19: mod_base = OTHER; note = 2'-O-methylguanosine-3'-phosphate
  modified_base 20: mod_base = OTHER; note = 2'-O-methyladenosine-3'-phosphate
  modified_base 21: mod_base = OTHER; note = 2'-O-methylcytidine-3'-phosphate attached to N-[tris(N-acetylgalactosamine-alkyl)-amidodecanoyl)]-4-hydr oxyprolinol Hyp-(N-acetylgalactosamine-alkyl)3
atatcaaatggctgagaagac

SEQ ID NO: 2193 - RNA, 23 nt, synthetic construct
  misc_feature 1..23: note = Description of Artificial Sequence: Synthetic oligonucleotide
  source 1..23: mol_type = other RNA
  modified_base 1: mod_base = OTHER; note = 2'-O-methylguanosine-3'- phosphorothioate
  modified_base 2: mod_base = OTHER; note = 2'-fluorouridine -3'-phosphorothioate
  modified_base 3: mod_base = OTHER; note = 2'-O-methylcytidine-3'-phosphate
  modified_base 4: mod_base = OTHER; note = 2'-O-methyluridine-3'-phosphate
  modified_base 5: mod_base = OTHER; note = 2'-O-methyluridine-3'-phosphate
  modified_base 6: mod_base = OTHER; note = 2'-fluorocytidine-3'-phosphate
  modified_base 7: mod_base = OTHER; note = 2'-O-methyluridine-3'-phosphate
  modified_base 8: mod_base = OTHER; note = 2'-fluorocytidine-3'-phosphate
  modified_base 9: mod_base = OTHER; note = 2'-fluoroadenosine-3'-phosphate
  modified_base 10: mod_base = OTHER; note = 2'-O-methylguanosine-3'-phosphate
  modified_base 11: mod_base = OTHER; note = 2'-O-methylcytidine-3'-phosphate
  modified_base 12: mod_base = OTHER; note = 2'-O-methylcytidine-3'-phosphate
  modified_base 13: mod_base = OTHER; note = 2'-O-methyladenosine-3'-phosphate
  modified_base 14: mod_base = OTHER; note = 2'-fluorouridine-3'-phosphate
  modified_base 15: mod_base = OTHER; note = 2'-O-methyluridine-3'-phosphate
  modified_base 16: mod_base = OTHER; note = 2'-fluorouridine-3'-phosphate
  modified_base 17: mod_base = OTHER; note = 2'-O-methylguanosine-3'-phosphate
  modified_base 18: mod_base = OTHER; note = 2'-O-methyladenosine-3'-phosphate
  modified_base 19: mod_base = OTHER; note = 2'-O-methyluridine-3'-phosphate
  modified_base 20: mod_base = OTHER; note = 2'-O-methyladenosine-3'-phosphate
  modified_base 21: mod_base = OTHER; note = 2'-O-methyluridine-3'-phosphorothioate
  modified_base 22: mod_base = OTHER; note = 2'-O-methylcytidine-3'- phosphorothioate
  modified_base 23: mod_base = OTHER; note = 2'-O-methyluridine-3'-phosphate
gtcttctcagccatttgatatct

SEQ ID NO: 2194 - RNA, 21 nt, synthetic construct
  misc_feature 1..21: note = Description of Artificial Sequence: Synthetic oligonucleotide
  source 1..21: mol_type = other RNA
  modified_base 1: mod_base = OTHER; note = 2'-O-methylguanosine-3'- phosphorothioate
  modified_base 2: mod_base = OTHER; note = 2'-O-methyluridine-3'-phosphorothioate
  modified_base 3: mod_base = OTHER; note = 2'-O-methylguanosine-3'-phosphate
  modified_base 4: mod_base = OTHER; note = 2'-O-methylguanosine-3'-phosphate
  modified_base 5: mod_base = OTHER; note = 2'-O-methyluridine-3'-phosphate
  modified_base 6: mod_base = OTHER; note = 2'-O-methyluridine-3'-phosphate
  modified_base 7: mod_base = OTHER; note = 2'-fluorocytidine-3'-phosphate
  modified_base 8: mod_base = OTHER; note = 2'-O-methyluridine-3'-phosphate
  modified_base 9: mod_base = OTHER; note = 2'-fluorouridine-3'-phosphate
  modified_base 10: mod_base = OTHER; note = 2'-fluoroadenosine-3'-phosphate
  modified_base 11: mod_base = OTHER; note = 2'-fluoroadenosine-3'-phosphate
  modified_base 12: mod_base = OTHER; note = 2'-O-methyladenosine-3'-phosphate
  modified_base 13: mod_base = OTHER; note = 2'-O-methyluridine-3'-phosphate
  modified_base 14: mod_base = OTHER; note = 2'-O-methyluridine-3'-phosphate
  modified_base 15: mod_base = OTHER; note = 2'-O-methylguanosine-3'-phosphate
  modified_base 16: mod_base = OTHER; note = 2'-O-methyluridine-3'-phosphate
  modified_base 17: mod_base = OTHER; note = 2'-O-methyladenosine-3'-phosphate
  modified_base 18: mod_base = OTHER; note = 2'-O-methyladenosine-3'-phosphate
  modified_base 19: mod_base = OTHER; note = 2'-O-methylguanosine-3'-phosphate
  modified_base 20: mod_base = OTHER; note = 2'-O-methylcytidine-3'-phosphate
  modified_base 21: mod_base = OTHER; note = 2'-O-methyluridine-3'-phosphate attached to N-[tris(N-acetylgalactosamine-alkyl)-amidodecanoyl)]-4-hydr oxyprolinol Hyp-(N-acetylgalactosamine-alkyl)3
gtggttcttaaattgtaagct

SEQ ID NO: 2195 - RNA, 23 nt, synthetic construct
  misc_feature 1..23: note = Description of Artificial Sequence: Synthetic oligonucleotide
  source 1..23: mol_type = other RNA
  modified_base 1: mod_base = OTHER; note = 2'-O-methyladenosine-3'- phosphorothioate
  modified_base 2: mod_base = OTHER; note = 2'-fluoroguanosine-3'-phosphorothioate
  modified_base 3: mod_base = OTHER; note = 2'-O-methylcytidine-3'-phosphate
  modified_base 4: mod_base = OTHER; note = 2'-O-methyluridine-3'-phosphate
  modified_base 5: mod_base = OTHER; note = 2'-O-methyluridine-3'-phosphate
  modified_base 6: mod_base = OTHER; note = 2'-fluoroadenosine-3'-phosphate
  modified_base 7: mod_base = OTHER; note = 2'-O-methylcytidine-3'-phosphate
  modified_base 8: mod_base = OTHER; note = 2'-fluoroadenosine-3'-phosphate
  modified_base 9: mod_base = OTHER; note = 2'-fluoroadenosine-3'-phosphate
  modified_base 10: mod_base = OTHER; note = 2'-O-methyluridine-3'-phosphate
  modified_base 11: mod_base = OTHER; note = 2'-O-methyluridine-3'-phosphate
  modified_base 12: mod_base = OTHER; note = 2'-O-methyluridine-3'-phosphate
  modified_base 13: mod_base = OTHER; note = 2'-O-methyladenosine-3'-phosphate
  modified_base 14: mod_base = OTHER; note = 2'-fluoroadenosine-3'-phosphate
  modified_base 15: mod_base = OTHER; note = 2'-O-methylguanosine-3'-phosphate
  modified_base 16: mod_base = OTHER; note = 2'-fluoroadenosine-3'-phosphate
  modified_base 17: mod_base = OTHER; note = 2'-O-methyladenosine-3'-phosphate
  modified_base 18: mod_base = OTHER; note = 2'-O-methylcytidine-3'-phosphate
  modified_base 19: mod_base = OTHER; note = 2'-O-methylcytidine-3'-phosphate
  modified_base 20: mod_base = OTHER; note = 2'-O-methyladenosine-3'-phosphate
  modified_base 21: mod_base = OTHER; note = 2'-O-methylcytidine-3'- phosphorothioate
  modified_base 22: mod_base = OTHER; note = 2'-O-methyluridine-3'-phosphorothioate
  modified_base 23: mod_base = OTHER; note = 2'-O-methylguanosine-3'-phosphate
agcttacaatttaagaaccactg

SEQ ID NO: 2196 - RNA, 21 nt, synthetic construct
  misc_feature 1..21: note = Description of Artificial Sequence: Synthetic oligonucleotide
  source 1..21: mol_type = other RNA
  modified_base 1: mod_base = OTHER; note = 2'-O-methyluridine-3'-phosphorothioate
  modified_base 2: mod_base = OTHER; note = 2'-O-methylguanosine-3'- phosphorothioate
  modified_base 3: mod_base = OTHER; note = 2'-O-methylguanosine-3'-phosphate
  modified_base 4: mod_base = OTHER; note = 2'-O-methyluridine-3'-phosphate
  modified_base 5: mod_base = OTHER; note = 2'-O-methyluridine-3'-phosphate
  modified_base 6: mod_base = OTHER; note = 2'-O-methylcytidine-3'-phosphate
  modified_base 7: mod_base = OTHER; note = 2'-fluorouridine-3'-phosphate
  modified_base 8: mod_base = OTHER; note = 2'-O-methyluridine-3'-phosphate
  modified_base 9: mod_base = OTHER; note = 2'-fluoroadenosine-3'-phosphate
  modified_base 10: mod_base = OTHER; note = 2'-fluoroadenosine-3'-phosphate
  modified_base 11: mod_base = OTHER; note = 2'-fluoroadenosine-3'-phosphate
  modified_base 12: mod_base = OTHER; note = 2'-O-methyluridine-3'-phosphate
  modified_base 13: mod_base = OTHER; note = 2'-O-methyluridine-3'-phosphate
  modified_base 14: mod_base = OTHER; note = 2'-O-methylguanosine-3'-phosphate
  modified_base 15: mod_base = OTHER; note = 2'-O-methyluridine-3'-phosphate
  modified_base 16: mod_base = OTHER; note = 2'-O-methyladenosine-3'-phosphate
  modified_base 17: mod_base = OTHER; note = 2'-O-methyladenosine-3'-phosphate
  modified_base 18: mod_base = OTHER; note = 2'-O-methylguanosine-3'-phosphate
  modified_base 19: mod_base = OTHER; note = 2'-O-methylcytidine-3'-phosphate
  modified_base 20: mod_base = OTHER; note = 2'-O-methyluridine-3'-phosphate
  modified_base 21: mod_base = OTHER; note = 2'-O-methylcytidine-3'-phosphate attached to N-[tris(N-acetylgalactosamine-alkyl)-amidodecanoyl)]-4-hydr oxyprolinol Hyp-(N-acetylgalactosamine-alkyl)3
tggttcttaaattgtaagctc

SEQ ID NO: 2197 - RNA, 23 nt, synthetic construct
  misc_feature 1..23: note = Description of Artificial Sequence: Synthetic oligonucleotide
  source 1..23: mol_type = other RNA
  modified_base 1: mod_base = OTHER; note = 2'-O-methylguanosine-3'- phosphorothioate
  modified_base 2: mod_base = OTHER; note = 2'-fluoroadenosine-3'-phosphorothioate
  modified_base 3: mod_base = OTHER; note = 2'-O-methylguanosine-3'-phosphate
  modified_base 4: mod_base = OTHER; note = 2'-O-methylcytidine-3'-phosphate
  modified_base 5: mod_base = OTHER; note = 2'-O-methyluridine-3'-phosphate
  modified_base 6: mod_base = OTHER; note = 2'-fluorouridine-3'-phosphate
  modified_base 7: mod_base = OTHER; note = 2'-O-methyladenosine-3'-phosphate
  modified_base 8: mod_base = OTHER; note = 2'-fluorocytidine-3'-phosphate
  modified_base 9: mod_base = OTHER; note = 2'-fluoroadenosine-3'-phosphate
  modified_base 10: mod_base = OTHER; note = 2'-O-methyladenosine-3'-phosphate
  modified_base 11: mod_base = OTHER; note = 2'-O-methyluridine-3'-phosphate
  modified_base 12: mod_base = OTHER; note = 2'-O-methyluridine-3'-phosphate
  modified_base 13: mod_base = OTHER; note = 2'-O-methyluridine-3'-phosphate
  modified_base 14: mod_base = OTHER; note = 2'-fluoroadenosine-3'-phosphate
  modified_base 15: mod_base = OTHER; note = 2'-O-methyladenosine-3'-phosphate
  modified_base 16: mod_base = OTHER; note = 2'-fluoroguanosine-3'-phosphate
  modified_base 17: mod_base = OTHER; note = 2'-O-methyladenosine-3'-phosphate
  modified_base 18: mod_base = OTHER; note = 2'-O-methyladenosine-3'-phosphate
  modified_base 19: mod_base = OTHER; note = 2'-O-methylcytidine-3'-phosphate
  modified_base 20: mod_base = OTHER; note = 2'-O-methylcytidine-3'-phosphate
  modified_base 21: mod_base = OTHER; note = 2'-O-methyladenosine-3'- phosphorothioate
  modified_base 22: mod_base = OTHER; note = 2'-O-methylcytidine-3'- phosphorothioate
  modified_base 23: mod_base = OTHER; note = 2'-O-methyluridine-3'-phosphate
gagcttacaatttaagaaccact

SEQ ID NO: 2198 - RNA, 21 nt, synthetic construct
  misc_feature 1..21: note = Description of Artificial Sequence: Synthetic oligonucleotide
  source 1..21: mol_type = other RNA
  modified_base 1: mod_base = OTHER; note = 2'-O-methyladenosine-3'- phosphorothioate
  modified_base 2: mod_base = OTHER; note = 2'-O-methyladenosine-3'- phosphorothioate
  modified_base 3: mod_base = OTHER; note = 2'-O-methylcytidine-3'-phosphate
  modified_base 4: mod_base = OTHER; note = 2'-O-methyladenosine-3'-phosphate
  modified_base 5: mod_base = OTHER; note = 2'-O-methylguanosine-3'-phosphate
  modified_base 6: mod_base = OTHER; note = 2'-O-methyluridine-3'-phosphate
  modified_base 7: mod_base = OTHER; note = 2'-fluoroguanosine-3'-phosphate
  modified_base 8: mod_base = OTHER; note = 2'-O-methylguanosine-3'-phosphate
  modified_base 9: mod_base = OTHER; note = 2'-fluorouridine-3'-phosphate
  modified_base 10: mod_base = OTHER; note = 2'-fluorouridine-3'-phosphate
  modified_base 11: mod_base = OTHER; note = 2'-fluorocytidine-3'-phosphate
  modified_base 12: mod_base = OTHER; note = 2'-O-methyluridine-3'-phosphate
  modified_base 13: mod_base = OTHER; note = 2'-O-methyluridine-3'-phosphate
  modified_base 14: mod_base = OTHER; note = 2'-O-methyladenosine-3'-phosphate
  modified_base 15: mod_base = OTHER; note = 2'-O-methyladenosine-3'-phosphate
  modified_base 16: mod_base = OTHER; note = 2'-O-methyladenosine-3'-phosphate
  modified_base 17: mod_base = OTHER; note = 2'-O-methyluridine-3'-phosphate
  modified_base 18: mod_base = OTHER; note = 2'-O-methyluridine-3'-phosphate
  modified_base 19: mod_base = OTHER; note = 2'-O-methylguanosine-3'-phosphate
  modified_base 20: mod_base = OTHER; note = 2'-O-methyluridine-3'-phosphate
  modified_base 21: mod_base = OTHER; note = 2'-O-methyladenosine-3'-phosphate attached to N-[tris(N-acetylgalactosamine-alkyl)-amidodecanoyl)]-4-hydr oxyprolinol Hyp-(N-acetylgalactosamine-alkyl)3
aacagtggttcttaaattgta

SEQ ID NO: 2199 - RNA, 23 nt, synthetic construct
  misc_feature 1..23: note = Description of Artificial Sequence: Synthetic oligonucleotide
  source 1..23: mol_type = other RNA
  modified_base 1: mod_base = OTHER; note = 2'-O-methyluridine-3'-phosphorothioate
  modified_base 2: mod_base = OTHER; note = 2'-fluoroadenosine-3'-phosphorothioate
  modified_base 3: mod_base = OTHER; note = 2'-O-methylcytidine-3'-phosphate
  modified_base 4: mod_base = OTHER; note = 2'-O-methyladenosine-3'-phosphate
  modified_base 5: mod_base = OTHER; note = 2'-O-methyladenosine-3'-phosphate
  modified_base 6: mod_base = OTHER; note = 2'-fluorouridine-3'-phosphate
  modified_base 7: mod_base = OTHER; note = 2'-O-methyluridine-3'-phosphate
  modified_base 8: mod_base = OTHER; note = 2'-fluorouridine-3'-phosphate
  modified_base 9: mod_base = OTHER; note = 2'-fluoroadenosine-3'-phosphate
  modified_base 10: mod_base = OTHER; note = 2'-O-methyladenosine-3'-phosphate
  modified_base 11: mod_base = OTHER; note = 2'-O-methylguanosine-3'-phosphate
  modified_base 12: mod_base = OTHER; note = 2'-O-methyladenosine-3'-phosphate
  modified_base 13: mod_base = OTHER; note = 2'-O-methyladenosine-3'-phosphate
  modified_base 14: mod_base = OTHER; note = 2'-fluorocytidine-3'-phosphate
  modified_base 15: mod_base = OTHER; note = 2'-O-methylcytidine-3'-phosphate
  modified_base 16: mod_base = OTHER; note = 2'-fluoroadenosine-3'-phosphate
  modified_base 17: mod_base = OTHER; note = 2'-O-methylcytidine-3'-phosphate
  modified_base 18: mod_base = OTHER; note = 2'-O-methyluridine-3'-phosphate
  modified_base 19: mod_base = OTHER; note = 2'-O-methylguanosine-3'-phosphate
  modified_base 20: mod_base = OTHER; note = 2'-O-methyluridine-3'-phosphate
  modified_base 21: mod_base = OTHER; note = 2'-O-methyluridine-3'-phosphorothioate
  modified_base 22: mod_base = OTHER; note = 2'-O-methyluridine-3'-phosphorothioate
  modified_base 23: mod_base = OTHER; note = 2'-O-methyluridine-3'-phosphate
tacaatttaagaaccactgtttt

SEQ ID NO: 2200 - RNA, 21 nt, synthetic construct
  misc_feature 1..21: note = Description of Artificial Sequence: Synthetic oligonucleotide
  source 1..21: mol_type = other RNA
  modified_base 1: mod_base = OTHER; note = 2'-O-methyladenosine-3'- phosphorothioate
  modified_base 2: mod_base = OTHER; note = 2'-O-methyladenosine-3'- phosphorothioate
  modified_base 3: mod_base = OTHER; note = 2'-O-methyladenosine-3'-phosphate
  modified_base 4: mod_base = OTHER; note = 2'-O-methylcytidine-3'-phosphate
  modified_base 5: mod_base = OTHER; note = 2'-O-methyladenosine-3'-phosphate
  modified_base 6: mod_base = OTHER; note = 2'-O-methylguanosine-3'-phosphate
  modified_base 7: mod_base = OTHER; note = 2'-fluorouridine-3'-phosphate
  modified_base 8: mod_base = OTHER; note = 2'-O-methylguanosine-3'-phosphate
  modified_base 9: mod_base = OTHER; note = 2'-fluoroguanosine-3'-phosphate
  modified_base 10: mod_base = OTHER; note = 2'-fluorouridine-3'-phosphate
  modified_base 11: mod_base = OTHER; note = 2'-fluorouridine-3'-phosphate
  modified_base 12: mod_base = OTHER; note = 2'-O-methylcytidine-3'-phosphate
  modified_base 13: mod_base = OTHER; note = 2'-O-methyluridine-3'-phosphate
  modified_base 14: mod_base = OTHER; note = 2'-O-methyluridine-3'-phosphate
  modified_base 15: mod_base = OTHER; note = 2'-O-methyladenosine-3'-phosphate
  modified_base 16: mod_base = OTHER; note = 2'-O-methyladenosine-3'-phosphate
  modified_base 17: mod_base = OTHER; note = 2'-O-methyladenosine-3'-phosphate
  modified_base 18: mod_base = OTHER; note = 2'-O-methyluridine-3'-phosphate
  modified_base 19: mod_base = OTHER; note = 2'-O-methyluridine-3'-phosphate
  modified_base 20: mod_base = OTHER; note = 2'-O-methylguanosine-3'-phosphate
  modified_base 21: mod_base = OTHER; note = 2'-O-methyluridine-3'-phosphate attached to N-[tris(N-acetylgalactosamine-alkyl)-amidodecanoyl)]-4-hydr oxyprolinol Hyp-(N-acetylgalactosamine-alkyl)3
aaacagtggttcttaaattgt

SEQ ID NO: 2201 - RNA, 23 nt, synthetic construct
  misc_feature 1..23: note = Description of Artificial Sequence: Synthetic oligonucleotide
  source 1..23: mol_type = other RNA
  modified_base 1: mod_base = OTHER; note = 2'-O-methyladenosine-3'- phosphorothioate
  modified_base 2: mod_base = OTHER; note = 2'-fluorocytidine-3'-phosphorothioate
  modified_base 3: mod_base = OTHER; note = 2'-O-methyladenosine-3'-phosphate
  modified_base 4: mod_base = OTHER; note = 2'-O-methyladenosine-3'-phosphate
  modified_base 5: mod_base = OTHER; note = 2'-O-methyluridine-3'-phosphate
  modified_base 6: mod_base = OTHER; note = 2'-fluorouridine-3'-phosphate
  modified_base 7: mod_base = OTHER; note = 2'-O-methyluridine-3'-phosphate
  modified_base 8: mod_base = OTHER; note = 2'-fluoroadenosine-3'-phosphate
  modified_base 9: mod_base = OTHER; note = 2'-fluoroadenosine-3'-phosphate
  modified_base 10: mod_base = OTHER; note = 2'-O-methylguanosine-3'-phosphate
  modified_base 11: mod_base = OTHER; note = 2'-O-methyladenosine-3'-phosphate
  modified_base 12: mod_base = OTHER; note = 2'-O-methyladenosine-3'-phosphate
  modified_base 13: mod_base = OTHER; note = 2'-O-methylcytidine-3'-phosphate
  modified_base 14: mod_base = OTHER; note = 2'-fluorocytidine-3'-phosphate
  modified_base 15: mod_base = OTHER; note = 2'-O-methyladenosine-3'-phosphate
  modified_base 16: mod_base = OTHER; note = 2'-fluorocytidine-3'-phosphate
  modified_base 17: mod_base = OTHER; note = 2'-O-methyluridine-3'-phosphate
  modified_base 18: mod_base = OTHER; note = 2'-O-methylguanosine-3'-phosphate
  modified_base 19: mod_base = OTHER; note = 2'-O-methyluridine-3'-phosphate
  modified_base 20: mod_base = OTHER; note = 2'-O-methyluridine-3'-phosphate
  modified_base 21: mod_base = OTHER; note = 2'-O-methyluridine-3'-phosphorothioate
  modified_base 22: mod_base = OTHER; note = 2'-O-methyluridine-3'-phosphorothioate
  modified_base 23: mod_base = OTHER; note = 2'-O-methyladenosine-3'-phosphate
acaatttaagaaccactgtttta

SEQ ID NO: 2202 - RNA, 21 nt, synthetic construct
  misc_feature 1..21: note = Description of Artificial Sequence: Synthetic oligonucleotide
  source 1..21: mol_type = other RNA
  modified_base 1: mod_base = OTHER; note = 2'-O-methyladenosine-3'- phosphorothioate
  modified_base 2: mod_base = OTHER; note = 2'-O-methyladenosine-3'- phosphorothioate
  modified_base 3: mod_base = OTHER; note = 2'-O-methylguanosine-3'-phosphate
  modified_base 4: mod_base = OTHER; note = 2'-O-methyluridine-3'-phosphate
  modified_base 5: mod_base = OTHER; note = 2'-O-methylcytidine-3'-phosphate
  modified_base 6: mod_base = OTHER; note = 2'-O-methyladenosine-3'-phosphate
  modified_base 7: mod_base = OTHER; note = 2'-fluorouridine-3'-phosphate
  modified_base 8: mod_base = OTHER; note = 2'-O-methylcytidine-3'-phosphate
  modified_base 9: mod_base = OTHER; note = 2'-fluoroguanosine-3'-phosphate
  modified_base 10: mod_base = OTHER; note = 2'-fluoroadenosine-3'-phosphate
  modified_base 11: mod_base = OTHER; note = 2'-fluorocytidine-3'-phosphate
  modified_base 12: mod_base = OTHER; note = 2'-O-methyladenosine-3'-phosphate
  modified_base 13: mod_base = OTHER; note = 2'-O-methyladenosine-3'-phosphate
  modified_base 14: mod_base = OTHER; note = 2'-O-methylguanosine-3'-phosphate
  modified_base 15: mod_base = OTHER; note = 2'-O-methyladenosine-3'-phosphate
  modified_base 16: mod_base = OTHER; note = 2'-O-methylcytidine-3'-phosphate
  modified_base 17: mod_base = OTHER; note = 2'-O-methyladenosine-3'-phosphate
  modified_base 18: mod_base = OTHER; note = 2'-O-methyluridine-3'-phosphate
  modified_base 19: mod_base = OTHER; note = 2'-O-methyluridine-3'-phosphate
  modified_base 20: mod_base = OTHER; note = 2'-O-methylguanosine-3'-phosphate
  modified_base 21: mod_base = OTHER; note = 2'-O-methylguanosine-3'-phosphate attached to N-[tris(N-acetylgalactosamine-alkyl)-amidodecanoyl)]-4-hydr oxyprolinol Hyp-(N-acetylgalactosamine-alkyl)3
aagtcatcgacaagacattgg

SEQ ID NO: 2203 - RNA, 23 nt, synthetic construct
  misc_feature 1..23: note = Description of Artificial Sequence: Synthetic oligonucleotide
  source 1..23: mol_type = other RNA
  modified_base 1: mod_base = OTHER; note = 2'-O-methylcytidine-3'- phosphorothioate
  modified_base 2: mod_base = OTHER; note = 2'-fluorocytidine-3'-phosphorothioate
  modified_base 3: mod_base = OTHER; note = 2'-O-methyladenosine-3'-phosphate
  modified_base 4: mod_base = OTHER; note = 2'-O-methyladenosine-3'-phosphate
  modified_base 5: mod_base = OTHER; note = 2'-O-methyluridine-3'-phosphate
  modified_base 6: mod_base = OTHER; note = 2'-fluoroguanosine-3'-phosphate
  modified_base 7: mod_base = OTHER; note = 2'-O-methyluridine-3'-phosphate
  modified_base 8: mod_base = OTHER; note = 2'-fluorocytidine-3'-phosphate
  modified_base 9: mod_base = OTHER; note = 2'-fluorouridine-3'-phosphate
  modified_base 10: mod_base = OTHER; note = 2'-O-methyluridine-3'-phosphate
  modified_base 11: mod_base = OTHER; note = 2'-O-methylguanosine-3'-phosphate
  modified_base 12: mod_base = OTHER; note = 2'-O-methyluridine-3'-phosphate
  modified_base 13: mod_base = OTHER; note = 2'-O-methylcytidine-3'-phosphate
  modified_base 14: mod_base = OTHER; note = 2'-fluoroguanosine-3'-phosphate
  modified_base 15: mod_base = OTHER; note = 2'-O-methyladenosine-3'-phosphate
  modified_base 16: mod_base = OTHER; note = 2'-fluorouridine-3'-phosphate
  modified_base 17: mod_base = OTHER; note = 2'-O-methylguanosine-3'-phosphate
  modified_base 18: mod_base = OTHER; note = 2'-O-methyladenosine-3'-phosphate
  modified_base 19: mod_base = OTHER; note = 2'-O-methylcytidine-3'-phosphate
  modified_base 20: mod_base = OTHER; note = 2'-O-methyluridine-3'-phosphate
  modified_base 21: mod_base = OTHER; note = 2'-O-methyluridine-3'-phosphorothioate
  modified_base 22: mod_base = OTHER; note = 2'-O-methyluridine-3'-phosphorothioate
  modified_base 23: mod_base = OTHER; note = 2'-O-methylcytidine-3'-phosphate
ccaatgtcttgtcgatgactttc

SEQ ID NO: 2204 - RNA, 21 nt, synthetic construct
  misc_feature 1..21: note = Description of Artificial Sequence: Synthetic oligonucleotide
  source 1..21: mol_type = other RNA
  modified_base 1: mod_base = OTHER; note = 2'-O-methyladenosine-3'- phosphorothioate
  modified_base 2: mod_base = OTHER; note = 2'-O-methylguanosine-3'- phosphorothioate
  modified_base 3: mod_base = OTHER; note = 2'-O-methyluridine-3'-phosphate
  modified_base 4: mod_base = OTHER; note = 2'-O-methylcytidine-3'-phosphate
  modified_base 5: mod_base = OTHER; note = 2'-O-methyladenosine-3'-phosphate
  modified_base 6: mod_base = OTHER; note = 2'-O-methyluridine-3'-phosphate
  modified_base 7: mod_base = OTHER; note = 2'-fluorocytidine-3'-phosphate
  modified_base 8: mod_base = OTHER; note = 2'-O-methylguanosine-3'-phosphate
  modified_base 9: mod_base = OTHER; note = 2'-fluoroadenosine-3'-phosphate
  modified_base 10: mod_base = OTHER; note = 2'-fluorocytidine-3'-phosphate
  modified_base 11: mod_base = OTHER; note = 2'-fluoroadenosine-3'-phosphate
  modified_base 12: mod_base = OTHER; note = 2'-O-methyladenosine-3'-phosphate
  modified_base 13: mod_base = OTHER; note = 2'-O-methylguanosine-3'-phosphate
  modified_base 14: mod_base = OTHER; note = 2'-O-methyladenosine-3'-phosphate
  modified_base 15: mod_base = OTHER; note = 2'-O-methylcytidine-3'-phosphate
  modified_base 16: mod_base = OTHER; note = 2'-O-methyladenosine-3'-phosphate
  modified_base 17: mod_base = OTHER; note = 2'-O-methyluridine-3'-phosphate
  modified_base 18: mod_base = OTHER; note = 2'-O-methyluridine-3'-phosphate
  modified_base 19: mod_base = OTHER; note = 2'-O-methylguanosine-3'-phosphate
  modified_base 20: mod_base = OTHER; note = 2'-O-methylguanosine-3'-phosphate
  modified_base 21: mod_base = OTHER; note = 2'-O-methyluridine-3'-phosphate attached to N-[tris(N-acetylgalactosamine-alkyl)-amidodecanoyl)]-4-hydr oxyprolinol Hyp-(N-acetylgalactosamine-alkyl)3
agtcatcgacaagacattggt

SEQ ID NO: 2205 - RNA, 23 nt, synthetic construct
  misc_feature 1..23: note = Description of Artificial Sequence: Synthetic oligonucleotide
  source 1..23: mol_type = other RNA
  modified_base 1: mod_base = OTHER; note = 2'-O-methyladenosine-3'- phosphorothioate
  modified_base 2: mod_base = OTHER; note = 2'-fluorocytidine-3'-phosphorothioate
  modified_base 3: mod_base = OTHER; note = 2'-O-methylcytidine-3'-phosphate
  modified_base 4: mod_base = OTHER; note = 2'-O-methyladenosine-3'-phosphate
  modified_base 5: mod_base = OTHER; note = 2'-O-methyladenosine-3'-phosphate
  modified_base 6: mod_base = OTHER; note = 2'-fluorouridine-3'-phosphate
  modified_base 7: mod_base = OTHER; note = 2'-O-methylguanosine-3'-phosphate
  modified_base 8: mod_base = OTHER; note = 2'-fluorouridine-3'-phosphate
  modified_base 9: mod_base = OTHER; note = 2'-fluorocytidine-3'-phosphate
  modified_base 10: mod_base = OTHER; note = 2'-O-methyluridine-3'-phosphate
  modified_base 11: mod_base = OTHER; note = 2'-O-methyluridine-3'-phosphate
  modified_base 12: mod_base = OTHER; note = 2'-O-methylguanosine-3'-phosphate
  modified_base 13: mod_base = OTHER; note = 2'-O-methyluridine-3'-phosphate
  modified_base 14: mod_base = OTHER; note = 2'-fluorocytidine-3'-phosphate
  modified_base 15: mod_base = OTHER; note = 2'-O-methylguanosine-3'-phosphate
  modified_base 16: mod_base = OTHER; note = 2'-fluoroadenosine-3'-phosphate
  modified_base 17: mod_base = OTHER; note = 2'-O-methyluridine-3'-phosphate
  modified_base 18: mod_base = OTHER; note = 2'-O-methylguanosine-3'-phosphate
  modified_base 19: mod_base = OTHER; note = 2'-O-methyladenosine-3'-phosphate
  modified_base 20: mod_base = OTHER; note = 2'-O-methylcytidine-3'-phosphate
  modified_base 21: mod_base = OTHER; note = 2'-O-methyluridine-3'-phosphorothioate
  modified_base 22: mod_base = OTHER; note = 2'-O-methyluridine-3'-phosphorothioate
  modified_base 23: mod_base = OTHER; note = 2'-O-methyluridine-3'-phosphate
accaatgtcttgtcgatgacttt

SEQ ID NO: 2206 - RNA, 21 nt, synthetic construct
  misc_feature 1..21: note = Description of Artificial Sequence: Synthetic oligonucleotide
  source 1..21: mol_type = other RNA
  modified_base 1: mod_base = OTHER; note = 2'-O-methylguanosine-3'- phosphorothioate
  modified_base 2: mod_base = OTHER; note = 2'-O-methyluridine-3'-phosphorothioate
  modified_base 3: mod_base = OTHER; note = 2'-O-methylguanosine-3'-phosphate
  modified_base 4: mod_base = OTHER; note = 2'-O-methyladenosine-3'-phosphate
  modified_base 5: mod_base = OTHER; note = 2'-O-methyladenosine-3'-phosphate
  modified_base 6: mod_base = OTHER; note = 2'-O-methyladenosine-3'-phosphate
  modified_base 7: mod_base = OTHER; note = 2'-fluoroguanosine-3'-phosphate
  modified_base 8: mod_base = OTHER; note = 2'-O-methyluridine-3'-phosphate
  modified_base 9: mod_base = OTHER; note = 2'-fluorocytidine-3'-phosphate
  modified_base 10: mod_base = OTHER; note = 2'-fluoroadenosine-3'-phosphate
  modified_base 11: mod_base = OTHER; note = 2'-fluorouridine-3'-phosphate
  modified_base 12: mod_base = OTHER; note = 2'-O-methylcytidine-3'-phosphate
  modified_base 13: mod_base = OTHER; note = 2'-O-methylguanosine-3'-phosphate
  modified_base 14: mod_base = OTHER; note = 2'-O-methyladenosine-3'-phosphate
  modified_base 15: mod_base = OTHER; note = 2'-O-methylcytidine-3'-phosphate
  modified_base 16: mod_base = OTHER; note = 2'-O-methyladenosine-3'-phosphate
  modified_base 17: mod_base = OTHER; note = 2'-O-methyladenosine-3'-phosphate
  modified_base 18: mod_base = OTHER; note = 2'-O-methylguanosine-3'-phosphate
  modified_base 19: mod_base = OTHER; note = 2'-O-methyladenosine-3'-phosphate
  modified_base 20: mod_base = OTHER; note = 2'-O-methylcytidine-3'-phosphate
  modified_base 21: mod_base = OTHER; note = 2'-O-methyladenosine-3'-phosphate attached to N-[tris(N-acetylgalactosamine-alkyl)-amidodecanoyl)]-4-hydr oxyprolinol Hyp-(N-acetylgalactosamine-alkyl)3
gtgaaagtcatcgacaagaca

SEQ ID NO: 2207 - RNA, 23 nt, synthetic construct
  misc_feature 1..23: note = Description of Artificial Sequence: Synthetic oligonucleotide
  source 1..23: mol_type = other RNA
  modified_base 1: mod_base = OTHER; note = 2'-O-methyluridine-3'-phosphorothioate
  modified_base 2: mod_base = OTHER; note = 2'-fluoroguanosine-3'-phosphorothioate
  modified_base 3: mod_base = OTHER; note = 2'-O-methyluridine-3'-phosphate
  modified_base 4: mod_base = OTHER; note = 2'-O-methylcytidine-3'-phosphate
  modified_base 5: mod_base = OTHER; note = 2'-O-methyluridine-3'-phosphate
  modified_base 6: mod_base = OTHER; note = 2'-fluorouridine-3'-phosphate
  modified_base 7: mod_base = OTHER; note = 2'-O-methylguanosine-3'-phosphate
  modified_base 8: mod_base = OTHER; note = 2'-fluorouridine-3'-phosphate
  modified_base 9: mod_base = OTHER; note = 2'-fluorocytidine-3'-phosphate
  modified_base 10: mod_base = OTHER; note = 2'-O-methylguanosine-3'-phosphate
  modified_base 11: mod_base = OTHER; note = 2'-O-methyladenosine-3'-phosphate
  modified_base 12: mod_base = OTHER; note = 2'-O-methyluridine-3'-phosphate
  modified_base 13: mod_base = OTHER; note = 2'-O-methylguanosine-3'-phosphate
  modified_base 14: mod_base = OTHER; note = 2'-fluoroadenosine-3'-phosphate
  modified_base 15: mod_base = OTHER; note = 2'-O-methylcytidine-3'-phosphate
  modified_base 16: mod_base = OTHER; note = 2'-fluorouridine-3'-phosphate
  modified_base 17: mod_base = OTHER; note = 2'-O-methyluridine-3'-phosphate
  modified_base 18: mod_base = OTHER; note = 2'-O-methyluridine-3'-phosphate
  modified_base 19: mod_base = OTHER; note = 2'-O-methylcytidine-3'-phosphate
  modified_base 20: mod_base = OTHER; note = 2'-O-methyladenosine-3'-phosphate
  modified_base 21: mod_base = OTHER; note = 2'-O-methylcytidine-3'- phosphorothioate
  modified_base 22: mod_base = OTHER; note = 2'-O-methyladenosine-3'- phosphorothioate
  modified_base 23: mod_base = OTHER; note = 2'-O-methyluridine-3'-phosphate
tgtcttgtcgatgactttcacat

SEQ ID NO: 2208 - RNA, 21 nt, synthetic construct
  misc_feature 1..21: note = Description of Artificial Sequence: Synthetic oligonucleotide
  source 1..21: mol_type = other RNA
  modified_base 1: mod_base = OTHER; note = 2'-O-methyluridine-3'-phosphorothioate
  modified_base 2: mod_base = OTHER; note = 2'-O-methylguanosine-3'- phosphorothioate
  modified_base 3: mod_base = OTHER; note = 2'-O-methyluridine-3'-phosphate
  modified_base 4: mod_base = OTHER; note = 2'-O-methylguanosine-3'-phosphate
  modified_base 5: mod_base = OTHER; note = 2'-O-methyladenosine-3'-phosphate
  modified_base 6: mod_base = OTHER; note = 2'-O-methyladenosine-3'-phosphate
  modified_base 7: mod_base = OTHER; note = 2'-fluoroadenosine-3'-phosphate
  modified_base 8: mod_base = OTHER; note = 2'-O-methylguanosine-3'-phosphate
  modified_base 9: mod_base = OTHER; note = 2'-fluorouridine-3'-phosphate
  modified_base 10: mod_base = OTHER; note = 2'-fluorocytidine-3'-phosphate
  modified_base 11: mod_base = OTHER; note = 2'-fluoroadenosine-3'-phosphate
  modified_base 12: mod_base = OTHER; note = 2'-O-methyluridine-3'-phosphate
  modified_base 13: mod_base = OTHER; note = 2'-O-methylcytidine-3'-phosphate
  modified_base 14: mod_base = OTHER; note = 2'-O-methylguanosine-3'-phosphate
  modified_base 15: mod_base = OTHER; note = 2'-O-methyladenosine-3'-phosphate
  modified_base 16: mod_base = OTHER; note = 2'-O-methylcytidine-3'-phosphate
  modified_base 17: mod_base = OTHER; note = 2'-O-methyladenosine-3'-phosphate
  modified_base 18: mod_base = OTHER; note = 2'-O-methyladenosine-3'-phosphate
  modified_base 19: mod_base = OTHER; note = 2'-O-methylguanosine-3'-phosphate
  modified_base 20: mod_base = OTHER; note = 2'-O-methyladenosine-3'-phosphate
  modified_base 21: mod_base = OTHER; note = 2'-O-methylcytidine-3'-phosphate attached to N-[tris(N-acetylgalactosamine-alkyl)-amidodecanoyl)]-4-hydr oxyprolinol Hyp-(N-acetylgalactosamine-alkyl)3
tgtgaaagtcatcgacaagac

SEQ ID NO: 2209 - RNA, 23 nt, synthetic construct
  misc_feature 1..23: note = Description of Artificial Sequence: Synthetic oligonucleotide
  source 1..23: mol_type = other RNA
  modified_base 1: mod_base = OTHER; note = 2'-O-methylguanosine-3'- phosphorothioate
  modified_base 2: mod_base = OTHER; note = 2'-fluorouridine -3'-phosphorothioate
  modified_base 3: mod_base = OTHER; note = 2'-O-methylcytidine-3'-phosphate
  modified_base 4: mod_base = OTHER; note = 2'-O-methyluridine-3'-phosphate
  modified_base 5: mod_base = OTHER; note = 2'-O-methyluridine-3'-phosphate
  modified_base 6: mod_base = OTHER; note = 2'-fluoroguanosine-3'-phosphate
  modified_base 7: mod_base = OTHER; note = 2'-O-methyluridine-3'-phosphate
  modified_base 8: mod_base = OTHER; note = 2'-fluorocytidine-3'-phosphate
  modified_base 9: mod_base = OTHER; note = 2'-fluoroguanosine-3'-phosphate
  modified_base 10: mod_base = OTHER; note = 2'-O-methyladenosine-3'-phosphate
  modified_base 11: mod_base = OTHER; note = 2'-O-methyluridine-3'-phosphate
  modified_base 12: mod_base = OTHER; note = 2'-O-methylguanosine-3'-phosphate
  modified_base 13: mod_base = OTHER; note = 2'-O-methyladenosine-3'-phosphate
  modified_base 14: mod_base = OTHER; note = 2'-fluorocytidine-3'-phosphate
  modified_base 15: mod_base = OTHER; note = 2'-O-methyluridine-3'-phosphate
  modified_base 16: mod_base = OTHER; note = 2'-fluorouridine-3'-phosphate
  modified_base 17: mod_base = OTHER; note = 2'-O-methyluridine-3'-phosphate
  modified_base 18: mod_base = OTHER; note = 2'-O-methylcytidine-3'-phosphate
  modified_base 19: mod_base = OTHER; note = 2'-O-methyladenosine-3'-phosphate
  modified_base 20: mod_base = OTHER; note = 2'-O-methylcytidine-3'-phosphate
  modified_base 21: mod_base = OTHER; note = 2'-O-methyladenosine-3'- phosphorothioate
  modified_base 22: mod_base = OTHER; note = 2'-O-methyluridine-3'-phosphorothioate
  modified_base 23: mod_base = OTHER; note = 2'-O-methyluridine-3'-phosphate
gtcttgtcgatgactttcacatt

SEQ ID NO: 2210 - RNA, 21 nt, synthetic construct
  misc_feature 1..21: note = Description of Artificial Sequence: Synthetic oligonucleotide
  source 1..21: mol_type = other RNA
  modified_base 1: mod_base = OTHER; note = 2'-O-methylguanosine-3'- phosphorothioate
  modified_base 2: mod_base = OTHER; note = 2'-O-methyladenosine-3'- phosphorothioate
  modified_base 3: mod_base = OTHER; note = 2'-O-methyluridine-3'-phosphate
  modified_base 4: mod_base = OTHER; note = 2'-O-methyladenosine-3'-phosphate
  modified_base 5: mod_base = OTHER; note = 2'-O-methyladenosine-3'-phosphate
  modified_base 6: mod_base = OTHER; note = 2'-O-methyluridine-3'-phosphate
  modified_base 7: mod_base = OTHER; note = 2'-fluoroadenosine-3'-phosphate
  modified_base 8: mod_base = OTHER; note = 2'-O-methyluridine-3'-phosphate
  modified_base 9: mod_base = OTHER; note = 2'-fluorouridine-3'-phosphate
  modified_base 10: mod_base = OTHER; note = 2'-fluoroguanosine-3'-phosphate
  modified_base 11: mod_base = OTHER; note = 2'-fluorocytidine-3'-phosphate
  modified_base 12: mod_base = OTHER; note = 2'-O-methyladenosine-3'-phosphate
  modified_base 13: mod_base = OTHER; note = 2'-O-methylguanosine-3'-phosphate
  modified_base 14: mod_base = OTHER; note = 2'-O-methylcytidine-3'-phosphate
  modified_base 15: mod_base = OTHER; note = 2'-O-methyladenosine-3'-phosphate
  modified_base 16: mod_base = OTHER; note = 2'-O-methyluridine-3'-phosphate
  modified_base 17: mod_base = OTHER; note = 2'-O-methyluridine-3'-phosphate
  modified_base 18: mod_base = OTHER; note = 2'-O-methyluridine-3'-phosphate
  modified_base 19: mod_base = OTHER; note = 2'-O-methyluridine-3'-phosphate
  modified_base 20: mod_base = OTHER; note = 2'-O-methylcytidine-3'-phosphate
  modified_base 21: mod_base = OTHER; note = 2'-O-methylcytidine-3'-phosphate attached to N-[tris(N-acetylgalactosamine-alkyl)-amidodecanoyl)]-4-hydr oxyprolinol Hyp-(N-acetylgalactosamine-alkyl)3
gataatattgcagcattttcc

SEQ ID NO: 2211 - RNA, 23 nt, synthetic construct
  misc_feature 1..23: note = Description of Artificial Sequence: Synthetic oligonucleotide
  source 1..23: mol_type = other RNA
  modified_base 1: mod_base = OTHER; note = 2'-O-methylguanosine-3'- phosphorothioate
  modified_base 2: mod_base = OTHER; note = 2'-fluoroguanosine-3'-phosphorothioate
  modified_base 3: mod_base = OTHER; note = 2'-O-methyladenosine-3'-phosphate
  modified_base 4: mod_base = OTHER; note = 2'-O-methyladenosine-3'-phosphate
  modified_base 5: mod_base = OTHER; note = 2'-O-methyladenosine-3'-phosphate
  modified_base 6: mod_base = OTHER; note = 2'-fluoroadenosine-3'-phosphate
  modified_base 7: mod_base = OTHER; note = 2'-O-methyluridine-3'-phosphate
  modified_base 8: mod_base = OTHER; note = 2'-fluoroguanosine-3'-phosphate
  modified_base 9: mod_base = OTHER; note = 2'-fluorocytidine-3'-phosphate
  modified_base 10: mod_base = OTHER; note = 2'-O-methyluridine-3'-phosphate
  modified_base 11: mod_base = OTHER; note = 2'-O-methylguanosine-3'-phosphate
  modified_base 12: mod_base = OTHER; note = 2'-O-methylcytidine-3'-phosphate
  modified_base 13: mod_base = OTHER; note = 2'-O-methyladenosine-3'-phosphate
  modified_base 14: mod_base = OTHER; note = 2'-fluoroadenosine-3'-phosphate
  modified_base 15: mod_base = OTHER; note = 2'-O-methyluridine-3'-phosphate
  modified_base 16: mod_base = OTHER; note = 2'-fluoroadenosine-3'-phosphate
  modified_base 17: mod_base = OTHER; note = 2'-O-methyluridine-3'-phosphate
  modified_base 18: mod_base = OTHER; note = 2'-O-methyluridine-3'-phosphate
  modified_base 19: mod_base = OTHER; note = 2'-O-methyladenosine-3'-phosphate
  modified_base 20: mod_base = OTHER; note = 2'-O-methyluridine-3'-phosphate
  modified_base 21: mod_base = OTHER; note = 2'-O-methylcytidine-3'- phosphorothioate
  modified_base 22: mod_base = OTHER; note = 2'-O-methyladenosine-3'- phosphorothioate
  modified_base 23: mod_base = OTHER; note = 2'-O-methylguanosine-3'-phosphate
ggaaaatgctgcaatattatcag

SEQ ID NO: 2212 - RNA, 21 nt, synthetic construct
  misc_feature 1..21: note = Description of Artificial Sequence: Synthetic oligonucleotide
  source 1..21: mol_type = other RNA
  modified_base 1: mod_base = OTHER; note = 2'-O-methyladenosine-3'- phosphorothioate
  modified_base 2: mod_base = OTHER; note = 2'-O-methyluridine-3'-phosphorothioate
  modified_base 3: mod_base = OTHER; note = 2'-O-methyladenosine-3'-phosphate
  modified_base 4: mod_base = OTHER; note = 2'-O-methyladenosine-3'-phosphate
  modified_base 5: mod_base = OTHER; note = 2'-O-methyluridine-3'-phosphate
  modified_base 6: mod_base = OTHER; note = 2'-O-methyladenosine-3'-phosphate
  modified_base 7: mod_base = OTHER; note = 2'-fluorouridine-3'-phosphate
  modified_base 8: mod_base = OTHER; note = 2'-O-methyluridine-3'-phosphate
  modified_base 9: mod_base = OTHER; note = 2'-fluoroguanosine-3'-phosphate
  modified_base 10: mod_base = OTHER; note = 2'-fluorocytidine-3'-phosphate
  modified_base 11: mod_base = OTHER; note = 2'-fluoroadenosine-3'-phosphate
  modified_base 12: mod_base = OTHER; note = 2'-O-methylguanosine-3'-phosphate
  modified_base 13: mod_base = OTHER; note = 2'-O-methylcytidine-3'-phosphate
  modified_base 14: mod_base = OTHER; note = 2'-O-methyladenosine-3'-phosphate
  modified_base 15: mod_base = OTHER; note = 2'-O-methyluridine-3'-phosphate
  modified_base 16: mod_base = OTHER; note = 2'-O-methyluridine-3'-phosphate
  modified_base 17: mod_base = OTHER; note = 2'-O-methyluridine-3'-phosphate
  modified_base 18: mod_base = OTHER; note = 2'-O-methyluridine-3'-phosphate
  modified_base 19: mod_base = OTHER; note = 2'-O-methylcytidine-3'-phosphate
  modified_base 20: mod_base = OTHER; note = 2'-O-methylcytidine-3'-phosphate
  modified_base 21: mod_base = OTHER; note = 2'-O-methyladenosine-3'-phosphate attached to N-[tris(N-acetylgalactosamine-alkyl)-amidodecanoyl)]-4-hydr oxyprolinol Hyp-(N-acetylgalactosamine-alkyl)3
ataatattgcagcattttcca

SEQ ID NO: 2213 - RNA, 23 nt, synthetic construct
  misc_feature 1..23: note = Description of Artificial Sequence: Synthetic oligonucleotide
  source 1..23: mol_type = other RNA
  modified_base 1: mod_base = OTHER; note = 2'-O-methyluridine-3'-phosphorothioate
  modified_base 2: mod_base = OTHER; note = 2'-fluoroguanosine-3'-phosphorothioate
  modified_base 3: mod_base = OTHER; note = 2'-O-methylguanosine-3'-phosphate
  modified_base 4: mod_base = OTHER; note = 2'-O-methyladenosine-3'-phosphate
  modified_base 5: mod_base = OTHER; note = 2'-O-methyladenosine-3'-phosphate
  modified_base 6: mod_base = OTHER; note = 2'-fluoroadenosine-3'-phosphate
  modified_base 7: mod_base = OTHER; note = 2'-O-methyladenosine-3'-phosphate
  modified_base 8: mod_base = OTHER; note = 2'-fluorouridine-3'-phosphate
  modified_base 9: mod_base = OTHER; note = 2'-fluoroguanosine-3'-phosphate
  modified_base 10: mod_base = OTHER; note = 2'-O-methylcytidine-3'-phosphate
  modified_base 11: mod_base = OTHER; note = 2'-O-methyluridine-3'-phosphate
  modified_base 12: mod_base = OTHER; note = 2'-O-methylguanosine-3'-phosphate
  modified_base 13: mod_base = OTHER; note = 2'-O-methylcytidine-3'-phosphate
  modified_base 14: mod_base = OTHER; note = 2'-fluoroadenosine-3'-phosphate
  modified_base 15: mod_base = OTHER; note = 2'-O-methyladenosine-3'-phosphate
  modified_base 16: mod_base = OTHER; note = 2'-fluorouridine-3'-phosphate
  modified_base 17: mod_base = OTHER; note = 2'-O-methyladenosine-3'-phosphate
  modified_base 18: mod_base = OTHER; note = 2'-O-methyluridine-3'-phosphate
  modified_base 19: mod_base = OTHER; note = 2'-O-methyluridine-3'-phosphate
  modified_base 20: mod_base = OTHER; note = 2'-O-methyladenosine-3'-phosphate
  modified_base 21: mod_base = OTHER; note = 2'-O-methyluridine-3'-phosphorothioate
  modified_base 22: mod_base = OTHER; note = 2'-O-methylcytidine-3'- phosphorothioate
  modified_base 23: mod_base = OTHER; note = 2'-O-methyladenosine-3'-phosphate
tggaaaatgctgcaatattatca

SEQ ID NO: 2214 - RNA, 21 nt, synthetic construct
  misc_feature 1..21: note = Description of Artificial Sequence: Synthetic oligonucleotide
  source 1..21: mol_type = other RNA
  modified_base 1: mod_base = OTHER; note = 2'-O-methylguanosine-3'- phosphorothioate
  modified_base 2: mod_base = OTHER; note = 2'-O-methylguanosine-3'- phosphorothioate
  modified_base 3: mod_base = OTHER; note = 2'-O-methylcytidine-3'-phosphate
  modified_base 4: mod_base = OTHER; note = 2'-O-methyluridine-3'-phosphate
  modified_base 5: mod_base = OTHER; note = 2'-O-methylguanosine-3'-phosphate
  modified_base 6: mod_base = OTHER; note = 2'-O-methyladenosine-3'-phosphate
  modified_base 7: mod_base = OTHER; note = 2'-fluorouridine-3'-phosphate
  modified_base 8: mod_base = OTHER; note = 2'-O-methyladenosine-3'-phosphate
  modified_base 9: mod_base = OTHER; note = 2'-fluoroadenosine-3'-phosphate
  modified_base 10: mod_base = OTHER; note = 2'-fluorouridine-3'-phosphate
  modified_base 11: mod_base = OTHER; note = 2'-fluoroadenosine-3'-phosphate
  modified_base 12: mod_base = OTHER; note = 2'-O-methyluridine-3'-phosphate
  modified_base 13: mod_base = OTHER; note = 2'-O-methyluridine-3'-phosphate
  modified_base 14: mod_base = OTHER; note = 2'-O-methylguanosine-3'-phosphate
  modified_base 15: mod_base = OTHER; note = 2'-O-methylcytidine-3'-phosphate
  modified_base 16: mod_base = OTHER; note = 2'-O-methyladenosine-3'-phosphate
  modified_base 17: mod_base = OTHER; note = 2'-O-methylguanosine-3'-phosphate
  modified_base 18: mod_base = OTHER; note = 2'-O-methylcytidine-3'-phosphate
  modified_base 19: mod_base = OTHER; note = 2'-O-methyladenosine-3'-phosphate
  modified_base 20: mod_base = OTHER; note = 2'-O-methyluridine-3'-phosphate
  modified_base 21: mod_base = OTHER; note = 2'-O-methyluridine-3'-phosphate attached to N-[tris(N-acetylgalactosamine-alkyl)-amidodecanoyl)]-4-hydr oxyprolinol Hyp-(N-acetylgalactosamine-alkyl)3
ggctgataatattgcagcatt

SEQ ID NO: 2215 - RNA, 23 nt, synthetic construct
  misc_feature 1..23: note = Description of Artificial Sequence: Synthetic oligonucleotide
  source 1..23: mol_type = other RNA
  modified_base 1: mod_base = OTHER; note = 2'-O-methyladenosine-3'- phosphorothioate
  modified_base 2: mod_base = OTHER; note = 2'-fluoroadenosine-3'-phosphorothioate
  modified_base 3: mod_base = OTHER; note = 2'-O-methyluridine-3'-phosphate
  modified_base 4: mod_base = OTHER; note = 2'-O-methylguanosine-3'-phosphate
  modified_base 5: mod_base = OTHER; note = 2'-O-methylcytidine-3'-phosphate
  modified_base 6: mod_base = OTHER; note = 2'-fluorouridine-3'-phosphate
  modified_base 7: mod_base = OTHER; note = 2'-O-methylguanosine-3'-phosphate
  modified_base 8: mod_base = OTHER; note = 2'-fluorocytidine-3'-phosphate
  modified_base 9: mod_base = OTHER; note = 2'-fluoroadenosine-3'-phosphate
  modified_base 10: mod_base = OTHER; note = 2'-O-methyladenosine-3'-phosphate
  modified_base 11: mod_base = OTHER; note = 2'-O-methyluridine-3'-phosphate
  modified_base 12: mod_base = OTHER; note = 2'-O-methyladenosine-3'-phosphate
  modified_base 13: mod_base = OTHER; note = 2'-O-methyluridine-3'-phosphate
  modified_base 14: mod_base = OTHER; note = 2'-fluorouridine-3'-phosphate
  modified_base 15: mod_base = OTHER; note = 2'-O-methyladenosine-3'-phosphate
  modified_base 16: mod_base = OTHER; note = 2'-fluorouridine-3'-phosphate
  modified_base 17: mod_base = OTHER; note = 2'-O-methylcytidine-3'-phosphate
  modified_base 18: mod_base = OTHER; note = 2'-O-methyladenosine-3'-phosphate
  modified_base 19: mod_base = OTHER; note = 2'-O-methylguanosine-3'-phosphate
  modified_base 20: mod_base = OTHER; note = 2'-O-methylcytidine-3'-phosphate
  modified_base 21: mod_base = OTHER; note = 2'-O-methylcytidine-3'- phosphorothioate
  modified_base 22: mod_base = OTHER; note = 2'-O-methyladenosine-3'- phosphorothioate
  modified_base 23: mod_base = OTHER; note = 2'-O-methyladenosine-3'-phosphate
aatgctgcaatattatcagccaa

SEQ ID NO: 2216 - RNA, 21 nt, synthetic construct
  misc_feature 1..21: note = Description of Artificial Sequence: Synthetic oligonucleotide
  source 1..21: mol_type = other RNA
  modified_base 1: mod_base = OTHER; note = 2'-O-methyluridine-3'-phosphorothioate
  modified_base 2: mod_base = OTHER; note = 2'-O-methylguanosine-3'- phosphorothioate
  modified_base 3: mod_base = OTHER; note = 2'-O-methylguanosine-3'-phosphate
  modified_base 4: mod_base = OTHER; note = 2'-O-methylcytidine-3'-phosphate
  modified_base 5: mod_base = OTHER; note = 2'-O-methyluridine-3'-phosphate
  modified_base 6: mod_base = OTHER; note = 2'-O-methylguanosine-3'-phosphate
  modified_base 7: mod_base = OTHER; note = 2'-fluoroadenosine-3'-phosphate
  modified_base 8: mod_base = OTHER; note = 2'-O-methyluridine-3'-phosphate
  modified_base 9: mod_base = OTHER; note = 2'-fluoroadenosine-3'-phosphate
  modified_base 10: mod_base = OTHER; note = 2'-fluoroadenosine-3'-phosphate
  modified_base 11: mod_base = OTHER; note = 2'-fluorouridine-3'-phosphate
  modified_base 12: mod_base = OTHER; note = 2'-O-methyladenosine-3'-phosphate
  modified_base 13: mod_base = OTHER; note = 2'-O-methyluridine-3'-phosphate
  modified_base 14: mod_base = OTHER; note = 2'-O-methyluridine-3'-phosphate
  modified_base 15: mod_base = OTHER; note = 2'-O-methylguanosine-3'-phosphate
  modified_base 16: mod_base = OTHER; note = 2'-O-methylcytidine-3'-phosphate
  modified_base 17: mod_base = OTHER; note = 2'-O-methyladenosine-3'-phosphate
  modified_base 18: mod_base = OTHER; note = 2'-O-methylguanosine-3'-phosphate
  modified_base 19: mod_base = OTHER; note = 2'-O-methylcytidine-3'-phosphate
  modified_base 20: mod_base = OTHER; note = 2'-O-methyladenosine-3'-phosphate
  modified_base 21: mod_base = OTHER; note = 2'-O-methyluridine-3'-phosphate attached to N-[tris(N-acetylgalactosamine-alkyl)-amidodecanoyl)]-4-hydr oxyprolinol Hyp-(N-acetylgalactosamine-alkyl)3
tggctgataatattgcagcat

SEQ ID NO: 2217 - RNA, 23 nt, synthetic construct
  misc_feature 1..23: note = Description of Artificial Sequence: Synthetic oligonucleotide
  source 1..23: mol_type = other RNA
  modified_base 1: mod_base = OTHER; note = 2'-O-methyladenosine-3'- phosphorothioate
  modified_base 2: mod_base = OTHER; note = 2'-fluorouridine -3'-phosphorothioate
  modified_base 3: mod_base = OTHER; note = 2'-O-methylguanosine-3'-phosphate
  modified_base 4: mod_base = OTHER; note = 2'-O-methylcytidine-3'-phosphate
  modified_base 5: mod_base = OTHER; note = 2'-O-methyluridine-3'-phosphate
  modified_base 6: mod_base = OTHER; note = 2'-fluoroguanosine-3'-phosphate
  modified_base 7: mod_base = OTHER; note = 2'-O-methylcytidine-3'-phosphate
  modified_base 8: mod_base = OTHER; note = 2'-fluoroadenosine-3'-phosphate
  modified_base 9: mod_base = OTHER; note = 2'-fluoroadenosine-3'-phosphate
  modified_base 10: mod_base = OTHER; note = 2'-O-methyluridine-3'-phosphate
  modified_base 11: mod_base = OTHER; note = 2'-O-methyladenosine-3'-phosphate
  modified_base 12: mod_base = OTHER; note = 2'-O-methyluridine-3'-phosphate
  modified_base 13: mod_base = OTHER; note = 2'-O-methyluridine-3'-phosphate
  modified_base 14: mod_base = OTHER; note = 2'-fluoroadenosine-3'-phosphate
  modified_base 15: mod_base = OTHER; note = 2'-O-methyluridine-3'-phosphate
  modified_base 16: mod_base = OTHER; note = 2'-fluorocytidine-3'-phosphate
  modified_base 17: mod_base = OTHER; note = 2'-O-methyladenosine-3'-phosphate
  modified_base 18: mod_base = OTHER; note = 2'-O-methylguanosine-3'-phosphate
  modified_base 19: mod_base = OTHER; note = 2'-O-methylcytidine-3'-phosphate
  modified_base 20: mod_base = OTHER; note = 2'-O-methylcytidine-3'-phosphate
  modified_base 21: mod_base = OTHER; note = 2'-O-methyladenosine-3'- phosphorothioate
  modified_base 22: mod_base = OTHER; note = 2'-O-methyladenosine-3'- phosphorothioate
  modified_base 23: mod_base = OTHER; note = 2'-O-methyladenosine-3'-phosphate
atgctgcaatattatcagccaaa

SEQ ID NO: 2218 - RNA, 21 nt, synthetic construct
  misc_feature 1..21: note = Description of Artificial Sequence: Synthetic oligonucleotide
  source 1..21: mol_type = other RNA
  modified_base 1: mod_base = OTHER; note = 2'-O-methylguanosine-3'- phosphorothioate
  modified_base 2: mod_base = OTHER; note = 2'-O-methylcytidine-3'- phosphorothioate
  modified_base 3: mod_base = OTHER; note = 2'-O-methyluridine-3'-phosphate
  modified_base 4: mod_base = OTHER; note = 2'-O-methyladenosine-3'-phosphate
  modified_base 5: mod_base = OTHER; note = 2'-O-methyladenosine-3'-phosphate
  modified_base 6: mod_base = OTHER; note = 2'-O-methyluridine-3'-phosphate
  modified_base 7: mod_base = OTHER; note = 2'-fluorouridine-3'-phosphate
  modified_base 8: mod_base = OTHER; note = 2'-O-methyluridine-3'-phosphate
  modified_base 9: mod_base = OTHER; note = 2'-fluoroguanosine-3'-phosphate
  modified_base 10: mod_base = OTHER; note = 2'-fluorouridine-3'-phosphate
  modified_base 11: mod_base = OTHER; note = 2'-fluoroadenosine-3'-phosphate
  modified_base 12: mod_base = OTHER; note = 2'-O-methyluridine-3'-phosphate
  modified_base 13: mod_base = OTHER; note = 2'-O-methylcytidine-3'-phosphate
  modified_base 14: mod_base = OTHER; note = 2'-O-methyladenosine-3'-phosphate
  modified_base 15: mod_base = OTHER; note = 2'-O-methyladenosine-3'-phosphate
  modified_base 16: mod_base = OTHER; note = 2'-O-methyluridine-3'-phosphate
  modified_base 17: mod_base = OTHER; note = 2'-O-methylguanosine-3'-phosphate
  modified_base 18: mod_base = OTHER; note = 2'-O-methyladenosine-3'-phosphate
  modified_base 19: mod_base = OTHER; note = 2'-O-methyluridine-3'-phosphate
  modified_base 20: mod_base = OTHER; note = 2'-O-methyluridine-3'-phosphate
  modified_base 21: mod_base = OTHER; note = 2'-O-methyladenosine-3'-phosphate attached to N-[tris(N-acetylgalactosamine-alkyl)-amidodecanoyl)]-4-hydr oxyprolinol Hyp-(N-acetylgalactosamine-alkyl)3
gctaatttgtatcaatgatta

SEQ ID NO: 2219 - RNA, 23 nt, synthetic construct
  misc_feature 1..23: note = Description of Artificial Sequence: Synthetic oligonucleotide
  source 1..23: mol_type = other RNA
  modified_base 1: mod_base = OTHER; note = 2'-O-methyluridine-3'-phosphorothioate
  modified_base 2: mod_base = OTHER; note = 2'-fluoroadenosine-3'-phosphorothioate
  modified_base 3: mod_base = OTHER; note = 2'-O-methyladenosine-3'-phosphate
  modified_base 4: mod_base = OTHER; note = 2'-O-methyluridine-3'-phosphate
  modified_base 5: mod_base = OTHER; note = 2'-O-methylcytidine-3'-phosphate
  modified_base 6: mod_base = OTHER; note = 2'-fluoroadenosine-3'-phosphate
  modified_base 7: mod_base = OTHER; note = 2'-O-methyluridine-3'-phosphate
  modified_base 8: mod_base = OTHER; note = 2'-fluorouridine-3'-phosphate
  modified_base 9: mod_base = OTHER; note = 2'-fluoroguanosine-3'-phosphate
  modified_base 10: mod_base = OTHER; note = 2'-O-methyladenosine-3'-phosphate
  modified_base 11: mod_base = OTHER; note = 2'-O-methyluridine-3'-phosphate
  modified_base 12: mod_base = OTHER; note = 2'-O-methyladenosine-3'-phosphate
  modified_base 13: mod_base = OTHER; note = 2'-O-methylcytidine-3'-phosphate
  modified_base 14: mod_base = OTHER; note = 2'-fluoroadenosine-3'-phosphate
  modified_base 15: mod_base = OTHER; note = 2'-O-methyladenosine-3'-phosphate
  modified_base 16: mod_base = OTHER; note = 2'-fluoroadenosine-3'-phosphate
  modified_base 17: mod_base = OTHER; note = 2'-O-methyluridine-3'-phosphate
  modified_base 18: mod_base = OTHER; note = 2'-O-methyluridine-3'-phosphate
  modified_base 19: mod_base = OTHER; note = 2'-O-methyladenosine-3'-phosphate
  modified_base 20: mod_base = OTHER; note = 2'-O-methylguanosine-3'-phosphate
  modified_base 21: mod_base = OTHER; note = 2'-O-methylcytidine-3'- phosphorothioate
  modified_base 22: mod_base = OTHER; note = 2'-O-methylcytidine-3'- phosphorothioate
  modified_base 23: mod_base = OTHER; note = 2'-O-methylguanosine-3'-phosphate
taatcattgatacaaattagccg

SEQ ID NO: 2220 - RNA, 21 nt, synthetic construct
  misc_feature 1..21: note = Description of Artificial Sequence: Synthetic oligonucleotide
  source 1..21: mol_type = other RNA
  modified_base 1: mod_base = OTHER; note = 2'-O-methylcytidine-3'- phosphorothioate
  modified_base 2: mod_base = OTHER; note = 2'-O-methyluridine-3'-phosphorothioate
  modified_base 3: mod_base = OTHER; note = 2'-O-methyladenosine-3'-phosphate
  modified_base 4: mod_base = OTHER; note = 2'-O-methyladenosine-3'-phosphate
  modified_base 5: mod_base = OTHER; note = 2'-O-methyluridine-3'-phosphate
  modified_base 6: mod_base = OTHER; note = 2'-O-methyluridine-3'-phosphate
  modified_base 7: mod_base = OTHER; note = 2'-fluorouridine-3'-phosphate
  modified_base 8: mod_base = OTHER; note = 2'-O-methylguanosine-3'-phosphate
  modified_base 9: mod_base = OTHER; note = 2'-fluorouridine-3'-phosphate
  modified_base 10: mod_base = OTHER; note = 2'-fluoroadenosine-3'-phosphate
  modified_base 11: mod_base = OTHER; note = 2'-fluorouridine-3'-phosphate
  modified_base 12: mod_base = OTHER; note = 2'-O-methylcytidine-3'-phosphate
  modified_base 13: mod_base = OTHER; note = 2'-O-methyladenosine-3'-phosphate
  modified_base 14: mod_base = OTHER; note = 2'-O-methyladenosine-3'-phosphate
  modified_base 15: mod_base = OTHER; note = 2'-O-methyluridine-3'-phosphate
  modified_base 16: mod_base = OTHER; note = 2'-O-methylguanosine-3'-phosphate
  modified_base 17: mod_base = OTHER; note = 2'-O-methyladenosine-3'-phosphate
  modified_base 18: mod_base = OTHER; note = 2'-O-methyluridine-3'-phosphate
  modified_base 19: mod_base = OTHER; note = 2'-O-methyluridine-3'-phosphate
  modified_base 20: mod_base = OTHER; note = 2'-O-methyladenosine-3'-phosphate
  modified_base 21: mod_base = OTHER; note = 2'-O-methyluridine-3'-phosphate attached to N-[tris(N-acetylgalactosamine-alkyl)-amidodecanoyl)]-4-hydr oxyprolinol Hyp-(N-acetylgalactosamine-alkyl)3
ctaatttgtatcaatgattat

SEQ ID NO: 2221 - RNA, 23 nt, synthetic construct
  misc_feature 1..23: note = Description of Artificial Sequence: Synthetic oligonucleotide
  source 1..23: mol_type = other RNA
  modified_base 1: mod_base = OTHER; note = 2'-O-methyladenosine-3'- phosphorothioate
  modified_base 2: mod_base = OTHER; note = 2'-fluorouridine -3'-phosphorothioate
  modified_base 3: mod_base = OTHER; note = 2'-O-methyladenosine-3'-phosphate
  modified_base 4: mod_base = OTHER; note = 2'-O-methyladenosine-3'-phosphate
  modified_base 5: mod_base = OTHER; note = 2'-O-methyluridine-3'-phosphate
  modified_base 6: mod_base = OTHER; note = 2'-fluorocytidine-3'-phosphate
  modified_base 7: mod_base = OTHER; note = 2'-O-methyladenosine-3'-phosphate
  modified_base 8: mod_base = OTHER; note = 2'-fluorouridine-3'-phosphate
  modified_base 9: mod_base = OTHER; note = 2'-fluorouridine-3'-phosphate
  modified_base 10: mod_base = OTHER; note = 2'-O-methylguanosine-3'-phosphate
  modified_base 11: mod_base = OTHER; note = 2'-O-methyladenosine-3'-phosphate
  modified_base 12: mod_base = OTHER; note = 2'-O-methyluridine-3'-phosphate
  modified_base 13: mod_base = OTHER; note = 2'-O-methyladenosine-3'-phosphate
  modified_base 14: mod_base = OTHER; note = 2'-fluorocytidine-3'-phosphate
  modified_base 15: mod_base = OTHER; note = 2'-O-methyladenosine-3'-phosphate
  modified_base 16: mod_base = OTHER; note = 2'-fluoroadenosine-3'-phosphate
  modified_base 17: mod_base = OTHER; note = 2'-O-methyladenosine-3'-phosphate
  modified_base 18: mod_base = OTHER; note = 2'-O-methyluridine-3'-phosphate
  modified_base 19: mod_base = OTHER; note = 2'-O-methyluridine-3'-phosphate
  modified_base 20: mod_base = OTHER; note = 2'-O-methyladenosine-3'-phosphate
  modified_base 21: mod_base = OTHER; note = 2'-O-methylguanosine-3'- phosphorothioate
  modified_base 22: mod_base = OTHER; note = 2'-O-methylcytidine-3'- phosphorothioate
  modified_base 23: mod_base = OTHER; note = 2'-O-methylcytidine-3'-phosphate
ataatcattgatacaaattagcc

SEQ ID NO: 2222 - RNA, 21 nt, synthetic construct
  misc_feature 1..21: note = Description of Artificial Sequence: Synthetic oligonucleotide
  source 1..21: mol_type = other RNA
  modified_base 1: mod_base = OTHER; note = 2'-O-methylcytidine-3'- phosphorothioate
  modified_base 2: mod_base = OTHER; note = 2'-O-methylcytidine-3'- phosphorothioate
  modified_base 3: mod_base = OTHER; note = 2'-O-methylcytidine-3'-phosphate
  modified_base 4: mod_base = OTHER; note = 2'-O-methylguanosine-3'-phosphate
  modified_base 5: mod_base = OTHER; note = 2'-O-methylguanosine-3'-phosphate
  modified_base 6: mod_base = OTHER; note = 2'-O-methylcytidine-3'-phosphate
  modified_base 7: mod_base = OTHER; note = 2'-fluorouridine-3'-phosphate
  modified_base 8: mod_base = OTHER; note = 2'-O-methyladenosine-3'-phosphate
  modified_base 9: mod_base = OTHER; note = 2'-fluoroadenosine-3'-phosphate
  modified_base 10: mod_base = OTHER; note = 2'-fluorouridine-3'-phosphate
  modified_base 11: mod_base = OTHER; note = 2'-fluorouridine-3'-phosphate
  modified_base 12: mod_base = OTHER; note = 2'-O-methyluridine-3'-phosphate
  modified_base 13: mod_base = OTHER; note = 2'-O-methylguanosine-3'-phosphate
  modified_base 14: mod_base = OTHER; note = 2'-O-methyluridine-3'-phosphate
  modified_base 15: mod_base = OTHER; note = 2'-O-methyladenosine-3'-phosphate
  modified_base 16: mod_base = OTHER; note = 2'-O-methyluridine-3'-phosphate
  modified_base 17: mod_base = OTHER; note = 2'-O-methylcytidine-3'-phosphate
  modified_base 18: mod_base = OTHER; note = 2'-O-methyladenosine-3'-phosphate
  modified_base 19: mod_base = OTHER; note = 2'-O-methyladenosine-3'-phosphate
  modified_base 20: mod_base = OTHER; note = 2'-O-methyluridine-3'-phosphate
  modified_base 21: mod_base = OTHER; note = 2'-O-methylguanosine-3'-phosphate attached to N-[tris(N-acetylgalactosamine-alkyl)-amidodecanoyl)]-4-hydr oxyprolinol Hyp-(N-acetylgalactosamine-alkyl)3
cccggctaatttgtatcaatg

SEQ ID NO: 2223 - RNA, 23 nt, synthetic construct
  misc_feature 1..23: note = Description of Artificial Sequence: Synthetic oligonucleotide
  source 1..23: mol_type = other RNA
  modified_base 1: mod_base = OTHER; note = 2'-O-methylcytidine-3'- phosphorothioate
  modified_base 2: mod_base = OTHER; note = 2'-fluoroadenosine-3'-phosphorothioate
  modified_base 3: mod_base = OTHER; note = 2'-O-methyluridine-3'-phosphate
  modified_base 4: mod_base = OTHER; note = 2'-O-methyluridine-3'-phosphate
  modified_base 5: mod_base = OTHER; note = 2'-O-methylguanosine-3'-phosphate
  modified_base 6: mod_base = OTHER; note = 2'-fluoroadenosine-3'-phosphate
  modified_base 7: mod_base = OTHER; note = 2'-O-methyluridine-3'-phosphate
  modified_base 8: mod_base = OTHER; note = 2'-fluoroadenosine-3'-phosphate
  modified_base 9: mod_base = OTHER; note = 2'-fluorocytidine-3'-phosphate
  modified_base 10: mod_base = OTHER; note = 2'-O-methyladenosine-3'-phosphate
  modified_base 11: mod_base = OTHER; note = 2'-O-methyladenosine-3'-phosphate
  modified_base 12: mod_base = OTHER; note = 2'-O-methyladenosine-3'-phosphate
  modified_base 13: mod_base = OTHER; note = 2'-O-methyluridine-3'-phosphate
  modified_base 14: mod_base = OTHER; note = 2'-fluorouridine-3'-phosphate
  modified_base 15: mod_base = OTHER; note = 2'-O-methyladenosine-3'-phosphate
  modified_base 16: mod_base = OTHER; note = 2'-fluoroguanosine-3'-phosphate
  modified_base 17: mod_base = OTHER; note = 2'-O-methylcytidine-3'-phosphate
  modified_base 18: mod_base = OTHER; note = 2'-O-methylcytidine-3'-phosphate
  modified_base 19: mod_base = OTHER; note = 2'-O-methylguanosine-3'-phosphate
  modified_base 20: mod_base = OTHER; note = 2'-O-methylguanosine-3'-phosphate
  modified_base 21: mod_base = OTHER; note = 2'-O-methylguanosine-3'- phosphorothioate
  modified_base 22: mod_base = OTHER; note = 2'-O-methylguanosine-3'- phosphorothioate
  modified_base 23: mod_base = OTHER; note = 2'-O-methylguanosine-3'-phosphate
cattgatacaaattagccggggg

SEQ ID NO: 2224 - RNA, 21 nt, synthetic construct
  misc_feature 1..21: note = Description of Artificial Sequence: Synthetic oligonucleotide
  source 1..21: mol_type = other RNA
  modified_base 1: mod_base = OTHER; note = 2'-O-methylcytidine-3'- phosphorothioate
  modified_base 2: mod_base = OTHER; note = 2'-O-methylcytidine-3'- phosphorothioate
  modified_base 3: mod_base = OTHER; note = 2'-O-methylcytidine-3'-phosphate
  modified_base 4: mod_base = OTHER; note = 2'-O-methylcytidine-3'-phosphate
  modified_base 5: mod_base = OTHER; note = 2'-O-methylguanosine-3'-phosphate
  modified_base 6: mod_base = OTHER; note = 2'-O-methylguanosine-3'-phosphate
  modified_base 7: mod_base = OTHER; note = 2'-fluorocytidine-3'-phosphate
  modified_base 8: mod_base = OTHER; note = 2'-O-methyluridine-3'-phosphate
  modified_base 9: mod_base = OTHER; note = 2'-fluoroadenosine-3'-phosphate
  modified_base 10: mod_base = OTHER; note = 2'-fluoroadenosine-3'-phosphate
  modified_base 11: mod_base = OTHER; note = 2'-fluorouridine-3'-phosphate
  modified_base 12: mod_base = OTHER; note = 2'-O-methyluridine-3'-phosphate
  modified_base 13: mod_base = OTHER; note = 2'-O-methyluridine-3'-phosphate
  modified_base 14: mod_base = OTHER; note = 2'-O-methylguanosine-3'-phosphate
  modified_base 15: mod_base = OTHER; note = 2'-O-methyluridine-3'-phosphate
  modified_base 16: mod_base = OTHER; note = 2'-O-methyladenosine-3'-phosphate
  modified_base 17: mod_base = OTHER; note = 2'-O-methyluridine-3'-phosphate
  modified_base 18: mod_base = OTHER; note = 2'-O-methylcytidine-3'-phosphate
  modified_base 19: mod_base = OTHER; note = 2'-O-methyladenosine-3'-phosphate
  modified_base 20: mod_base = OTHER; note = 2'-O-methyladenosine-3'-phosphate
  modified_base 21: mod_base = OTHER; note = 2'-O-methyluridine-3'-phosphate attached to N-[tris(N-acetylgalactosamine-alkyl)-amidodecanoyl)]-4-hydr oxyprolinol Hyp-(N-acetylgalactosamine-alkyl)3
ccccggctaatttgtatcaat

SEQ ID NO: 2225 - RNA, 23 nt, synthetic construct
  misc_feature 1..23: note = Description of Artificial Sequence: Synthetic oligonucleotide
  source 1..23: mol_type = other RNA
  modified_base 1: mod_base = OTHER; note = 2'-O-methyladenosine-3'- phosphorothioate
  modified_base 2: mod_base = OTHER; note = 2'-fluorouridine -3'-phosphorothioate
  modified_base 3: mod_base = OTHER; note = 2'-O-methyluridine-3'-phosphate
  modified_base 4: mod_base = OTHER; note = 2'-O-methylguanosine-3'-phosphate
  modified_base 5: mod_base = OTHER; note = 2'-O-methyladenosine-3'-phosphate
  modified_base 6: mod_base = OTHER; note = 2'-fluorouridine-3'-phosphate
  modified_base 7: mod_base = OTHER; note = 2'-O-methyladenosine-3'-phosphate
  modified_base 8: mod_base = OTHER; note = 2'-fluorocytidine-3'-phosphate
  modified_base 9: mod_base = OTHER; note = 2'-fluoroadenosine-3'-phosphate
  modified_base 10: mod_base = OTHER; note = 2'-O-methyladenosine-3'-phosphate
  modified_base 11: mod_base = OTHER; note = 2'-O-methyladenosine-3'-phosphate
  modified_base 12: mod_base = OTHER; note = 2'-O-methyluridine-3'-phosphate
  modified_base 13: mod_base = OTHER; note = 2'-O-methyluridine-3'-phosphate
  modified_base 14: mod_base = OTHER; note = 2'-fluoroadenosine-3'-phosphate
  modified_base 15: mod_base = OTHER; note = 2'-O-methylguanosine-3'-phosphate
  modified_base 16: mod_base = OTHER; note = 2'-fluorocytidine-3'-phosphate
  modified_base 17: mod_base = OTHER; note = 2'-O-methylcytidine-3'-phosphate
  modified_base 18: mod_base = OTHER; note = 2'-O-methylguanosine-3'-phosphate
  modified_base 19: mod_base = OTHER; note = 2'-O-methylguanosine-3'-phosphate
  modified_base 20: mod_base = OTHER; note = 2'-O-methylguanosine-3'-phosphate
  modified_base 21: mod_base = OTHER; note = 2'-O-methylguanosine-3'- phosphorothioate
  modified_base 22: mod_base = OTHER; note = 2'-O-methylguanosine-3'- phosphorothioate
  modified_base 23: mod_base = OTHER; note = 2'-O-methyladenosine-3'-phosphate
attgatacaaattagccggggga

SEQ ID NO: 2226 - RNA, 21 nt, synthetic construct
  misc_feature 1..21: note = Description of Artificial Sequence: Synthetic oligonucleotide
  source 1..21: mol_type = other RNA
  modified_base 1: mod_base = OTHER; note = 2'-O-methyluridine-3'-phosphorothioate
  modified_base 2: mod_base = OTHER; note = 2'-O-methyladenosine-3'- phosphorothioate
  modified_base 3: mod_base = OTHER; note = 2'-O-methyladenosine-3'-phosphate
  modified_base 4: mod_base = OTHER; note = 2'-O-methyluridine-3'-phosphate
  modified_base 5: mod_base = OTHER; note = 2'-O-methyluridine-3'-phosphate
  modified_base 6: mod_base = OTHER; note = 2'-O-methylguanosine-3'-phosphate
  modified_base 7: mod_base = OTHER; note = 2'-fluoroguanosine-3'-phosphate
  modified_base 8: mod_base = OTHER; note = 2'-O-methyluridine-3'-phosphate
  modified_base 9: mod_base = OTHER; note = 2'-fluoroguanosine-3'-phosphate
  modified_base 10: mod_base = OTHER; note = 2'-fluoroadenosine-3'-phosphate
  modified_base 11: mod_base = OTHER; note = 2'-fluorouridine-3'-phosphate
  modified_base 12: mod_base = OTHER; note = 2'-O-methyladenosine-3'-phosphate
  modified_base 13: mod_base = OTHER; note = 2'-O-methylcytidine-3'-phosphate
  modified_base 14: mod_base = OTHER; note = 2'-O-methyluridine-3'-phosphate
  modified_base 15: mod_base = OTHER; note = 2'-O-methyluridine-3'-phosphate
  modified_base 16: mod_base = OTHER; note = 2'-O-methylcytidine-3'-phosphate
  modified_base 17: mod_base = OTHER; note = 2'-O-methyluridine-3'-phosphate
  modified_base 18: mod_base = OTHER; note = 2'-O-methyluridine-3'-phosphate
  modified_base 19: mod_base = OTHER; note = 2'-O-methyluridine-3'-phosphate
  modified_base 20: mod_base = OTHER; note = 2'-O-methylguanosine-3'-phosphate
  modified_base 21: mod_base = OTHER; note = 2'-O-methyladenosine-3'-phosphate attached to N-[tris(N-acetylgalactosamine-alkyl)-amidodecanoyl)]-4-hydr oxyprolinol Hyp-(N-acetylgalactosamine-alkyl)3
taattggtgatacttctttga

SEQ ID NO: 2227 - RNA, 23 nt, synthetic construct
  misc_feature 1..23: note = Description of Artificial Sequence: Synthetic oligonucleotide
  source 1..23: mol_type = other RNA
  modified_base 1: mod_base = OTHER; note = 2'-O-methyluridine-3'-phosphorothioate
  modified_base 2: mod_base = OTHER; note = 2'-fluorocytidine-3'-phosphorothioate
  modified_base 3: mod_base = OTHER; note = 2'-O-methyladenosine-3'-phosphate
  modified_base 4: mod_base = OTHER; note = 2'-O-methyladenosine-3'-phosphate
  modified_base 5: mod_base = OTHER; note = 2'-O-methyladenosine-3'-phosphate
  modified_base 6: mod_base = OTHER; note = 2'-fluoroguanosine-3'-phosphate
  modified_base 7: mod_base = OTHER; note = 2'-O-methyladenosine-3'-phosphate
  modified_base 8: mod_base = OTHER; note = 2'-fluoroadenosine-3'-phosphate
  modified_base 9: mod_base = OTHER; note = 2'-fluoroguanosine-3'-phosphate
  modified_base 10: mod_base = OTHER; note = 2'-O-methyluridine-3'-phosphate
  modified_base 11: mod_base = OTHER; note = 2'-O-methyladenosine-3'-phosphate
  modified_base 12: mod_base = OTHER; note = 2'-O-methyluridine-3'-phosphate
  modified_base 13: mod_base = OTHER; note = 2'-O-methylcytidine-3'-phosphate
  modified_base 14: mod_base = OTHER; note = 2'-fluoroadenosine-3'-phosphate
  modified_base 15: mod_base = OTHER; note = 2'-O-methylcytidine-3'-phosphate
  modified_base 16: mod_base = OTHER; note = 2'-fluorocytidine-3'-phosphate
  modified_base 17: mod_base = OTHER; note = 2'-O-methyladenosine-3'-phosphate
  modified_base 18: mod_base = OTHER; note = 2'-O-methyladenosine-3'-phosphate
  modified_base 19: mod_base = OTHER; note = 2'-O-methyluridine-3'-phosphate
  modified_base 20: mod_base = OTHER; note = 2'-O-methyluridine-3'-phosphate
  modified_base 21: mod_base = OTHER; note = 2'-O-methyladenosine-3'- phosphorothioate
  modified_base 22: mod_base = OTHER; note = 2'-O-methylcytidine-3'- phosphorothioate
  modified_base 23: mod_base = OTHER; note = 2'-O-methylcytidine-3'-phosphate
tcaaagaagtatcaccaattacc

SEQ ID NO: 2228 - RNA, 21 nt, synthetic construct
  misc_feature 1..21: note = Description of Artificial Sequence: Synthetic oligonucleotide
  source 1..21: mol_type = other RNA
  modified_base 1: mod_base = OTHER; note = 2'-O-methyladenosine-3'- phosphorothioate
  modified_base 2: mod_base = OTHER; note = 2'-O-methyladenosine-3'- phosphorothioate
  modified_base 3: mod_base = OTHER; note = 2'-O-methyluridine-3'-phosphate
  modified_base 4: mod_base = OTHER; note = 2'-O-methyluridine-3'-phosphate
  modified_base 5: mod_base = OTHER; note = 2'-O-methylguanosine-3'-phosphate
  modified_base 6: mod_base = OTHER; note = 2'-O-methylguanosine-3'-phosphate
  modified_base 7: mod_base = OTHER; note = 2'-fluorouridine-3'-phosphate
  modified_base 8: mod_base = OTHER; note = 2'-O-methylguanosine-3'-phosphate
  modified_base 9: mod_base = OTHER; note = 2'-fluoroadenosine-3'-phosphate
  modified_base 10: mod_base = OTHER; note = 2'-fluorouridine-3'-phosphate
  modified_base 11: mod_base = OTHER; note = 2'-fluoroadenosine-3'-phosphate
  modified_base 12: mod_base = OTHER; note = 2'-O-methylcytidine-3'-phosphate
  modified_base 13: mod_base = OTHER; note = 2'-O-methyluridine-3'-phosphate
  modified_base 14: mod_base = OTHER; note = 2'-O-methyluridine-3'-phosphate
  modified_base 15: mod_base = OTHER; note = 2'-O-methylcytidine-3'-phosphate
  modified_base 16: mod_base = OTHER; note = 2'-O-methyluridine-3'-phosphate
  modified_base 17: mod_base = OTHER; note = 2'-O-methyluridine-3'-phosphate
  modified_base 18: mod_base = OTHER; note = 2'-O-methyluridine-3'-phosphate
  modified_base 19: mod_base = OTHER; note = 2'-O-methylguanosine-3'-phosphate
  modified_base 20: mod_base = OTHER; note = 2'-O-methyladenosine-3'-phosphate
  modified_base 21: mod_base = OTHER; note = 2'-O-methyladenosine-3'-phosphate attached to N-[tris(N-acetylgalactosamine-alkyl)-amidodecanoyl)]-4-hydr oxyprolinol Hyp-(N-acetylgalactosamine-alkyl)3
aattggtgatacttctttgaa

SEQ ID NO: 2229 - RNA, 23 nt, synthetic construct
  misc_feature 1..23: note = Description of Artificial Sequence: Synthetic oligonucleotide
  source 1..23: mol_type = other RNA
  modified_base 1: mod_base = OTHER; note = 2'-O-methyluridine-3'-phosphorothioate
  modified_base 2: mod_base = OTHER; note = 2'-fluorouridine -3'-phosphorothioate
  modified_base 3: mod_base = OTHER; note = 2'-O-methylcytidine-3'-phosphate
  modified_base 4: mod_base = OTHER; note = 2'-O-methyladenosine-3'-phosphate
  modified_base 5: mod_base = OTHER; note = 2'-O-methyladenosine-3'-phosphate
  modified_base 6: mod_base = OTHER; note = 2'-fluoroadenosine-3'-phosphate
  modified_base 7: mod_base = OTHER; note = 2'-O-methylguanosine-3'-phosphate
  modified_base 8: mod_base = OTHER; note = 2'-fluoroadenosine-3'-phosphate
  modified_base 9: mod_base = OTHER; note = 2'-fluoroadenosine-3'-phosphate
  modified_base 10: mod_base = OTHER; note = 2'-O-methylguanosine-3'-phosphate
  modified_base 11: mod_base = OTHER; note = 2'-O-methyluridine-3'-phosphate
  modified_base 12: mod_base = OTHER; note = 2'-O-methyladenosine-3'-phosphate
  modified_base 13: mod_base = OTHER; note = 2'-O-methyluridine-3'-phosphate
  modified_base 14: mod_base = OTHER; note = 2'-fluorocytidine-3'-phosphate
  modified_base 15: mod_base = OTHER; note = 2'-O-methyladenosine-3'-phosphate
  modified_base 16: mod_base = OTHER; note = 2'-fluorocytidine-3'-phosphate
  modified_base 17: mod_base = OTHER; note = 2'-O-methylcytidine-3'-phosphate
  modified_base 18: mod_base = OTHER; note = 2'-O-methyladenosine-3'-phosphate
  modified_base 19: mod_base = OTHER; note = 2'-O-methyladenosine-3'-phosphate
  modified_base 20: mod_base = OTHER; note = 2'-O-methyluridine-3'-phosphate
  modified_base 21: mod_base = OTHER; note = 2'-O-methyluridine-3'-phosphorothioate
  modified_base 22: mod_base = OTHER; note = 2'-O-methyladenosine-3'- phosphorothioate
  modified_base 23: mod_base = OTHER; note = 2'-O-methylcytidine-3'-phosphate
ttcaaagaagtatcaccaattac

SEQ ID NO: 2230 - RNA, 21 nt, synthetic construct
  misc_feature 1..21: note = Description of Artificial Sequence: Synthetic oligonucleotide
  source 1..21: mol_type = other RNA
  modified_base 1: mod_base = OTHER; note = 2'-O-methylguanosine-3'- phosphorothioate
  modified_base 2: mod_base = OTHER; note = 2'-O-methylcytidine-3'- phosphorothioate
  modified_base 3: mod_base = OTHER; note = 2'-O-methylguanosine-3'-phosphate
  modified_base 4: mod_base = OTHER; note = 2'-O-methylguanosine-3'-phosphate
  modified_base 5: mod_base = OTHER; note = 2'-O-methyluridine-3'-phosphate
  modified_base 6: mod_base = OTHER; note = 2'-O-methyladenosine-3'-phosphate
  modified_base 7: mod_base = OTHER; note = 2'-fluoroadenosine-3'-phosphate
  modified_base 8: mod_base = OTHER; note = 2'-O-methyluridine-3'-phosphate
  modified_base 9: mod_base = OTHER; note = 2'-fluorouridine-3'-phosphate
  modified_base 10: mod_base = OTHER; note = 2'-fluoroguanosine-3'-phosphate
  modified_base 11: mod_base = OTHER; note = 2'-fluoroguanosine-3'-phosphate
  modified_base 12: mod_base = OTHER; note = 2'-O-methyluridine-3'-phosphate
  modified_base 13: mod_base = OTHER; note = 2'-O-methylguanosine-3'-phosphate
  modified_base 14: mod_base = OTHER; note = 2'-O-methyladenosine-3'-phosphate
  modified_base 15: mod_base = OTHER; note = 2'-O-methyluridine-3'-phosphate
  modified_base 16: mod_base = OTHER; note = 2'-O-methyladenosine-3'-phosphate
  modified_base 17: mod_base = OTHER; note = 2'-O-methylcytidine-3'-phosphate
  modified_base 18: mod_base = OTHER; note = 2'-O-methyluridine-3'-phosphate
  modified_base 19: mod_base = OTHER; note = 2'-O-methyluridine-3'-phosphate
  modified_base 20: mod_base = OTHER; note = 2'-O-methylcytidine-3'-phosphate
  modified_base 21: mod_base = OTHER; note = 2'-O-methyluridine-3'-phosphate attached to N-[tris(N-acetylgalactosamine-alkyl)-amidodecanoyl)]-4-hydr oxyprolinol Hyp-(N-acetylgalactosamine-alkyl)3
gcggtaattggtgatacttct

SEQ ID NO: 2231 - RNA, 23 nt, synthetic construct
  misc_feature 1..23: note = Description of Artificial Sequence: Synthetic oligonucleotide
  source 1..23: mol_type = other RNA
  modified_base 1: mod_base = OTHER; note = 2'-O-methyladenosine-3'- phosphorothioate
  modified_base 2: mod_base = OTHER; note = 2'-fluoroguanosine-3'-phosphorothioate
  modified_base 3: mod_base = OTHER; note = 2'-O-methyladenosine-3'-phosphate
  modified_base 4: mod_base = OTHER; note = 2'-O-methyladenosine-3'-phosphate
  modified_base 5: mod_base = OTHER; note = 2'-O-methylguanosine-3'-phosphate
  modified_base 6: mod_base = OTHER; note = 2'-fluorouridine-3'-phosphate
  modified_base 7: mod_base = OTHER; note = 2'-O-methyladenosine-3'-phosphate
  modified_base 8: mod_base = OTHER; note = 2'-fluorouridine-3'-phosphate
  modified_base 9: mod_base = OTHER; note = 2'-fluorocytidine-3'-phosphate
  modified_base 10: mod_base = OTHER; note = 2'-O-methyladenosine-3'-phosphate
  modified_base 11: mod_base = OTHER; note = 2'-O-methylcytidine-3'-phosphate
  modified_base 12: mod_base = OTHER; note = 2'-O-methylcytidine-3'-phosphate
  modified_base 13: mod_base = OTHER; note = 2'-O-methyladenosine-3'-phosphate
  modified_base 14: mod_base = OTHER; note = 2'-fluoroadenosine-3'-phosphate
  modified_base 15: mod_base = OTHER; note = 2'-O-methyluridine-3'-phosphate
  modified_base 16: mod_base = OTHER; note = 2'-fluorouridine-3'-phosphate
  modified_base 17: mod_base = OTHER; note = 2'-O-methyladenosine-3'-phosphate
  modified_base 18: mod_base = OTHER; note = 2'-O-methylcytidine-3'-phosphate
  modified_base 19: mod_base = OTHER; note = 2'-O-methylcytidine-3'-phosphate
  modified_base 20: mod_base = OTHER; note = 2'-O-methylguanosine-3'-phosphate
  modified_base 21: mod_base = OTHER; note = 2'-O-methylcytidine-3'- phosphorothioate
  modified_base 22: mod_base = OTHER; note = 2'-O-methylcytidine-3'- phosphorothioate
  modified_base 23: mod_base = OTHER; note = 2'-O-methyladenosine-3'-phosphate
agaagtatcaccaattaccgcca

SEQ ID NO: 2232 - RNA, 21 nt, synthetic construct
  misc_feature 1..21: note = Description of Artificial Sequence: Synthetic oligonucleotide
  source 1..21: mol_type = other RNA
  modified_base 1: mod_base = OTHER; note = 2'-O-methylguanosine-3'- phosphorothioate
  modified_base 2: mod_base = OTHER; note = 2'-O-methylguanosine-3'- phosphorothioate
  modified_base 3: mod_base = OTHER; note = 2'-O-methylcytidine-3'-phosphate
  modified_base 4: mod_base = OTHER; note = 2'-O-methylguanosine-3'-phosphate
  modified_base 5: mod_base = OTHER; note = 2'-O-methylguanosine-3'-phosphate
  modified_base 6: mod_base = OTHER; note = 2'-O-methyluridine-3'-phosphate
  modified_base 7: mod_base = OTHER; note = 2'-fluoroadenosine-3'-phosphate
  modified_base 8: mod_base = OTHER; note = 2'-O-methyladenosine-3'-phosphate
  modified_base 9: mod_base = OTHER; note = 2'-fluorouridine-3'-phosphate
  modified_base 10: mod_base = OTHER; note = 2'-fluorouridine-3'-phosphate
  modified_base 11: mod_base = OTHER; note = 2'-fluoroguanosine-3'-phosphate
  modified_base 12: mod_base = OTHER; note = 2'-O-methylguanosine-3'-phosphate
  modified_base 13: mod_base = OTHER; note = 2'-O-methyluridine-3'-phosphate
  modified_base 14: mod_base = OTHER; note = 2'-O-methylguanosine-3'-phosphate
  modified_base 15: mod_base = OTHER; note = 2'-O-methyladenosine-3'-phosphate
  modified_base 16: mod_base = OTHER; note = 2'-O-methyluridine-3'-phosphate
  modified_base 17: mod_base = OTHER; note = 2'-O-methyladenosine-3'-phosphate
  modified_base 18: mod_base = OTHER; note = 2'-O-methylcytidine-3'-phosphate
  modified_base 19: mod_base = OTHER; note = 2'-O-methyluridine-3'-phosphate
  modified_base 20: mod_base = OTHER; note = 2'-O-methyluridine-3'-phosphate
  modified_base 21: mod_base = OTHER; note = 2'-O-methylcytidine-3'-phosphate attached to N-[tris(N-acetylgalactosamine-alkyl)-amidodecanoyl)]-4-hydr oxyprolinol Hyp-(N-acetylgalactosamine-alkyl)3
ggcggtaattggtgatacttc

SEQ ID NO: 2233 - RNA, 23 nt, synthetic construct
  misc_feature 1..23: note = Description of Artificial Sequence: Synthetic oligonucleotide
  source 1..23: mol_type = other RNA
  modified_base 1: mod_base = OTHER; note = 2'-O-methylguanosine-3'- phosphorothioate
  modified_base 2: mod_base = OTHER; note = 2'-fluoroadenosine-3'-phosphorothioate
  modified_base 3: mod_base = OTHER; note = 2'-O-methyladenosine-3'-phosphate
  modified_base 4: mod_base = OTHER; note = 2'-O-methylguanosine-3'-phosphate
  modified_base 5: mod_base = OTHER; note = 2'-O-methyluridine-3'-phosphate
  modified_base 6: mod_base = OTHER; note = 2'-fluoroadenosine-3'-phosphate
  modified_base 7: mod_base = OTHER; note = 2'-O-methyluridine-3'-phosphate
  modified_base 8: mod_base = OTHER; note = 2'-fluorocytidine-3'-phosphate
  modified_base 9: mod_base = OTHER; note = 2'-fluoroadenosine-3'-phosphate
  modified_base 10: mod_base = OTHER; note = 2'-O-methylcytidine-3'-phosphate
  modified_base 11: mod_base = OTHER; note = 2'-O-methylcytidine-3'-phosphate
  modified_base 12: mod_base = OTHER; note = 2'-O-methyladenosine-3'-phosphate
  modified_base 13: mod_base = OTHER; note = 2'-O-methyladenosine-3'-phosphate
  modified_base 14: mod_base = OTHER; note = 2'-fluorouridine-3'-phosphate
  modified_base 15: mod_base = OTHER; note = 2'-O-methyluridine-3'-phosphate
  modified_base 16: mod_base = OTHER; note = 2'-fluoroadenosine-3'-phosphate
  modified_base 17: mod_base = OTHER; note = 2'-O-methylcytidine-3'-phosphate
  modified_base 18: mod_base = OTHER; note = 2'-O-methylcytidine-3'-phosphate
  modified_base 19: mod_base = OTHER; note = 2'-O-methylguanosine-3'-phosphate
  modified_base 20: mod_base = OTHER; note = 2'-O-methylcytidine-3'-phosphate
  modified_base 21: mod_base = OTHER; note = 2'-O-methylcytidine-3'- phosphorothioate
  modified_base 22: mod_base = OTHER; note = 2'-O-methyladenosine-3'- phosphorothioate
  modified_base 23: mod_base = OTHER; note = 2'-O-methylcytidine-3'-phosphate
gaagtatcaccaattaccgccac

SEQ ID NO: 2234 - RNA, 21 nt, synthetic construct
  misc_feature 1..21: note = Description of Artificial Sequence: Synthetic oligonucleotide
  source 1..21: mol_type = other RNA
  modified_base 1: mod_base = OTHER; note = 2'-O-methylcytidine-3'- phosphorothioate
  modified_base 2: mod_base = OTHER; note = 2'-O-methyladenosine-3'- phosphorothioate
  modified_base 3: mod_base = OTHER; note = 2'-O-methylguanosine-3'-phosphate
  modified_base 4: mod_base = OTHER; note = 2'-O-methyluridine-3'-phosphate
  modified_base 5: mod_base = OTHER; note = 2'-O-methylguanosine-3'-phosphate
  modified_base 6: mod_base = OTHER; note = 2'-O-methylguanosine-3'-phosphate
  modified_base 7: mod_base = OTHER; note = 2'-fluorouridine-3'-phosphate
  modified_base 8: mod_base = OTHER; note = 2'-O-methyluridine-3'-phosphate
  modified_base 9: mod_base = OTHER; note = 2'-fluorocytidine-3'-phosphate
  modified_base 10: mod_base = OTHER; note = 2'-fluorouridine-3'-phosphate
  modified_base 11: mod_base = OTHER; note = 2'-fluorouridine-3'-phosphate
  modified_base 12: mod_base = OTHER; note = 2'-O-methyladenosine-3'-phosphate
  modified_base 13: mod_base = OTHER; note = 2'-O-methyladenosine-3'-phosphate
  modified_base 14: mod_base = OTHER; note = 2'-O-methyladenosine-3'-phosphate
  modified_base 15: mod_base = OTHER; note = 2'-O-methyluridine-3'-phosphate
  modified_base 16: mod_base = OTHER; note = 2'-O-methyluridine-3'-phosphate
  modified_base 17: mod_base = OTHER; note = 2'-O-methylguanosine-3'-phosphate
  modified_base 18: mod_base = OTHER; note = 2'-O-methyluridine-3'-phosphate
  modified_base 19: mod_base = OTHER; note = 2'-O-methyladenosine-3'-phosphate
  modified_base 20: mod_base = OTHER; note = 2'-O-methyladenosine-3'-phosphate
  modified_base 21: mod_base = OTHER; note = 2'-O-methylguanosine-3'-phosphate attached to N-[tris(N-acetylgalactosamine-alkyl)-amidodecanoyl)]-4-hydr oxyprolinol Hyp-(N-acetylgalactosamine-alkyl)3
cagtggttcttaaattgtaag

SEQ ID NO: 2235 - RNA, 23 nt, synthetic construct
  misc_feature 1..23: note = Description of Artificial Sequence: Synthetic oligonucleotide
  source 1..23: mol_type = other RNA
  modified_base 1: mod_base = OTHER; note = 2'-O-methylcytidine-3'- phosphorothioate
  modified_base 2: mod_base = OTHER; note = 2'-fluorouridine -3'-phosphorothioate
  modified_base 3: mod_base = OTHER; note = 2'-O-methyluridine-3'-phosphate
  modified_base 4: mod_base = OTHER; note = 2'-O-methyladenosine-3'-phosphate
  modified_base 5: mod_base = OTHER; note = 2'-O-methylcytidine-3'-phosphate
  modified_base 6: mod_base = OTHER; note = 2'-fluoroadenosine-3'-phosphate
  modified_base 7: mod_base = OTHER; note = 2'-O-methyladenosine-3'-phosphate
  modified_base 8: mod_base = OTHER; note = 2'-fluorouridine-3'-phosphate
  modified_base 9: mod_base = OTHER; note = 2'-fluorouridine-3'-phosphate
  modified_base 10: mod_base = OTHER; note = 2'-O-methyluridine-3'-phosphate
  modified_base 11: mod_base = OTHER; note = 2'-O-methyladenosine-3'-phosphate
  modified_base 12: mod_base = OTHER; note = 2'-O-methyladenosine-3'-phosphate
  modified_base 13: mod_base = OTHER; note = 2'-O-methylguanosine-3'-phosphate
  modified_base 14: mod_base = OTHER; note = 2'-fluoroadenosine-3'-phosphate
  modified_base 15: mod_base = OTHER; note = 2'-O-methyladenosine-3'-phosphate
  modified_base 16: mod_base = OTHER; note = 2'-fluorocytidine-3'-phosphate
  modified_base 17: mod_base = OTHER; note = 2'-O-methylcytidine-3'-phosphate
  modified_base 18: mod_base = OTHER; note = 2'-O-methyladenosine-3'-phosphate
  modified_base 19: mod_base = OTHER; note = 2'-O-methylcytidine-3'-phosphate
  modified_base 20: mod_base = OTHER; note = 2'-O-methyluridine-3'-phosphate
  modified_base 21: mod_base = OTHER; note = 2'-O-methylguanosine-3'- phosphorothioate
  modified_base 22: mod_base = OTHER; note = 2'-O-methyluridine-3'-phosphorothioate
  modified_base 23: mod_base = OTHER; note = 2'-O-methyluridine-3'-phosphate
cttacaatttaagaaccactgtt

SEQ ID NO: 2236 - RNA, 21 nt, synthetic construct
  misc_feature 1..21: note = Description of Artificial Sequence: Synthetic oligonucleotide
  source 1..21: mol_type = other RNA
  modified_base 1: mod_base = OTHER; note = 2'-O-methyladenosine-3'- phosphorothioate
  modified_base 2: mod_base = OTHER; note = 2'-O-methylguanosine-3'- phosphorothioate
  modified_base 3: mod_base = OTHER; note = 2'-O-methyluridine-3'-phosphate
  modified_base 4: mod_base = OTHER; note = 2'-O-methylguanosine-3'-phosphate
  modified_base 5: mod_base = OTHER; note = 2'-O-methylguanosine-3'-phosphate
  modified_base 6: mod_base = OTHER; note = 2'-O-methyluridine-3'-phosphate
  modified_base 7: mod_base = OTHER; note = 2'-fluorouridine-3'-phosphate
  modified_base 8: mod_base = OTHER; note = 2'-O-methylcytidine-3'-phosphate
  modified_base 9: mod_base = OTHER; note = 2'-fluorouridine-3'-phosphate
  modified_base 10: mod_base = OTHER; note = 2'-fluorouridine-3'-phosphate
  modified_base 11: mod_base = OTHER; note = 2'-fluoroadenosine-3'-phosphate
  modified_base 12: mod_base = OTHER; note = 2'-O-methyladenosine-3'-phosphate
  modified_base 13: mod_base = OTHER; note = 2'-O-methyladenosine-3'-phosphate
  modified_base 14: mod_base = OTHER; note = 2'-O-methyluridine-3'-phosphate
  modified_base 15: mod_base = OTHER; note = 2'-O-methyluridine-3'-phosphate
  modified_base 16: mod_base = OTHER; note = 2'-O-methylguanosine-3'-phosphate
  modified_base 17: mod_base = OTHER; note = 2'-O-methyluridine-3'-phosphate
  modified_base 18: mod_base = OTHER; note = 2'-O-methyladenosine-3'-phosphate
  modified_base 19: mod_base = OTHER; note = 2'-O-methyladenosine-3'-phosphate
  modified_base 20: mod_base = OTHER; note = 2'-O-methylguanosine-3'-phosphate
  modified_base 21: mod_base = OTHER; note = 2'-O-methylcytidine-3'-phosphate attached to N-[tris(N-acetylgalactosamine-alkyl)-amidodecanoyl)]-4-hydr oxyprolinol Hyp-(N-acetylgalactosamine-alkyl)3
agtggttcttaaattgtaagc

SEQ ID NO: 2237 - RNA, 23 nt, synthetic construct
  misc_feature 1..23: note = Description of Artificial Sequence: Synthetic oligonucleotide
  source 1..23: mol_type = other RNA
  modified_base 1: mod_base = OTHER; note = 2'-O-methylguanosine-3'- phosphorothioate
  modified_base 2: mod_base = OTHER; note = 2'-fluorocytidine-3'-phosphorothioate
  modified_base 3: mod_base = OTHER; note = 2'-O-methyluridine-3'-phosphate
  modified_base 4: mod_base = OTHER; note = 2'-O-methyluridine-3'-phosphate
  modified_base 5: mod_base = OTHER; note = 2'-O-methyladenosine-3'-phosphate
  modified_base 6: mod_base = OTHER; note = 2'-fluorocytidine-3'-phosphate
  modified_base 7: mod_base = OTHER; note = 2'-O-methyladenosine-3'-phosphate
  modified_base 8: mod_base = OTHER; note = 2'-fluoroadenosine-3'-phosphate
  modified_base 9: mod_base = OTHER; note = 2'-fluorouridine-3'-phosphate
  modified_base 10: mod_base = OTHER; note = 2'-O-methyluridine-3'-phosphate
  modified_base 11: mod_base = OTHER; note = 2'-O-methyluridine-3'-phosphate
  modified_base 12: mod_base = OTHER; note = 2'-O-methyladenosine-3'-phosphate
  modified_base 13: mod_base = OTHER; note = 2'-O-methyladenosine-3'-phosphate
  modified_base 14: mod_base = OTHER; note = 2'-fluoroguanosine-3'-phosphate
  modified_base 15: mod_base = OTHER; note = 2'-O-methyladenosine-3'-phosphate
  modified_base 16: mod_base = OTHER; note = 2'-fluoroadenosine-3'-phosphate
  modified_base 17: mod_base = OTHER; note = 2'-O-methylcytidine-3'-phosphate
  modified_base 18: mod_base = OTHER; note = 2'-O-methylcytidine-3'-phosphate
  modified_base 19: mod_base = OTHER; note = 2'-O-methyladenosine-3'-phosphate
  modified_base 20: mod_base = OTHER; note = 2'-O-methylcytidine-3'-phosphate
  modified_base 21: mod_base = OTHER; note = 2'-O-methyluridine-3'-phosphorothioate
  modified_base 22: mod_base = OTHER; note = 2'-O-methylguanosine-3'- phosphorothioate
  modified_base 23: mod_base = OTHER; note = 2'-O-methyluridine-3'-phosphate
gcttacaatttaagaaccactgt

SEQ ID NO: 2238 - RNA, 21 nt, synthetic construct
  misc_feature 1..21: note = Description of Artificial Sequence: Synthetic oligonucleotide
  source 1..21: mol_type = other RNA
  modified_base 1: mod_base = OTHER; note = 2'-O-methyladenosine-3'- phosphorothioate
  modified_base 2: mod_base = OTHER; note = 2'-O-methyladenosine-3'- phosphorothioate
  modified_base 3: mod_base = OTHER; note = 2'-O-methyladenosine-3'-phosphate
  modified_base 4: mod_base = OTHER; note = 2'-O-methyladenosine-3'-phosphate
  modified_base 5: mod_base = OTHER; note = 2'-O-methylcytidine-3'-phosphate
  modified_base 6: mod_base = OTHER; note = 2'-O-methyladenosine-3'-phosphate
  modified_base 7: mod_base = OTHER; note = 2'-fluoroguanosine-3'-phosphate
  modified_base 8: mod_base = OTHER; note = 2'-O-methyluridine-3'-phosphate
  modified_base 9: mod_base = OTHER; note = 2'-fluoroguanosine-3'-phosphate
  modified_base 10: mod_base = OTHER; note = 2'-fluoroguanosine-3'-phosphate
  modified_base 11: mod_base = OTHER; note = 2'-fluorouridine-3'-phosphate
  modified_base 12: mod_base = OTHER; note = 2'-O-methyluridine-3'-phosphate
  modified_base 13: mod_base = OTHER; note = 2'-O-methylcytidine-3'-phosphate
  modified_base 14: mod_base = OTHER; note = 2'-O-methyluridine-3'-phosphate
  modified_base 15: mod_base = OTHER; note = 2'-O-methyluridine-3'-phosphate
  modified_base 16: mod_base = OTHER; note = 2'-O-methyladenosine-3'-phosphate
  modified_base 17: mod_base = OTHER; note = 2'-O-methyladenosine-3'-phosphate
  modified_base 18: mod_base = OTHER; note = 2'-O-methyladenosine-3'-phosphate
  modified_base 19: mod_base = OTHER; note = 2'-O-methyluridine-3'-phosphate
  modified_base 20: mod_base = OTHER; note = 2'-O-methyluridine-3'-phosphate
  modified_base 21: mod_base = OTHER; note = 2'-O-methylguanosine-3'-phosphate attached to N-[tris(N-acetylgalactosamine-alkyl)-amidodecanoyl)]-4-hydr oxyprolinol Hyp-(N-acetylgalactosamine-alkyl)3
aaaacagtggttcttaaattg

SEQ ID NO: 2239 - RNA, 23 nt, synthetic construct
  misc_feature 1..23: note = Description of Artificial Sequence: Synthetic oligonucleotide
  source 1..23: mol_type = other RNA
  modified_base 1: mod_base = OTHER; note = 2'-O-methylcytidine-3'- phosphorothioate
  modified_base 2: mod_base = OTHER; note = 2'-fluoroadenosine-3'-phosphorothioate
  modified_base 3: mod_base = OTHER; note = 2'-O-methyladenosine-3'-phosphate
  modified_base 4: mod_base = OTHER; note = 2'-O-methyluridine-3'-phosphate
  modified_base 5: mod_base = OTHER; note = 2'-O-methyluridine-3'-phosphate
  modified_base 6: mod_base = OTHER; note = 2'-fluorouridine-3'-phosphate
  modified_base 7: mod_base = OTHER; note = 2'-O-methyladenosine-3'-phosphate
  modified_base 8: mod_base = OTHER; note = 2'-fluoroadenosine-3'-phosphate
  modified_base 9: mod_base = OTHER; note = 2'-fluoroguanosine-3'-phosphate
  modified_base 10: mod_base = OTHER; note = 2'-O-methyladenosine-3'-phosphate
  modified_base 11: mod_base = OTHER; note = 2'-O-methyladenosine-3'-phosphate
  modified_base 12: mod_base = OTHER; note = 2'-O-methylcytidine-3'-phosphate
  modified_base 13: mod_base = OTHER; note = 2'-O-methylcytidine-3'-phosphate
  modified_base 14: mod_base = OTHER; note = 2'-fluoroadenosine-3'-phosphate
  modified_base 15: mod_base = OTHER; note = 2'-O-methylcytidine-3'-phosphate
  modified_base 16: mod_base = OTHER; note = 2'-fluorouridine-3'-phosphate
  modified_base 17: mod_base = OTHER; note = 2'-O-methylguanosine-3'-phosphate
  modified_base 18: mod_base = OTHER; note = 2'-O-methyluridine-3'-phosphate
  modified_base 19: mod_base = OTHER; note = 2'-O-methyluridine-3'-phosphate
  modified_base 20: mod_base = OTHER; note = 2'-O-methyluridine-3'-phosphate
  modified_base 21: mod_base = OTHER; note = 2'-O-methyluridine-3'-phosphorothioate
  modified_base 22: mod_base = OTHER; note = 2'-O-methyladenosine-3'- phosphorothioate
  modified_base 23: mod_base = OTHER; note = 2'-O-methyladenosine-3'-phosphate
caatttaagaaccactgttttaa

SEQ ID NO: 2240 - RNA, 21 nt, synthetic construct
  misc_feature 1..21: note = Description of Artificial Sequence: Synthetic oligonucleotide
  source 1..21: mol_type = other RNA
  modified_base 1: mod_base = OTHER; note = 2'-O-methyluridine-3'-phosphorothioate
  modified_base 2: mod_base = OTHER; note = 2'-O-methyladenosine-3'- phosphorothioate
  modified_base 3: mod_base = OTHER; note = 2'-O-methyladenosine-3'-phosphate
  modified_base 4: mod_base = OTHER; note = 2'-O-methyladenosine-3'-phosphate
  modified_base 5: mod_base = OTHER; note = 2'-O-methyladenosine-3'-phosphate
  modified_base 6: mod_base = OTHER; note = 2'-O-methylcytidine-3'-phosphate
  modified_base 7: mod_base = OTHER; note = 2'-fluoroadenosine-3'-phosphate
  modified_base 8: mod_base = OTHER; note = 2'-O-methylguanosine-3'-phosphate
  modified_base 9: mod_base = OTHER; note = 2'-fluorouridine-3'-phosphate
  modified_base 10: mod_base = OTHER; note = 2'-fluoroguanosine-3'-phosphate
  modified_base 11: mod_base = OTHER; note = 2'-fluoroguanosine-3'-phosphate
  modified_base 12: mod_base = OTHER; note = 2'-O-methyluridine-3'-phosphate
  modified_base 13: mod_base = OTHER; note = 2'-O-methyluridine-3'-phosphate
  modified_base 14: mod_base = OTHER; note = 2'-O-methylcytidine-3'-phosphate
  modified_base 15: mod_base = OTHER; note = 2'-O-methyluridine-3'-phosphate
  modified_base 16: mod_base = OTHER; note = 2'-O-methyluridine-3'-phosphate
  modified_base 17: mod_base = OTHER; note = 2'-O-methyladenosine-3'-phosphate
  modified_base 18: mod_base = OTHER; note = 2'-O-methyladenosine-3'-phosphate
  modified_base 19: mod_base = OTHER; note = 2'-O-methyladenosine-3'-phosphate
  modified_base 20: mod_base = OTHER; note = 2'-O-methyluridine-3'-phosphate
  modified_base 21: mod_base = OTHER; note = 2'-O-methyluridine-3'-phosphate attached to N-[tris(N-acetylgalactosamine-alkyl)-amidodecanoyl)]-4-hydr oxyprolinol Hyp-(N-acetylgalactosamine-alkyl)3
taaaacagtggttcttaaatt

SEQ ID NO: 2241 - RNA, 23 nt, synthetic construct
  misc_feature 1..23: note = Description of Artificial Sequence: Synthetic oligonucleotide
  source 1..23: mol_type = other RNA
  modified_base 1: mod_base = OTHER; note = 2'-O-methyladenosine-3'- phosphorothioate
  modified_base 2: mod_base = OTHER; note = 2'-fluoroadenosine-3'-phosphorothioate
  modified_base 3: mod_base = OTHER; note = 2'-O-methyluridine-3'-phosphate
  modified_base 4: mod_base = OTHER; note = 2'-O-methyluridine-3'-phosphate
  modified_base 5: mod_base = OTHER; note = 2'-O-methyluridine-3'-phosphate
  modified_base 6: mod_base = OTHER; note = 2'-fluoroadenosine-3'-phosphate
  modified_base 7: mod_base = OTHER; note = 2'-O-methyladenosine-3'-phosphate
  modified_base 8: mod_base = OTHER; note = 2'-fluoroguanosine-3'-phosphate
  modified_base 9: mod_base = OTHER; note = 2'-fluoroadenosine-3'-phosphate
  modified_base 10: mod_base = OTHER; note = 2'-O-methyladenosine-3'-phosphate
  modified_base 11: mod_base = OTHER; note = 2'-O-methylcytidine-3'-phosphate
  modified_base 12: mod_base = OTHER; note = 2'-O-methylcytidine-3'-phosphate
  modified_base 13: mod_base = OTHER; note = 2'-O-methyladenosine-3'-phosphate
  modified_base 14: mod_base = OTHER; note = 2'-fluorocytidine-3'-phosphate
  modified_base 15: mod_base = OTHER; note = 2'-O-methyluridine-3'-phosphate
  modified_base 16: mod_base = OTHER; note = 2'-fluoroguanosine-3'-phosphate
  modified_base 17: mod_base = OTHER; note = 2'-O-methyluridine-3'-phosphate
  modified_base 18: mod_base = OTHER; note = 2'-O-methyluridine-3'-phosphate
  modified_base 19: mod_base = OTHER; note = 2'-O-methyluridine-3'-phosphate
  modified_base 20: mod_base = OTHER; note = 2'-O-methyluridine-3'-phosphate
  modified_base 21: mod_base = OTHER; note = 2'-O-methyladenosine-3'- phosphorothioate
  modified_base 22: mod_base = OTHER; note = 2'-O-methyladenosine-3'- phosphorothioate
  modified_base 23: mod_base = OTHER; note = 2'-O-methyladenosine-3'-phosphate
aatttaagaaccactgttttaaa

SEQ ID NO: 2242 - RNA, 21 nt, synthetic construct
  misc_feature 1..21: note = Description of Artificial Sequence: Synthetic oligonucleotide
  source 1..21: mol_type = other RNA
  modified_base 1: mod_base = OTHER; note = 2'-O-methyladenosine-3'- phosphorothioate
  modified_base 2: mod_base = OTHER; note = 2'-O-methylcytidine-3'- phosphorothioate
  modified_base 3: mod_base = OTHER; note = 2'-O-methylcytidine-3'-phosphate
  modified_base 4: mod_base = OTHER; note = 2'-O-methyluridine-3'-phosphate
  modified_base 5: mod_base = OTHER; note = 2'-O-methylguanosine-3'-phosphate
  modified_base 6: mod_base = OTHER; note = 2'-O-methyluridine-3'-phosphate
  modified_base 7: mod_base = OTHER; note = 2'-fluoroadenosine-3'-phosphate
  modified_base 8: mod_base = OTHER; note = 2'-O-methyluridine-3'-phosphate
  modified_base 9: mod_base = OTHER; note = 2'-fluorouridine-3'-phosphate
  modified_base 10: mod_base = OTHER; note = 2'-fluorocytidine-3'-phosphate
  modified_base 11: mod_base = OTHER; note = 2'-fluorouridine-3'-phosphate
  modified_base 12: mod_base = OTHER; note = 2'-O-methylguanosine-3'-phosphate
  modified_base 13: mod_base = OTHER; note = 2'-O-methyluridine-3'-phosphate
  modified_base 14: mod_base = OTHER; note = 2'-O-methyluridine-3'-phosphate
  modified_base 15: mod_base = OTHER; note = 2'-O-methyluridine-3'-phosphate
  modified_base 16: mod_base = OTHER; note = 2'-O-methyladenosine-3'-phosphate
  modified_base 17: mod_base = OTHER; note = 2'-O-methylcytidine-3'-phosphate
  modified_base 18: mod_base = OTHER; note = 2'-O-methyladenosine-3'-phosphate
  modified_base 19: mod_base = OTHER; note = 2'-O-methyluridine-3'-phosphate
  modified_base 20: mod_base = OTHER; note = 2'-O-methylguanosine-3'-phosphate
  modified_base 21: mod_base = OTHER; note = 2'-O-methyluridine-3'-phosphate attached to N-[tris(N-acetylgalactosamine-alkyl)-amidodecanoyl)]-4-hydr oxyprolinol Hyp-(N-acetylgalactosamine-alkyl)3
acctgtattctgtttacatgt

SEQ ID NO: 2243 - RNA, 23 nt, synthetic construct
  misc_feature 1..23: note = Description of Artificial Sequence: Synthetic oligonucleotide
  source 1..23: mol_type = other RNA
  modified_base 1: mod_base = OTHER; note = 2'-O-methyladenosine-3'- phosphorothioate
  modified_base 2: mod_base = OTHER; note = 2'-fluorocytidine-3'-phosphorothioate
  modified_base 3: mod_base = OTHER; note = 2'-O-methyladenosine-3'-phosphate
  modified_base 4: mod_base = OTHER; note = 2'-O-methyluridine-3'-phosphate
  modified_base 5: mod_base = OTHER; note = 2'-O-methylguanosine-3'-phosphate
  modified_base 6: mod_base = OTHER; note = 2'-fluorouridine-3'-phosphate
  modified_base 7: mod_base = OTHER; note = 2'-O-methyladenosine-3'-phosphate
  modified_base 8: mod_base = OTHER; note = 2'-fluoroadenosine-3'-phosphate
  modified_base 9: mod_base = OTHER; note = 2'-fluoroadenosine-3'-phosphate
  modified_base 10: mod_base = OTHER; note = 2'-O-methylcytidine-3'-phosphate
  modified_base 11: mod_base = OTHER; note = 2'-O-methyladenosine-3'-phosphate
  modified_base 12: mod_base = OTHER; note = 2'-O-methylguanosine-3'-phosphate
  modified_base 13: mod_base = OTHER; note = 2'-O-methyladenosine-3'-phosphate
  modified_base 14: mod_base = OTHER; note = 2'-fluoroadenosine-3'-phosphate
  modified_base 15: mod_base = OTHER; note = 2'-O-methyluridine-3'-phosphate
  modified_base 16: mod_base = OTHER; note = 2'-fluoroadenosine-3'-phosphate
  modified_base 17: mod_base = OTHER; note = 2'-O-methylcytidine-3'-phosphate
  modified_base 18: mod_base = OTHER; note = 2'-O-methyladenosine-3'-phosphate
  modified_base 19: mod_base = OTHER; note = 2'-O-methylguanosine-3'-phosphate
  modified_base 20: mod_base = OTHER; note = 2'-O-methylguanosine-3'-phosphate
  modified_base 21: mod_base = OTHER; note = 2'-O-methyluridine-3'-phosphorothioate
  modified_base 22: mod_base = OTHER; note = 2'-O-methyluridine-3'-phosphorothioate
  modified_base 23: mod_base = OTHER; note = 2'-O-methyladenosine-3'-phosphate
acatgtaaacagaatacaggtta

SEQ ID NO: 2244 - RNA, 21 nt, synthetic construct
  misc_feature 1..21: note = Description of Artificial Sequence: Synthetic oligonucleotide
  source 1..21: mol_type = other RNA
  modified_base 1: mod_base = OTHER; note = 2'-O-methylcytidine-3'- phosphorothioate
  modified_base 2: mod_base = OTHER; note = 2'-O-methylcytidine-3'- phosphorothioate
  modified_base 3: mod_base = OTHER; note = 2'-O-methyluridine-3'-phosphate
  modified_base 4: mod_base = OTHER; note = 2'-O-methylguanosine-3'-phosphate
  modified_base 5: mod_base = OTHER; note = 2'-O-methyluridine-3'-phosphate
  modified_base 6: mod_base = OTHER; note = 2'-O-methyladenosine-3'-phosphate
  modified_base 7: mod_base = OTHER; note = 2'-fluorouridine-3'-phosphate
  modified_base 8: mod_base = OTHER; note = 2'-O-methyluridine-3'-phosphate
  modified_base 9: mod_base = OTHER; note = 2'-fluorocytidine-3'-phosphate
  modified_base 10: mod_base = OTHER; note = 2'-fluorouridine-3'-phosphate
  modified_base 11: mod_base = OTHER; note = 2'-fluoroguanosine-3'-phosphate
  modified_base 12: mod_base = OTHER; note = 2'-O-methyluridine-3'-phosphate
  modified_base 13: mod_base = OTHER; note = 2'-O-methyluridine-3'-phosphate
  modified_base 14: mod_base = OTHER; note = 2'-O-methyluridine-3'-phosphate
  modified_base 15: mod_base = OTHER; note = 2'-O-methyladenosine-3'-phosphate
  modified_base 16: mod_base = OTHER; note = 2'-O-methylcytidine-3'-phosphate
  modified_base 17: mod_base = OTHER; note = 2'-O-methyladenosine-3'-phosphate
  modified_base 18: mod_base = OTHER; note = 2'-O-methyluridine-3'-phosphate
  modified_base 19: mod_base = OTHER; note = 2'-O-methylguanosine-3'-phosphate
  modified_base 20: mod_base = OTHER; note = 2'-O-methyluridine-3'-phosphate
  modified_base 21: mod_base = OTHER; note = 2'-O-methylcytidine-3'-phosphate attached to N-[tris(N-acetylgalactosamine-alkyl)-amidodecanoyl)]-4-hydr oxyprolinol Hyp-(N-acetylgalactosamine-alkyl)3
cctgtattctgtttacatgtc

SEQ ID NO: 2245 - RNA, 23 nt, synthetic construct
  misc_feature 1..23: note = Description of Artificial Sequence: Synthetic oligonucleotide
  source 1..23: mol_type = other RNA
  modified_base 1: mod_base = OTHER; note = 2'-O-methylguanosine-3'- phosphorothioate
  modified_base 2: mod_base = OTHER; note = 2'-fluoroadenosine-3'-phosphorothioate
  modified_base 3: mod_base = OTHER; note = 2'-O-methylcytidine-3'-phosphate
  modified_base 4: mod_base = OTHER; note = 2'-O-methyladenosine-3'-phosphate
  modified_base 5: mod_base = OTHER; note = 2'-O-methyluridine-3'-phosphate
  modified_base 6: mod_base = OTHER; note = 2'-fluoroguanosine-3'-phosphate
  modified_base 7: mod_base = OTHER; note = 2'-O-methyluridine-3'-phosphate
  modified_base 8: mod_base = OTHER; note = 2'-fluoroadenosine-3'-phosphate
  modified_base 9: mod_base = OTHER; note = 2'-fluoroadenosine-3'-phosphate
  modified_base 10: mod_base = OTHER; note = 2'-O-methyladenosine-3'-phosphate
  modified_base 11: mod_base = OTHER; note = 2'-O-methylcytidine-3'-phosphate
  modified_base 12: mod_base = OTHER; note = 2'-O-methyladenosine-3'-phosphate
  modified_base 13: mod_base = OTHER; note = 2'-O-methylguanosine-3'-phosphate
  modified_base 14: mod_base = OTHER; note = 2'-fluoroadenosine-3'-phosphate
  modified_base 15: mod_base = OTHER; note = 2'-O-methyladenosine-3'-phosphate
  modified_base 16: mod_base = OTHER; note = 2'-fluorouridine-3'-phosphate
  modified_base 17: mod_base = OTHER; note = 2'-O-methyladenosine-3'-phosphate
  modified_base 18: mod_base = OTHER; note = 2'-O-methylcytidine-3'-phosphate
  modified_base 19: mod_base = OTHER; note = 2'-O-methyladenosine-3'-phosphate
  modified_base 20: mod_base = OTHER; note = 2'-O-methylguanosine-3'-phosphate
  modified_base 21: mod_base = OTHER; note = 2'-O-methylguanosine-3'- phosphorothioate
  modified_base 22: mod_base = OTHER; note = 2'-O-methyluridine-3'-phosphorothioate
  modified_base 23: mod_base = OTHER; note = 2'-O-methyluridine-3'-phosphate
gacatgtaaacagaatacaggtt

SEQ ID NO: 2246 - RNA, 21 nt, synthetic construct
  misc_feature 1..21: note = Description of Artificial Sequence: Synthetic oligonucleotide
  source 1..21: mol_type = other RNA
  modified_base 1: mod_base = OTHER; note = 2'-O-methyladenosine-3'- phosphorothioate
  modified_base 2: mod_base = OTHER; note = 2'-O-methyluridine-3'-phosphorothioate
  modified_base 3: mod_base = OTHER; note = 2'-O-methyluridine-3'-phosphate
  modified_base 4: mod_base = OTHER; note = 2'-O-methyladenosine-3'-phosphate
  modified_base 5: mod_base = OTHER; note = 2'-O-methyladenosine-3'-phosphate
  modified_base 6: mod_base = OTHER; note = 2'-O-methylcytidine-3'-phosphate
  modified_base 7: mod_base = OTHER; note = 2'-fluorocytidine-3'-phosphate
  modified_base 8: mod_base = OTHER; note = 2'-O-methyluridine-3'-phosphate
  modified_base 9: mod_base = OTHER; note = 2'-fluoroguanosine-3'-phosphate
  modified_base 10: mod_base = OTHER; note = 2'-fluorouridine-3'-phosphate
  modified_base 11: mod_base = OTHER; note = 2'-fluoroadenosine-3'-phosphate
  modified_base 12: mod_base = OTHER; note = 2'-O-methyluridine-3'-phosphate
  modified_base 13: mod_base = OTHER; note = 2'-O-methyluridine-3'-phosphate
  modified_base 14: mod_base = OTHER; note = 2'-O-methylcytidine-3'-phosphate
  modified_base 15: mod_base = OTHER; note = 2'-O-methyluridine-3'-phosphate
  modified_base 16: mod_base = OTHER; note = 2'-O-methylguanosine-3'-phosphate
  modified_base 17: mod_base = OTHER; note = 2'-O-methyluridine-3'-phosphate
  modified_base 18: mod_base = OTHER; note = 2'-O-methyluridine-3'-phosphate
  modified_base 19: mod_base = OTHER; note = 2'-O-methyluridine-3'-phosphate
  modified_base 20: mod_base = OTHER; note = 2'-O-methyladenosine-3'-phosphate
  modified_base 21: mod_base = OTHER; note = 2'-O-methylcytidine-3'-phosphate attached to N-[tris(N-acetylgalactosamine-alkyl)-amidodecanoyl)]-4-hydr oxyprolinol Hyp-(N-acetylgalactosamine-alkyl)3
attaacctgtattctgtttac

SEQ ID NO: 2247 - RNA, 23 nt, synthetic construct
  misc_feature 1..23: note = Description of Artificial Sequence: Synthetic oligonucleotide
  source 1..23: mol_type = other RNA
  modified_base 1: mod_base = OTHER; note = 2'-O-methylguanosine-3'- phosphorothioate
  modified_base 2: mod_base = OTHER; note = 2'-fluorouridine -3'-phosphorothioate
  modified_base 3: mod_base = OTHER; note = 2'-O-methyladenosine-3'-phosphate
  modified_base 4: mod_base = OTHER; note = 2'-O-methyladenosine-3'-phosphate
  modified_base 5: mod_base = OTHER; note = 2'-O-methyladenosine-3'-phosphate
  modified_base 6: mod_base = OTHER; note = 2'-fluorocytidine-3'-phosphate
  modified_base 7: mod_base = OTHER; note = 2'-O-methyladenosine-3'-phosphate
  modified_base 8: mod_base = OTHER; note = 2'-fluoroguanosine-3'-phosphate
  modified_base 9: mod_base = OTHER; note = 2'-fluoroadenosine-3'-phosphate
  modified_base 10: mod_base = OTHER; note = 2'-O-methyladenosine-3'-phosphate
  modified_base 11: mod_base = OTHER; note = 2'-O-methyluridine-3'-phosphate
  modified_base 12: mod_base = OTHER; note = 2'-O-methyladenosine-3'-phosphate
  modified_base 13: mod_base = OTHER; note = 2'-O-methylcytidine-3'-phosphate
  modified_base 14: mod_base = OTHER; note = 2'-fluoroadenosine-3'-phosphate
  modified_base 15: mod_base = OTHER; note = 2'-O-methylguanosine-3'-phosphate
  modified_base 16: mod_base = OTHER; note = 2'-fluoroguanosine-3'-phosphate
  modified_base 17: mod_base = OTHER; note = 2'-O-methyluridine-3'-phosphate
  modified_base 18: mod_base = OTHER; note = 2'-O-methyluridine-3'-phosphate
  modified_base 19: mod_base = OTHER; note = 2'-O-methyladenosine-3'-phosphate
  modified_base 20: mod_base = OTHER; note = 2'-O-methyladenosine-3'-phosphate
  modified_base 21: mod_base = OTHER; note = 2'-O-methyluridine-3'-phosphorothioate
  modified_base 22: mod_base = OTHER; note = 2'-O-methyladenosine-3'- phosphorothioate
  modified_base 23: mod_base = OTHER; note = 2'-O-methyladenosine-3'-phosphate
gtaaacagaatacaggttaataa

SEQ ID NO: 2248 - RNA, 21 nt, synthetic construct
  misc_feature 1..21: note = Description of Artificial Sequence: Synthetic oligonucleotide
  source 1..21: mol_type = other RNA
  modified_base 1: mod_base = OTHER; note = 2'-O-methyluridine-3'-phosphorothioate
  modified_base 2: mod_base = OTHER; note = 2'-O-methyladenosine-3'- phosphorothioate
  modified_base 3: mod_base = OTHER; note = 2'-O-methyluridine-3'-phosphate
  modified_base 4: mod_base = OTHER; note = 2'-O-methyluridine-3'-phosphate
  modified_base 5: mod_base = OTHER; note = 2'-O-methyladenosine-3'-phosphate
  modified_base 6: mod_base = OTHER; note = 2'-O-methyladenosine-3'-phosphate
  modified_base 7: mod_base = OTHER; note = 2'-fluorocytidine-3'-phosphate
  modified_base 8: mod_base = OTHER; note = 2'-O-methylcytidine-3'-phosphate
  modified_base 9: mod_base = OTHER; note = 2'-fluorouridine-3'-phosphate
  modified_base 10: mod_base = OTHER; note = 2'-fluoroguanosine-3'-phosphate
  modified_base 11: mod_base = OTHER; note = 2'-fluorouridine-3'-phosphate
  modified_base 12: mod_base = OTHER; note = 2'-O-methyladenosine-3'-phosphate
  modified_base 13: mod_base = OTHER; note = 2'-O-methyluridine-3'-phosphate
  modified_base 14: mod_base = OTHER; note = 2'-O-methyluridine-3'-phosphate
  modified_base 15: mod_base = OTHER; note = 2'-O-methylcytidine-3'-phosphate
  modified_base 16: mod_base = OTHER; note = 2'-O-methyluridine-3'-phosphate
  modified_base 17: mod_base = OTHER; note = 2'-O-methylguanosine-3'-phosphate
  modified_base 18: mod_base = OTHER; note = 2'-O-methyluridine-3'-phosphate
  modified_base 19: mod_base = OTHER; note = 2'-O-methyluridine-3'-phosphate
  modified_base 20: mod_base = OTHER; note = 2'-O-methyluridine-3'-phosphate
  modified_base 21: mod_base = OTHER; note = 2'-O-methyladenosine-3'-phosphate attached to N-[tris(N-acetylgalactosamine-alkyl)-amidodecanoyl)]-4-hydr oxyprolinol Hyp-(N-acetylgalactosamine-alkyl)3
tattaacctgtattctgttta

SEQ ID NO: 2249 - RNA, 23 nt, synthetic construct
  misc_feature 1..23: note = Description of Artificial Sequence: Synthetic oligonucleotide
  source 1..23: mol_type = other RNA
  modified_base 1: mod_base = OTHER; note = 2'-O-methyluridine-3'-phosphorothioate
  modified_base 2: mod_base = OTHER; note = 2'-fluoroadenosine-3'-phosphorothioate
  modified_base 3: mod_base = OTHER; note = 2'-O-methyladenosine-3'-phosphate
  modified_base 4: mod_base = OTHER; note = 2'-O-methyladenosine-3'-phosphate
  modified_base 5: mod_base = OTHER; note = 2'-O-methylcytidine-3'-phosphate
  modified_base 6: mod_base = OTHER; note = 2'-fluoroadenosine-3'-phosphate
  modified_base 7: mod_base = OTHER; note = 2'-O-methylguanosine-3'-phosphate
  modified_base 8: mod_base = OTHER; note = 2'-fluoroadenosine-3'-phosphate
  modified_base 9: mod_base = OTHER; note = 2'-fluoroadenosine-3'-phosphate
  modified_base 10: mod_base = OTHER; note = 2'-O-methyluridine-3'-phosphate
  modified_base 11: mod_base = OTHER; note = 2'-O-methyladenosine-3'-phosphate
  modified_base 12: mod_base = OTHER; note = 2'-O-methylcytidine-3'-phosphate
  modified_base 13: mod_base = OTHER; note = 2'-O-methyladenosine-3'-phosphate
  modified_base 14: mod_base = OTHER; note = 2'-fluoroguanosine-3'-phosphate
  modified_base 15: mod_base = OTHER; note = 2'-O-methylguanosine-3'-phosphate
  modified_base 16: mod_base = OTHER; note = 2'-fluorouridine-3'-phosphate
  modified_base 17: mod_base = OTHER; note = 2'-O-methyluridine-3'-phosphate
  modified_base 18: mod_base = OTHER; note = 2'-O-methyladenosine-3'-phosphate
  modified_base 19: mod_base = OTHER; note = 2'-O-methyladenosine-3'-phosphate
  modified_base 20: mod_base = OTHER; note = 2'-O-methyluridine-3'-phosphate
  modified_base 21: mod_base = OTHER; note = 2'-O-methyladenosine-3'- phosphorothioate
  modified_base 22: mod_base = OTHER; note = 2'-O-methyladenosine-3'- phosphorothioate
  modified_base 23: mod_base = OTHER; note = 2'-O-methyladenosine-3'-phosphate
taaacagaatacaggttaataaa

SEQ ID NO: 2250 - RNA, 21 nt, synthetic construct
  misc_feature 1..21: note = Description of Artificial Sequence: Synthetic oligonucleotide
  source 1..21: mol_type = other RNA
  modified_base 1: mod_base = OTHER; note = 2'-O-methyladenosine-3'- phosphorothioate
  modified_base 2: mod_base = OTHER; note = 2'-O-methyladenosine-3'- phosphorothioate
  modified_base 3: mod_base = OTHER; note = 2'-O-methylguanosine-3'-phosphate
  modified_base 4: mod_base = OTHER; note = 2'-O-methyladenosine-3'-phosphate
  modified_base 5: mod_base = OTHER; note = 2'-O-methyladenosine-3'-phosphate
  modified_base 6: mod_base = OTHER; note = 2'-O-methyladenosine-3'-phosphate
  modified_base 7: mod_base = OTHER; note = 2'-fluorocytidine-3'-phosphate
  modified_base 8: mod_base = OTHER; note = 2'-O-methyluridine-3'-phosphate
  modified_base 9: mod_base = OTHER; note = 2'-fluorouridine-3'-phosphate
  modified_base 10: mod_base = OTHER; note = 2'-fluorouridine-3'-phosphate
  modified_base 11: mod_base = OTHER; note = 2'-fluoroguanosine-3'-phosphate
  modified_base 12: mod_base = OTHER; note = 2'-O-methylguanosine-3'-phosphate
  modified_base 13: mod_base = OTHER; note = 2'-O-methylcytidine-3'-phosphate
  modified_base 14: mod_base = OTHER; note = 2'-O-methyluridine-3'-phosphate
  modified_base 15: mod_base = OTHER; note = 2'-O-methylguanosine-3'-phosphate
  modified_base 16: mod_base = OTHER; note = 2'-O-methyladenosine-3'-phosphate
  modified_base 17: mod_base = OTHER; note = 2'-O-methyluridine-3'-phosphate
  modified_base 18: mod_base = OTHER; note = 2'-O-methyladenosine-3'-phosphate
  modified_base 19: mod_base = OTHER; note = 2'-O-methyladenosine-3'-phosphate
  modified_base 20: mod_base = OTHER; note = 2'-O-methyluridine-3'-phosphate
  modified_base 21: mod_base = OTHER; note = 2'-O-methyladenosine-3'-phosphate attached to N-[tris(N-acetylgalactosamine-alkyl)-amidodecanoyl)]-4-hydr oxyprolinol Hyp-(N-acetylgalactosamine-alkyl)3
aagaaactttggctgataata

SEQ ID NO: 2251 - RNA, 23 nt, synthetic construct
  misc_feature 1..23: note = Description of Artificial Sequence: Synthetic oligonucleotide
  source 1..23: mol_type = other RNA
  modified_base 1: mod_base = OTHER; note = 2'-O-methyluridine-3'-phosphorothioate
  modified_base 2: mod_base = OTHER; note = 2'-fluoroadenosine-3'-phosphorothioate
  modified_base 3: mod_base = OTHER; note = 2'-O-methyluridine-3'-phosphate
  modified_base 4: mod_base = OTHER; note = 2'-O-methyluridine-3'-phosphate
  modified_base 5: mod_base = OTHER; note = 2'-O-methyladenosine-3'-phosphate
  modified_base 6: mod_base = OTHER; note = 2'-fluorouridine-3'-phosphate
  modified_base 7: mod_base = OTHER; note = 2'-O-methylcytidine-3'-phosphate
  modified_base 8: mod_base = OTHER; note = 2'-fluoroadenosine-3'-phosphate
  modified_base 9: mod_base = OTHER; note = 2'-fluoroguanosine-3'-phosphate
  modified_base 10: mod_base = OTHER; note = 2'-O-methylcytidine-3'-phosphate
  modified_base 11: mod_base = OTHER; note = 2'-O-methylcytidine-3'-phosphate
  modified_base 12: mod_base = OTHER; note = 2'-O-methyladenosine-3'-phosphate
  modified_base 13: mod_base = OTHER; note = 2'-O-methyladenosine-3'-phosphate
  modified_base 14: mod_base = OTHER; note = 2'-fluoroadenosine-3'-phosphate
  modified_base 15: mod_base = OTHER; note = 2'-O-methylguanosine-3'-phosphate
  modified_base 16: mod_base = OTHER; note = 2'-fluorouridine-3'-phosphate
  modified_base 17: mod_base = OTHER; note = 2'-O-methyluridine-3'-phosphate
  modified_base 18: mod_base = OTHER; note = 2'-O-methyluridine-3'-phosphate
  modified_base 19: mod_base = OTHER; note = 2'-O-methylcytidine-3'-phosphate
  modified_base 20: mod_base = OTHER; note = 2'-O-methyluridine-3'-phosphate
  modified_base 21: mod_base = OTHER; note = 2'-O-methyluridine-3'-phosphorothioate
  modified_base 22: mod_base = OTHER; note = 2'-O-methylcytidine-3'- phosphorothioate
  modified_base 23: mod_base = OTHER; note = 2'-O-methyladenosine-3'-phosphate
tattatcagccaaagtttcttca

SEQ ID NO: 2252 - RNA, 21 nt, synthetic construct
  misc_feature 1..21: note = Description of Artificial Sequence: Synthetic oligonucleotide
  source 1..21: mol_type = other RNA
  modified_base 1: mod_base = OTHER; note = 2'-O-methyladenosine-3'- phosphorothioate
  modified_base 2: mod_base = OTHER; note = 2'-O-methylguanosine-3'- phosphorothioate
  modified_base 3: mod_base = OTHER; note = 2'-O-methyladenosine-3'-phosphate
  modified_base 4: mod_base = OTHER; note = 2'-O-methyladenosine-3'-phosphate
  modified_base 5: mod_base = OTHER; note = 2'-O-methyladenosine-3'-phosphate
  modified_base 6: mod_base = OTHER; note = 2'-O-methylcytidine-3'-phosphate
  modified_base 7: mod_base = OTHER; note = 2'-fluorouridine-3'-phosphate
  modified_base 8: mod_base = OTHER; note = 2'-O-methyluridine-3'-phosphate
  modified_base 9: mod_base = OTHER; note = 2'-fluorouridine-3'-phosphate
  modified_base 10: mod_base = OTHER; note = 2'-fluoroguanosine-3'-phosphate
  modified_base 11: mod_base = OTHER; note = 2'-fluoroguanosine-3'-phosphate
  modified_base 12: mod_base = OTHER; note = 2'-O-methylcytidine-3'-phosphate
  modified_base 13: mod_base = OTHER; note = 2'-O-methyluridine-3'-phosphate
  modified_base 14: mod_base = OTHER; note = 2'-O-methylguanosine-3'-phosphate
  modified_base 15: mod_base = OTHER; note = 2'-O-methyladenosine-3'-phosphate
  modified_base 16: mod_base = OTHER; note = 2'-O-methyluridine-3'-phosphate
  modified_base 17: mod_base = OTHER; note = 2'-O-methyladenosine-3'-phosphate
  modified_base 18: mod_base = OTHER; note = 2'-O-methyladenosine-3'-phosphate
  modified_base 19: mod_base = OTHER; note = 2'-O-methyluridine-3'-phosphate
  modified_base 20: mod_base = OTHER; note = 2'-O-methyladenosine-3'-phosphate
  modified_base 21: mod_base = OTHER; note = 2'-O-methyluridine-3'-phosphate attached to N-[tris(N-acetylgalactosamine-alkyl)-amidodecanoyl)]-4-hydr oxyprolinol Hyp-(N-acetylgalactosamine-alkyl)3
agaaactttggctgataatat

SEQ ID NO: 2253 - RNA, 23 nt, synthetic construct
  misc_feature 1..23: note = Description of Artificial Sequence: Synthetic oligonucleotide
  source 1..23: mol_type = other RNA
  modified_base 1: mod_base = OTHER; note = 2'-O-methyladenosine-3'- phosphorothioate
  modified_base 2: mod_base = OTHER; note = 2'-fluorouridine -3'-phosphorothioate
  modified_base 3: mod_base = OTHER; note = 2'-O-methyladenosine-3'-phosphate
  modified_base 4: mod_base = OTHER; note = 2'-O-methyluridine-3'-phosphate
  modified_base 5: mod_base = OTHER; note = 2'-O-methyluridine-3'-phosphate
  modified_base 6: mod_base = OTHER; note = 2'-fluoroadenosine-3'-phosphate
  modified_base 7: mod_base = OTHER; note = 2'-O-methyluridine-3'-phosphate
  modified_base 8: mod_base = OTHER; note = 2'-fluorocytidine-3'-phosphate
  modified_base 9: mod_base = OTHER; note = 2'-fluoroadenosine-3'-phosphate
  modified_base 10: mod_base = OTHER; note = 2'-O-methylguanosine-3'-phosphate
  modified_base 11: mod_base = OTHER; note = 2'-O-methylcytidine-3'-phosphate
  modified_base 12: mod_base = OTHER; note = 2'-O-methylcytidine-3'-phosphate
  modified_base 13: mod_base = OTHER; note = 2'-O-methyladenosine-3'-phosphate
  modified_base 14: mod_base = OTHER; note = 2'-fluoroadenosine-3'-phosphate
  modified_base 15: mod_base = OTHER; note = 2'-O-methyladenosine-3'-phosphate
  modified_base 16: mod_base = OTHER; note = 2'-fluoroguanosine-3'-phosphate
  modified_base 17: mod_base = OTHER; note = 2'-O-methyluridine-3'-phosphate
  modified_base 18: mod_base = OTHER; note = 2'-O-methyluridine-3'-phosphate
  modified_base 19: mod_base = OTHER; note = 2'-O-methyluridine-3'-phosphate
  modified_base 20: mod_base = OTHER; note = 2'-O-methylcytidine-3'-phosphate
  modified_base 21: mod_base = OTHER; note = 2'-O-methyluridine-3'-phosphorothioate
  modified_base 22: mod_base = OTHER; note = 2'-O-methyluridine-3'-phosphorothioate
  modified_base 23: mod_base = OTHER; note = 2'-O-methylcytidine-3'-phosphate
atattatcagccaaagtttcttc

SEQ ID NO: 2254 - RNA, 21 nt, synthetic construct
  misc_feature 1..21: note = Description of Artificial Sequence: Synthetic oligonucleotide
  source 1..21: mol_type = other RNA
  modified_base 1: mod_base = OTHER; note = 2'-O-methylguanosine-3'- phosphorothioate
  modified_base 2: mod_base = OTHER; note = 2'-O-methyladenosine-3'- phosphorothioate
  modified_base 3: mod_base = OTHER; note = 2'-O-methyluridine-3'-phosphate
  modified_base 4: mod_base = OTHER; note = 2'-O-methylguanosine-3'-phosphate
  modified_base 5: mod_base = OTHER; note = 2'-O-methyladenosine-3'-phosphate
  modified_base 6: mod_base = OTHER; note = 2'-O-methyladenosine-3'-phosphate
  modified_base 7: mod_base = OTHER; note = 2'-fluoroguanosine-3'-phosphate
  modified_base 8: mod_base = OTHER; note = 2'-O-methyladenosine-3'-phosphate
  modified_base 9: mod_base = OTHER; note = 2'-fluoroadenosine-3'-phosphate
  modified_base 10: mod_base = OTHER; note = 2'-fluoroadenosine-3'-phosphate
  modified_base 11: mod_base = OTHER; note = 2'-fluorocytidine-3'-phosphate
  modified_base 12: mod_base = OTHER; note = 2'-O-methyluridine-3'-phosphate
  modified_base 13: mod_base = OTHER; note = 2'-O-methyluridine-3'-phosphate
  modified_base 14: mod_base = OTHER; note = 2'-O-methyluridine-3'-phosphate
  modified_base 15: mod_base = OTHER; note = 2'-O-methylguanosine-3'-phosphate
  modified_base 16: mod_base = OTHER; note = 2'-O-methylguanosine-3'-phosphate
  modified_base 17: mod_base = OTHER; note = 2'-O-methylcytidine-3'-phosphate
  modified_base 18: mod_base = OTHER; note = 2'-O-methyluridine-3'-phosphate
  modified_base 19: mod_base = OTHER; note = 2'-O-methylguanosine-3'-phosphate
  modified_base 20: mod_base = OTHER; note = 2'-O-methyladenosine-3'-phosphate
  modified_base 21: mod_base = OTHER; note = 2'-O-methyluridine-3'-phosphate attached to N-[tris(N-acetylgalactosamine-alkyl)-amidodecanoyl)]-4-hydr oxyprolinol Hyp-(N-acetylgalactosamine-alkyl)3
gatgaagaaactttggctgat

SEQ ID NO: 2255 - RNA, 23 nt, synthetic construct
  misc_feature 1..23: note = Description of Artificial Sequence: Synthetic oligonucleotide
  source 1..23: mol_type = other RNA
  modified_base 1: mod_base = OTHER; note = 2'-O-methyladenosine-3'- phosphorothioate
  modified_base 2: mod_base = OTHER; note = 2'-fluorouridine -3'-phosphorothioate
  modified_base 3: mod_base = OTHER; note = 2'-O-methylcytidine-3'-phosphate
  modified_base 4: mod_base = OTHER; note = 2'-O-methyladenosine-3'-phosphate
  modified_base 5: mod_base = OTHER; note = 2'-O-methylguanosine-3'-phosphate
  modified_base 6: mod_base = OTHER; note = 2'-fluorocytidine-3'-phosphate
  modified_base 7: mod_base = OTHER; note = 2'-O-methylcytidine-3'-phosphate
  modified_base 8: mod_base = OTHER; note = 2'-fluoroadenosine-3'-phosphate
  modified_base 9: mod_base = OTHER; note = 2'-fluoroadenosine-3'-phosphate
  modified_base 10: mod_base = OTHER; note = 2'-O-methyladenosine-3'-phosphate
  modified_base 11: mod_base = OTHER; note = 2'-O-methylguanosine-3'-phosphate
  modified_base 12: mod_base = OTHER; note = 2'-O-methyluridine-3'-phosphate
  modified_base 13: mod_base = OTHER; note = 2'-O-methyluridine-3'-phosphate
  modified_base 14: mod_base = OTHER; note = 2'-fluorouridine-3'-phosphate
  modified_base 15: mod_base = OTHER; note = 2'-O-methylcytidine-3'-phosphate
  modified_base 16: mod_base = OTHER; note = 2'-fluorouridine-3'-phosphate
  modified_base 17: mod_base = OTHER; note = 2'-O-methyluridine-3'-phosphate
  modified_base 18: mod_base = OTHER; note = 2'-O-methylcytidine-3'-phosphate
  modified_base 19: mod_base = OTHER; note = 2'-O-methyladenosine-3'-phosphate
  modified_base 20: mod_base = OTHER; note = 2'-O-methyluridine-3'-phosphate
  modified_base 21: mod_base = OTHER; note = 2'-O-methylcytidine-3'- phosphorothioate
  modified_base 22: mod_base = OTHER; note = 2'-O-methyladenosine-3'- phosphorothioate
  modified_base 23: mod_base = OTHER; note = 2'-O-methyluridine-3'-phosphate
atcagccaaagtttcttcatcat

SEQ ID NO: 2256 - RNA, 21 nt, synthetic construct
  misc_feature 1..21: note = Description of Artificial Sequence: Synthetic oligonucleotide
  source 1..21: mol_type = other RNA
  modified_base 1: mod_base = OTHER; note = 2'-O-methyluridine-3'-phosphorothioate
  modified_base 2: mod_base = OTHER; note = 2'-O-methylguanosine-3'- phosphorothioate
  modified_base 3: mod_base = OTHER; note = 2'-O-methyladenosine-3'-phosphate
  modified_base 4: mod_base = OTHER; note = 2'-O-methyluridine-3'-phosphate
  modified_base 5: mod_base = OTHER; note = 2'-O-methylguanosine-3'-phosphate
  modified_base 6: mod_base = OTHER; note = 2'-O-methyladenosine-3'-phosphate
  modified_base 7: mod_base = OTHER; note = 2'-fluoroadenosine-3'-phosphate
  modified_base 8: mod_base = OTHER; note = 2'-O-methylguanosine-3'-phosphate
  modified_base 9: mod_base = OTHER; note = 2'-fluoroadenosine-3'-phosphate
  modified_base 10: mod_base = OTHER; note = 2'-fluoroadenosine-3'-phosphate
  modified_base 11: mod_base = OTHER; note = 2'-fluoroadenosine-3'-phosphate
  modified_base 12: mod_base = OTHER; note = 2'-O-methylcytidine-3'-phosphate
  modified_base 13: mod_base = OTHER; note = 2'-O-methyluridine-3'-phosphate
  modified_base 14: mod_base = OTHER; note = 2'-O-methyluridine-3'-phosphate
  modified_base 15: mod_base = OTHER; note = 2'-O-methyluridine-3'-phosphate
  modified_base 16: mod_base = OTHER; note = 2'-O-methylguanosine-3'-phosphate
  modified_base 17: mod_base = OTHER; note = 2'-O-methylguanosine-3'-phosphate
  modified_base 18: mod_base = OTHER; note = 2'-O-methylcytidine-3'-phosphate
  modified_base 19: mod_base = OTHER; note = 2'-O-methyluridine-3'-phosphate
  modified_base 20: mod_base = OTHER; note = 2'-O-methylguanosine-3'-phosphate
  modified_base 21: mod_base = OTHER; note = 2'-O-methyladenosine-3'-phosphate attached to N-[tris(N-acetylgalactosamine-alkyl)-amidodecanoyl)]-4-hydr oxyprolinol Hyp-(N-acetylgalactosamine-alkyl)3
tgatgaagaaactttggctga

SEQ ID NO: 2257 - RNA, 23 nt, synthetic construct
  misc_feature 1..23: note = Description of Artificial Sequence: Synthetic oligonucleotide
  source 1..23: mol_type = other RNA
  modified_base 1: mod_base = OTHER; note = 2'-O-methyluridine-3'-phosphorothioate
  modified_base 2: mod_base = OTHER; note = 2'-fluorocytidine-3'-phosphorothioate
  modified_base 3: mod_base = OTHER; note = 2'-O-methyladenosine-3'-phosphate
  modified_base 4: mod_base = OTHER; note = 2'-O-methylguanosine-3'-phosphate
  modified_base 5: mod_base = OTHER; note = 2'-O-methylcytidine-3'-phosphate
  modified_base 6: mod_base = OTHER; note = 2'-fluorocytidine-3'-phosphate
  modified_base 7: mod_base = OTHER; note = 2'-O-methyladenosine-3'-phosphate
  modified_base 8: mod_base = OTHER; note = 2'-fluoroadenosine-3'-phosphate
  modified_base 9: mod_base = OTHER; note = 2'-fluoroadenosine-3'-phosphate
  modified_base 10: mod_base = OTHER; note = 2'-O-methylguanosine-3'-phosphate
  modified_base 11: mod_base = OTHER; note = 2'-O-methyluridine-3'-phosphate
  modified_base 12: mod_base = OTHER; note = 2'-O-methyluridine-3'-phosphate
  modified_base 13: mod_base = OTHER; note = 2'-O-methyluridine-3'-phosphate
  modified_base 14: mod_base = OTHER; note = 2'-fluorocytidine-3'-phosphate
  modified_base 15: mod_base = OTHER; note = 2'-O-methyluridine-3'-phosphate
  modified_base 16: mod_base = OTHER; note = 2'-fluorouridine-3'-phosphate
  modified_base 17: mod_base = OTHER; note = 2'-O-methylcytidine-3'-phosphate
  modified_base 18: mod_base = OTHER; note = 2'-O-methyladenosine-3'-phosphate
  modified_base 19: mod_base = OTHER; note = 2'-O-methyluridine-3'-phosphate
  modified_base 20: mod_base = OTHER; note = 2'-O-methylcytidine-3'-phosphate
  modified_base 21: mod_base = OTHER; note = 2'-O-methyladenosine-3'- phosphorothioate
  modified_base 22: mod_base = OTHER; note = 2'-O-methyluridine-3'-phosphorothioate
  modified_base 23: mod_base = OTHER; note = 2'-O-methyluridine-3'-phosphate
tcagccaaagtttcttcatcatt

SEQ ID NO: 2258 - RNA, 21 nt, synthetic construct
  misc_feature 1..21: note = Description of Artificial Sequence: Synthetic oligonucleotide
  source 1..21: mol_type = other RNA
  modified_base 1: mod_base = OTHER; note = 2'-O-methylguanosine-3'- phosphorothioate
  modified_base 2: mod_base = OTHER; note = 2'-O-methyladenosine-3'- phosphorothioate
  modified_base 3: mod_base = OTHER; note = 2'-O-methyladenosine-3'-phosphate
  modified_base 4: mod_base = OTHER; note = 2'-O-methyladenosine-3'-phosphate
  modified_base 5: mod_base = OTHER; note = 2'-O-methylguanosine-3'-phosphate
  modified_base 6: mod_base = OTHER; note = 2'-O-methylguanosine-3'-phosphate
  modified_base 7: mod_base = OTHER; note = 2'-fluorouridine-3'-phosphate
  modified_base 8: mod_base = OTHER; note = 2'-O-methylguanosine-3'-phosphate
  modified_base 9: mod_base = OTHER; note = 2'-fluorouridine-3'-phosphate
  modified_base 10: mod_base = OTHER; note = 2'-fluorouridine-3'-phosphate
  modified_base 11: mod_base = OTHER; note = 2'-fluorocytidine-3'-phosphate
  modified_base 12: mod_base = OTHER; note = 2'-O-methyladenosine-3'-phosphate
  modified_base 13: mod_base = OTHER; note = 2'-O-methyladenosine-3'-phosphate
  modified_base 14: mod_base = OTHER; note = 2'-O-methylguanosine-3'-phosphate
  modified_base 15: mod_base = OTHER; note = 2'-O-methyladenosine-3'-phosphate
  modified_base 16: mod_base = OTHER; note = 2'-O-methyluridine-3'-phosphate
  modified_base 17: mod_base = OTHER; note = 2'-O-methylguanosine-3'-phosphate
  modified_base 18: mod_base = OTHER; note = 2'-O-methyluridine-3'-phosphate
  modified_base 19: mod_base = OTHER; note = 2'-O-methylcytidine-3'-phosphate
  modified_base 20: mod_base = OTHER; note = 2'-O-methylcytidine-3'-phosphate
  modified_base 21: mod_base = OTHER; note = 2'-O-methyluridine-3'-phosphate attached to N-[tris(N-acetylgalactosamine-alkyl)-amidodecanoyl)]-4-hydr oxyprolinol Hyp-(N-acetylgalactosamine-alkyl)3
gaaaggtgttcaagatgtcct

SEQ ID NO: 2259 - RNA, 23 nt, synthetic construct
  misc_feature 1..23: note = Description of Artificial Sequence: Synthetic oligonucleotide
  source 1..23: mol_type = other RNA
  modified_base 1: mod_base = OTHER; note = 2'-O-methyladenosine-3'- phosphorothioate
  modified_base 2: mod_base = OTHER; note = 2'-fluoroguanosine-3'-phosphorothioate
  modified_base 3: mod_base = OTHER; note = 2'-O-methylguanosine-3'-phosphate
  modified_base 4: mod_base = OTHER; note = 2'-O-methyladenosine-3'-phosphate
  modified_base 5: mod_base = OTHER; note = 2'-O-methylcytidine-3'-phosphate
  modified_base 6: mod_base = OTHER; note = 2'-fluoroadenosine-3'-phosphate
  modified_base 7: mod_base = OTHER; note = 2'-O-methyluridine-3'-phosphate
  modified_base 8: mod_base = OTHER; note = 2'-fluorocytidine-3'-phosphate
  modified_base 9: mod_base = OTHER; note = 2'-fluorouridine-3'-phosphate
  modified_base 10: mod_base = OTHER; note = 2'-O-methyluridine-3'-phosphate
  modified_base 11: mod_base = OTHER; note = 2'-O-methylguanosine-3'-phosphate
  modified_base 12: mod_base = OTHER; note = 2'-O-methyladenosine-3'-phosphate
  modified_base 13: mod_base = OTHER; note = 2'-O-methyladenosine-3'-phosphate
  modified_base 14: mod_base = OTHER; note = 2'-fluorocytidine-3'-phosphate
  modified_base 15: mod_base = OTHER; note = 2'-O-methyladenosine-3'-phosphate
  modified_base 16: mod_base = OTHER; note = 2'-fluorocytidine-3'-phosphate
  modified_base 17: mod_base = OTHER; note = 2'-O-methylcytidine-3'-phosphate
  modified_base 18: mod_base = OTHER; note = 2'-O-methyluridine-3'-phosphate
  modified_base 19: mod_base = OTHER; note = 2'-O-methyluridine-3'-phosphate
  modified_base 20: mod_base = OTHER; note = 2'-O-methyluridine-3'-phosphate
  modified_base 21: mod_base = OTHER; note = 2'-O-methylcytidine-3'- phosphorothioate
  modified_base 22: mod_base = OTHER; note = 2'-O-methyluridine-3'-phosphorothioate
  modified_base 23: mod_base = OTHER; note = 2'-O-methylcytidine-3'-phosphate
aggacatcttgaacacctttctc

SEQ ID NO: 2260 - RNA, 21 nt, synthetic construct
  misc_feature 1..21: note = Description of Artificial Sequence: Synthetic oligonucleotide
  source 1..21: mol_type = other RNA
  modified_base 1: mod_base = OTHER; note = 2'-O-methyladenosine-3'- phosphorothioate
  modified_base 2: mod_base = OTHER; note = 2'-O-methyladenosine-3'- phosphorothioate
  modified_base 3: mod_base = OTHER; note = 2'-O-methyladenosine-3'-phosphate
  modified_base 4: mod_base = OTHER; note = 2'-O-methylguanosine-3'-phosphate
  modified_base 5: mod_base = OTHER; note = 2'-O-methylguanosine-3'-phosphate
  modified_base 6: mod_base = OTHER; note = 2'-O-methyluridine-3'-phosphate
  modified_base 7: mod_base = OTHER; note = 2'-fluoroguanosine-3'-phosphate
  modified_base 8: mod_base = OTHER; note = 2'-O-methyluridine-3'-phosphate
  modified_base 9: mod_base = OTHER; note = 2'-fluorouridine-3'-phosphate
  modified_base 10: mod_base = OTHER; note = 2'-fluorocytidine-3'-phosphate
  modified_base 11: mod_base = OTHER; note = 2'-fluoroadenosine-3'-phosphate
  modified_base 12: mod_base = OTHER; note = 2'-O-methyladenosine-3'-phosphate
  modified_base 13: mod_base = OTHER; note = 2'-O-methylguanosine-3'-phosphate
  modified_base 14: mod_base = OTHER; note = 2'-O-methyladenosine-3'-phosphate
  modified_base 15: mod_base = OTHER; note = 2'-O-methyluridine-3'-phosphate
  modified_base 16: mod_base = OTHER; note = 2'-O-methylguanosine-3'-phosphate
  modified_base 17: mod_base = OTHER; note = 2'-O-methyluridine-3'-phosphate
  modified_base 18: mod_base = OTHER; note = 2'-O-methylcytidine-3'-phosphate
  modified_base 19: mod_base = OTHER; note = 2'-O-methylcytidine-3'-phosphate
  modified_base 20: mod_base = OTHER; note = 2'-O-methyluridine-3'-phosphate
  modified_base 21: mod_base = OTHER; note = 2'-O-methylcytidine-3'-phosphate attached to N-[tris(N-acetylgalactosamine-alkyl)-amidodecanoyl)]-4-hydr oxyprolinol Hyp-(N-acetylgalactosamine-alkyl)3
aaaggtgttcaagatgtcctc

SEQ ID NO: 2261 - RNA, 23 nt, synthetic construct
  misc_feature 1..23: note = Description of Artificial Sequence: Synthetic oligonucleotide
  source 1..23: mol_type = other RNA
  modified_base 1: mod_base = OTHER; note = 2'-O-methylguanosine-3'- phosphorothioate
  modified_base 2: mod_base = OTHER; note = 2'-fluoroadenosine-3'-phosphorothioate
  modified_base 3: mod_base = OTHER; note = 2'-O-methylguanosine-3'-phosphate
  modified_base 4: mod_base = OTHER; note = 2'-O-methylguanosine-3'-phosphate
  modified_base 5: mod_base = OTHER; note = 2'-O-methyladenosine-3'-phosphate
  modified_base 6: mod_base = OTHER; note = 2'-fluorocytidine-3'-phosphate
  modified_base 7: mod_base = OTHER; note = 2'-O-methyladenosine-3'-phosphate
  modified_base 8: mod_base = OTHER; note = 2'-fluorouridine-3'-phosphate
  modified_base 9: mod_base = OTHER; note = 2'-fluorocytidine-3'-phosphate
  modified_base 10: mod_base = OTHER; note = 2'-O-methyluridine-3'-phosphate
  modified_base 11: mod_base = OTHER; note = 2'-O-methyluridine-3'-phosphate
  modified_base 12: mod_base = OTHER; note = 2'-O-methylguanosine-3'-phosphate
  modified_base 13: mod_base = OTHER; note = 2'-O-methyladenosine-3'-phosphate
  modified_base 14: mod_base = OTHER; note = 2'-fluoroadenosine-3'-phosphate
  modified_base 15: mod_base = OTHER; note = 2'-O-methylcytidine-3'-phosphate
  modified_base 16: mod_base = OTHER; note = 2'-fluoroadenosine-3'-phosphate
  modified_base 17: mod_base = OTHER; note = 2'-O-methylcytidine-3'-phosphate
  modified_base 18: mod_base = OTHER; note = 2'-O-methylcytidine-3'-phosphate
  modified_base 19: mod_base = OTHER; note = 2'-O-methyluridine-3'-phosphate
  modified_base 20: mod_base = OTHER; note = 2'-O-methyluridine-3'-phosphate
  modified_base 21: mod_base = OTHER; note = 2'-O-methyluridine-3'-phosphorothioate
  modified_base 22: mod_base = OTHER; note = 2'-O-methylcytidine-3'- phosphorothioate
  modified_base 23: mod_base = OTHER; note = 2'-O-methyluridine-3'-phosphate
gaggacatcttgaacacctttct

SEQ ID NO: 2262 - RNA, 21 nt, synthetic construct
  misc_feature 1..21: note = Description of Artificial Sequence: Synthetic oligonucleotide
  source 1..21: mol_type = other RNA
  modified_base 1: mod_base = OTHER; note = 2'-O-methylguanosine-3'- phosphorothioate
  modified_base 2: mod_base = OTHER; note = 2'-O-methylguanosine-3'- phosphorothioate
  modified_base 3: mod_base = OTHER; note = 2'-O-methylguanosine-3'-phosphate
  modified_base 4: mod_base = OTHER; note = 2'-O-methyladenosine-3'-phosphate
  modified_base 5: mod_base = OTHER; note = 2'-O-methylguanosine-3'-phosphate
  modified_base 6: mod_base = OTHER; note = 2'-O-methyladenosine-3'-phosphate
  modified_base 7: mod_base = OTHER; note = 2'-fluoroadenosine-3'-phosphate
  modified_base 8: mod_base = OTHER; note = 2'-O-methyladenosine-3'-phosphate
  modified_base 9: mod_base = OTHER; note = 2'-fluoroguanosine-3'-phosphate
  modified_base 10: mod_base = OTHER; note = 2'-fluoroguanosine-3'-phosphate
  modified_base 11: mod_base = OTHER; note = 2'-fluorouridine-3'-phosphate
  modified_base 12: mod_base = OTHER; note = 2'-O-methylguanosine-3'-phosphate
  modified_base 13: mod_base = OTHER; note = 2'-O-methyluridine-3'-phosphate
  modified_base 14: mod_base = OTHER; note = 2'-O-methyluridine-3'-phosphate
  modified_base 15: mod_base = OTHER; note = 2'-O-methylcytidine-3'-phosphate
  modified_base 16: mod_base = OTHER; note = 2'-O-methyladenosine-3'-phosphate
  modified_base 17: mod_base = OTHER; note = 2'-O-methyladenosine-3'-phosphate
  modified_base 18: mod_base = OTHER; note = 2'-O-methylguanosine-3'-phosphate
  modified_base 19: mod_base = OTHER; note = 2'-O-methyladenosine-3'-phosphate
  modified_base 20: mod_base = OTHER; note = 2'-O-methyluridine-3'-phosphate
  modified_base 21: mod_base = OTHER; note = 2'-O-methylguanosine-3'-phosphate attached to N-[tris(N-acetylgalactosamine-alkyl)-amidodecanoyl)]-4-hydr oxyprolinol Hyp-(N-acetylgalactosamine-alkyl)3
gggagaaaggtgttcaagatg

SEQ ID NO: 2263 - RNA, 23 nt, synthetic construct
  misc_feature 1..23: note = Description of Artificial Sequence: Synthetic oligonucleotide
  source 1..23: mol_type = other RNA
  modified_base 1: mod_base = OTHER; note = 2'-O-methylcytidine-3'- phosphorothioate
  modified_base 2: mod_base = OTHER; note = 2'-fluoroadenosine-3'-phosphorothioate
  modified_base 3: mod_base = OTHER; note = 2'-O-methyluridine-3'-phosphate
  modified_base 4: mod_base = OTHER; note = 2'-O-methylcytidine-3'-phosphate
  modified_base 5: mod_base = OTHER; note = 2'-O-methyluridine-3'-phosphate
  modified_base 6: mod_base = OTHER; note = 2'-fluorouridine-3'-phosphate
  modified_base 7: mod_base = OTHER; note = 2'-O-methylguanosine-3'-phosphate
  modified_base 8: mod_base = OTHER; note = 2'-fluoroadenosine-3'-phosphate
  modified_base 9: mod_base = OTHER; note = 2'-fluoroadenosine-3'-phosphate
  modified_base 10: mod_base = OTHER; note = 2'-O-methylcytidine-3'-phosphate
  modified_base 11: mod_base = OTHER; note = 2'-O-methyladenosine-3'-phosphate
  modified_base 12: mod_base = OTHER; note = 2'-O-methylcytidine-3'-phosphate
  modified_base 13: mod_base = OTHER; note = 2'-O-methylcytidine-3'-phosphate
  modified_base 14: mod_base = OTHER; note = 2'-fluorouridine-3'-phosphate
  modified_base 15: mod_base = OTHER; note = 2'-O-methyluridine-3'-phosphate
  modified_base 16: mod_base = OTHER; note = 2'-fluorouridine-3'-phosphate
  modified_base 17: mod_base = OTHER; note = 2'-O-methylcytidine-3'-phosphate
  modified_base 18: mod_base = OTHER; note = 2'-O-methyluridine-3'-phosphate
  modified_base 19: mod_base = OTHER; note = 2'-O-methylcytidine-3'-phosphate
  modified_base 20: mod_base = OTHER; note = 2'-O-methylcytidine-3'-phosphate
  modified_base 21: mod_base = OTHER; note = 2'-O-methylcytidine-3'- phosphorothioate
  modified_base 22: mod_base = OTHER; note = 2'-O-methylcytidine-3'- phosphorothioate
  modified_base 23: mod_base = OTHER; note = 2'-O-methylcytidine-3'-phosphate
catcttgaacacctttctccccc

SEQ ID NO: 2264 - RNA, 21 nt, synthetic construct
  misc_feature 1..21: note = Description of Artificial Sequence: Synthetic oligonucleotide
  source 1..21: mol_type = other RNA
  modified_base 1: mod_base = OTHER; note = 2'-O-methylguanosine-3'- phosphorothioate
  modified_base 2: mod_base = OTHER; note = 2'-O-methylguanosine-3'- phosphorothioate
  modified_base 3: mod_base = OTHER; note = 2'-O-methylguanosine-3'-phosphate
  modified_base 4: mod_base = OTHER; note = 2'-O-methylguanosine-3'-phosphate
  modified_base 5: mod_base = OTHER; note = 2'-O-methyladenosine-3'-phosphate
  modified_base 6: mod_base = OTHER; note = 2'-O-methylguanosine-3'-phosphate
  modified_base 7: mod_base = OTHER; note = 2'-fluoroadenosine-3'-phosphate
  modified_base 8: mod_base = OTHER; note = 2'-O-methyladenosine-3'-phosphate
  modified_base 9: mod_base = OTHER; note = 2'-fluoroadenosine-3'-phosphate
  modified_base 10: mod_base = OTHER; note = 2'-fluoroguanosine-3'-phosphate
  modified_base 11: mod_base = OTHER; note = 2'-fluoroguanosine-3'-phosphate
  modified_base 12: mod_base = OTHER; note = 2'-O-methyluridine-3'-phosphate
  modified_base 13: mod_base = OTHER; note = 2'-O-methylguanosine-3'-phosphate
  modified_base 14: mod_base = OTHER; note = 2'-O-methyluridine-3'-phosphate
  modified_base 15: mod_base = OTHER; note = 2'-O-methyluridine-3'-phosphate
  modified_base 16: mod_base = OTHER; note = 2'-O-methylcytidine-3'-phosphate
  modified_base 17: mod_base = OTHER; note = 2'-O-methyladenosine-3'-phosphate
  modified_base 18: mod_base = OTHER; note = 2'-O-methyladenosine-3'-phosphate
  modified_base 19: mod_base = OTHER; note = 2'-O-methylguanosine-3'-phosphate
  modified_base 20: mod_base = OTHER; note = 2'-O-methyladenosine-3'-phosphate
  modified_base 21: mod_base = OTHER; note = 2'-O-methyluridine-3'-phosphate attached to N-[tris(N-acetylgalactosamine-alkyl)-amidodecanoyl)]-4-hydr oxyprolinol Hyp-(N-acetylgalactosamine-alkyl)3
ggggagaaaggtgttcaagat

SEQ ID NO: 2265 - RNA, 23 nt, synthetic construct
  misc_feature 1..23: note = Description of Artificial Sequence: Synthetic oligonucleotide
  source 1..23: mol_type = other RNA
  modified_base 1: mod_base = OTHER; note = 2'-O-methyladenosine-3'- phosphorothioate
  modified_base 2: mod_base = OTHER; note = 2'-fluorouridine -3'-phosphorothioate
  modified_base 3: mod_base = OTHER; note = 2'-O-methylcytidine-3'-phosphate
  modified_base 4: mod_base = OTHER; note = 2'-O-methyluridine-3'-phosphate
  modified_base 5: mod_base = OTHER; note = 2'-O-methyluridine-3'-phosphate
  modified_base 6: mod_base = OTHER; note = 2'-fluoroguanosine-3'-phosphate
  modified_base 7: mod_base = OTHER; note = 2'-O-methyladenosine-3'-phosphate
  modified_base 8: mod_base = OTHER; note = 2'-fluoroadenosine-3'-phosphate
  modified_base 9: mod_base = OTHER; note = 2'-fluorocytidine-3'-phosphate
  modified_base 10: mod_base = OTHER; note = 2'-O-methyladenosine-3'-phosphate
  modified_base 11: mod_base = OTHER; note = 2'-O-methylcytidine-3'-phosphate
  modified_base 12: mod_base = OTHER; note = 2'-O-methylcytidine-3'-phosphate
  modified_base 13: mod_base = OTHER; note = 2'-O-methyluridine-3'-phosphate
  modified_base 14: mod_base = OTHER; note = 2'-fluorouridine-3'-phosphate
  modified_base 15: mod_base = OTHER; note = 2'-O-methyluridine-3'-phosphate
  modified_base 16: mod_base = OTHER; note = 2'-fluorocytidine-3'-phosphate
  modified_base 17: mod_base = OTHER; note = 2'-O-methyluridine-3'-phosphate
  modified_base 18: mod_base = OTHER; note = 2'-O-methylcytidine-3'-phosphate
  modified_base 19: mod_base = OTHER; note = 2'-O-methylcytidine-3'-phosphate
  modified_base 20: mod_base = OTHER; note = 2'-O-methylcytidine-3'-phosphate
  modified_base 21: mod_base = OTHER; note = 2'-O-methylcytidine-3'- phosphorothioate
  modified_base 22: mod_base = OTHER; note = 2'-O-methylcytidine-3'- phosphorothioate
  modified_base 23: mod_base = OTHER; note = 2'-O-methyluridine-3'-phosphate
atcttgaacacctttctccccct

SEQ ID NO: 2266 - RNA, 21 nt, synthetic construct
  misc_feature 1..21: note = Description of Artificial Sequence: Synthetic oligonucleotide
  source 1..21: mol_type = other RNA
  modified_base 1: mod_base = OTHER; note = 2'-O-methyladenosine-3'- phosphorothioate
  modified_base 2: mod_base = OTHER; note = 2'-O-methyluridine-3'-phosphorothioate
  modified_base 3: mod_base = OTHER; note = 2'-O-methylcytidine-3'-phosphate
  modified_base 4: mod_base = OTHER; note = 2'-O-methyluridine-3'-phosphate
  modified_base 5: mod_base = OTHER; note = 2'-O-methyluridine-3'-phosphate
  modified_base 6: mod_base = OTHER; note = 2'-O-methylguanosine-3'-phosphate
  modified_base 7: mod_base = OTHER; note = 2'-fluoroguanosine-3'-phosphate
  modified_base 8: mod_base = OTHER; note = 2'-O-methyluridine-3'-phosphate
  modified_base 9: mod_base = OTHER; note = 2'-fluoroguanosine-3'-phosphate
  modified_base 10: mod_base = OTHER; note = 2'-fluorouridine-3'-phosphate
  modified_base 11: mod_base = OTHER; note = 2'-fluorocytidine-3'-phosphate
  modified_base 12: mod_base = OTHER; note = 2'-O-methylguanosine-3'-phosphate
  modified_base 13: mod_base = OTHER; note = 2'-O-methyladenosine-3'-phosphate
  modified_base 14: mod_base = OTHER; note = 2'-O-methyladenosine-3'-phosphate
  modified_base 15: mod_base = OTHER; note = 2'-O-methyluridine-3'-phosphate
  modified_base 16: mod_base = OTHER; note = 2'-O-methylcytidine-3'-phosphate
  modified_base 17: mod_base = OTHER; note = 2'-O-methyladenosine-3'-phosphate
  modified_base 18: mod_base = OTHER; note = 2'-O-methyluridine-3'-phosphate
  modified_base 19: mod_base = OTHER; note = 2'-O-methylguanosine-3'-phosphate
  modified_base 20: mod_base = OTHER; note = 2'-O-methylguanosine-3'-phosphate
  modified_base 21: mod_base = OTHER; note = 2'-O-methylguanosine-3'-phosphate attached to N-[tris(N-acetylgalactosamine-alkyl)-amidodecanoyl)]-4-hydr oxyprolinol Hyp-(N-acetylgalactosamine-alkyl)3
atcttggtgtcgaatcatggg

SEQ ID NO: 2267 - RNA, 23 nt, synthetic construct
  misc_feature 1..23: note = Description of Artificial Sequence: Synthetic oligonucleotide
  source 1..23: mol_type = other RNA
  modified_base 1: mod_base = OTHER; note = 2'-O-methylcytidine-3'- phosphorothioate
  modified_base 2: mod_base = OTHER; note = 2'-fluorocytidine-3'-phosphorothioate
  modified_base 3: mod_base = OTHER; note = 2'-O-methylcytidine-3'-phosphate
  modified_base 4: mod_base = OTHER; note = 2'-O-methyladenosine-3'-phosphate
  modified_base 5: mod_base = OTHER; note = 2'-O-methyluridine-3'-phosphate
  modified_base 6: mod_base = OTHER; note = 2'-fluoroguanosine-3'-phosphate
  modified_base 7: mod_base = OTHER; note = 2'-O-methyladenosine-3'-phosphate
  modified_base 8: mod_base = OTHER; note = 2'-fluorouridine-3'-phosphate
  modified_base 9: mod_base = OTHER; note = 2'-fluorouridine-3'-phosphate
  modified_base 10: mod_base = OTHER; note = 2'-O-methylcytidine-3'-phosphate
  modified_base 11: mod_base = OTHER; note = 2'-O-methylguanosine-3'-phosphate
  modified_base 12: mod_base = OTHER; note = 2'-O-methyladenosine-3'-phosphate
  modified_base 13: mod_base = OTHER; note = 2'-O-methylcytidine-3'-phosphate
  modified_base 14: mod_base = OTHER; note = 2'-fluoroadenosine-3'-phosphate
  modified_base 15: mod_base = OTHER; note = 2'-O-methylcytidine-3'-phosphate
  modified_base 16: mod_base = OTHER; note = 2'-fluorocytidine-3'-phosphate
  modified_base 17: mod_base = OTHER; note = 2'-O-methyladenosine-3'-phosphate
  modified_base 18: mod_base = OTHER; note = 2'-O-methyladenosine-3'-phosphate
  modified_base 19: mod_base = OTHER; note = 2'-O-methylguanosine-3'-phosphate
  modified_base 20: mod_base = OTHER; note = 2'-O-methyladenosine-3'-phosphate
  modified_base 21: mod_base = OTHER; note = 2'-O-methyluridine-3'-phosphorothioate
  modified_base 22: mod_base = OTHER; note = 2'-O-methylcytidine-3'- phosphorothioate
  modified_base 23: mod_base = OTHER; note = 2'-O-methylcytidine-3'-phosphate
cccatgattcgacaccaagatcc

SEQ ID NO: 2268 - RNA, 21 nt, synthetic construct
  misc_feature 1..21: note = Description of Artificial Sequence: Synthetic oligonucleotide
  source 1..21: mol_type = other RNA
  modified_base 1: mod_base = OTHER; note = 2'-O-methyluridine-3'-phosphorothioate
  modified_base 2: mod_base = OTHER; note = 2'-O-methylcytidine-3'- phosphorothioate
  modified_base 3: mod_base = OTHER; note = 2'-O-methyluridine-3'-phosphate
  modified_base 4: mod_base = OTHER; note = 2'-O-methyluridine-3'-phosphate
  modified_base 5: mod_base = OTHER; note = 2'-O-methylguanosine-3'-phosphate
  modified_base 6: mod_base = OTHER; note = 2'-O-methylguanosine-3'-phosphate
  modified_base 7: mod_base = OTHER; note = 2'-fluorouridine-3'-phosphate
  modified_base 8: mod_base = OTHER; note = 2'-O-methylguanosine-3'-phosphate
  modified_base 9: mod_base = OTHER; note = 2'-fluorouridine-3'-phosphate
  modified_base 10: mod_base = OTHER; note = 2'-fluorocytidine-3'-phosphate
  modified_base 11: mod_base = OTHER; note = 2'-fluoroguanosine-3'-phosphate
  modified_base 12: mod_base = OTHER; note = 2'-O-methyladenosine-3'-phosphate
  modified_base 13: mod_base = OTHER; note = 2'-O-methyladenosine-3'-phosphate
  modified_base 14: mod_base = OTHER; note = 2'-O-methyluridine-3'-phosphate
  modified_base 15: mod_base = OTHER; note = 2'-O-methylcytidine-3'-phosphate
  modified_base 16: mod_base = OTHER; note = 2'-O-methyladenosine-3'-phosphate
  modified_base 17: mod_base = OTHER; note = 2'-O-methyluridine-3'-phosphate
  modified_base 18: mod_base = OTHER; note = 2'-O-methylguanosine-3'-phosphate
  modified_base 19: mod_base = OTHER; note = 2'-O-methylguanosine-3'-phosphate
  modified_base 20: mod_base = OTHER; note = 2'-O-methylguanosine-3'-phosphate
  modified_base 21: mod_base = OTHER; note = 2'-O-methylguanosine-3'-phosphate attached to N-[tris(N-acetylgalactosamine-alkyl)-amidodecanoyl)]-4-hydr oxyprolinol Hyp-(N-acetylgalactosamine-alkyl)3
tcttggtgtcgaatcatgggg

SEQ ID NO: 2269 - RNA, 23 nt, synthetic construct
  misc_feature 1..23: note = Description of Artificial Sequence: Synthetic oligonucleotide
  source 1..23: mol_type = other RNA
  modified_base 1: mod_base = OTHER; note = 2'-O-methylcytidine-3'- phosphorothioate
  modified_base 2: mod_base = OTHER; note = 2'-fluorocytidine-3'-phosphorothioate
  modified_base 3: mod_base = OTHER; note = 2'-O-methylcytidine-3'-phosphate
  modified_base 4: mod_base = OTHER; note = 2'-O-methylcytidine-3'-phosphate
  modified_base 5: mod_base = OTHER; note = 2'-O-methyladenosine-3'-phosphate
  modified_base 6: mod_base = OTHER; note = 2'-fluorouridine-3'-phosphate
  modified_base 7: mod_base = OTHER; note = 2'-O-methylguanosine-3'-phosphate
  modified_base 8: mod_base = OTHER; note = 2'-fluoroadenosine-3'-phosphate
  modified_base 9: mod_base = OTHER; note = 2'-fluorouridine-3'-phosphate
  modified_base 10: mod_base = OTHER; note = 2'-O-methyluridine-3'-phosphate
  modified_base 11: mod_base = OTHER; note = 2'-O-methylcytidine-3'-phosphate
  modified_base 12: mod_base = OTHER; note = 2'-O-methylguanosine-3'-phosphate
  modified_base 13: mod_base = OTHER; note = 2'-O-methyladenosine-3'-phosphate
  modified_base 14: mod_base = OTHER; note = 2'-fluorocytidine-3'-phosphate
  modified_base 15: mod_base = OTHER; note = 2'-O-methyladenosine-3'-phosphate
  modified_base 16: mod_base = OTHER; note = 2'-fluorocytidine-3'-phosphate
  modified_base 17: mod_base = OTHER; note = 2'-O-methylcytidine-3'-phosphate
  modified_base 18: mod_base = OTHER; note = 2'-O-methyladenosine-3'-phosphate
  modified_base 19: mod_base = OTHER; note = 2'-O-methyladenosine-3'-phosphate
  modified_base 20: mod_base = OTHER; note = 2'-O-methylguanosine-3'-phosphate
  modified_base 21: mod_base = OTHER; note = 2'-O-methyladenosine-3'- phosphorothioate
  modified_base 22: mod_base = OTHER; note = 2'-O-methyluridine-3'-phosphorothioate
  modified_base 23: mod_base = OTHER; note = 2'-O-methylcytidine-3'-phosphate
ccccatgattcgacaccaagatc

SEQ ID NO: 2270 - RNA, 21 nt, synthetic construct
  misc_feature 1..21: note = Description of Artificial Sequence: Synthetic oligonucleotide
  source 1..21: mol_type = other RNA
  modified_base 1: mod_base = OTHER; note = 2'-O-methyluridine-3'-phosphorothioate
  modified_base 2: mod_base = OTHER; note = 2'-O-methylguanosine-3'- phosphorothioate
  modified_base 3: mod_base = OTHER; note = 2'-O-methylguanosine-3'-phosphate
  modified_base 4: mod_base = OTHER; note = 2'-O-methylguanosine-3'-phosphate
  modified_base 5: mod_base = OTHER; note = 2'-O-methyladenosine-3'-phosphate
  modified_base 6: mod_base = OTHER; note = 2'-O-methyluridine-3'-phosphate
  modified_base 7: mod_base = OTHER; note = 2'-fluorocytidine-3'-phosphate
  modified_base 8: mod_base = OTHER; note = 2'-O-methyluridine-3'-phosphate
  modified_base 9: mod_base = OTHER; note = 2'-fluorouridine-3'-phosphate
  modified_base 10: mod_base = OTHER; note = 2'-fluoroguanosine-3'-phosphate
  modified_base 11: mod_base = OTHER; note = 2'-fluoroguanosine-3'-phosphate
  modified_base 12: mod_base = OTHER; note = 2'-O-methyluridine-3'-phosphate
  modified_base 13: mod_base = OTHER; note = 2'-O-methylguanosine-3'-phosphate
  modified_base 14: mod_base = OTHER; note = 2'-O-methyluridine-3'-phosphate
  modified_base 15: mod_base = OTHER; note = 2'-O-methylcytidine-3'-phosphate
  modified_base 16: mod_base = OTHER; note = 2'-O-methylguanosine-3'-phosphate
  modified_base 17: mod_base = OTHER; note = 2'-O-methyladenosine-3'-phosphate
  modified_base 18: mod_base = OTHER; note = 2'-O-methyladenosine-3'-phosphate
  modified_base 19: mod_base = OTHER; note = 2'-O-methyluridine-3'-phosphate
  modified_base 20: mod_base = OTHER; note = 2'-O-methylcytidine-3'-phosphate
  modified_base 21: mod_base = OTHER; note = 2'-O-methyladenosine-3'-phosphate attached to N-[tris(N-acetylgalactosamine-alkyl)-amidodecanoyl)]-4-hydr oxyprolinol Hyp-(N-acetylgalactosamine-alkyl)3
tgggatcttggtgtcgaatca

SEQ ID NO: 2271 - RNA, 23 nt, synthetic construct
  misc_feature 1..23: note = Description of Artificial Sequence: Synthetic oligonucleotide
  source 1..23: mol_type = other RNA
  modified_base 1: mod_base = OTHER; note = 2'-O-methyluridine-3'-phosphorothioate
  modified_base 2: mod_base = OTHER; note = 2'-fluoroguanosine-3'-phosphorothioate
  modified_base 3: mod_base = OTHER; note = 2'-O-methyladenosine-3'-phosphate
  modified_base 4: mod_base = OTHER; note = 2'-O-methyluridine-3'-phosphate
  modified_base 5: mod_base = OTHER; note = 2'-O-methyluridine-3'-phosphate
  modified_base 6: mod_base = OTHER; note = 2'-fluorocytidine-3'-phosphate
  modified_base 7: mod_base = OTHER; note = 2'-O-methylguanosine-3'-phosphate
  modified_base 8: mod_base = OTHER; note = 2'-fluoroadenosine-3'-phosphate
  modified_base 9: mod_base = OTHER; note = 2'-fluorocytidine-3'-phosphate
  modified_base 10: mod_base = OTHER; note = 2'-O-methyladenosine-3'-phosphate
  modified_base 11: mod_base = OTHER; note = 2'-O-methylcytidine-3'-phosphate
  modified_base 12: mod_base = OTHER; note = 2'-O-methylcytidine-3'-phosphate
  modified_base 13: mod_base = OTHER; note = 2'-O-methyladenosine-3'-phosphate
  modified_base 14: mod_base = OTHER; note = 2'-fluoroadenosine-3'-phosphate
  modified_base 15: mod_base = OTHER; note = 2'-O-methylguanosine-3'-phosphate
  modified_base 16: mod_base = OTHER; note = 2'-fluoroadenosine-3'-phosphate
  modified_base 17: mod_base = OTHER; note = 2'-O-methyluridine-3'-phosphate
  modified_base 18: mod_base = OTHER; note = 2'-O-methylcytidine-3'-phosphate
  modified_base 19: mod_base = OTHER; note = 2'-O-methylcytidine-3'-phosphate
  modified_base 20: mod_base = OTHER; note = 2'-O-methylcytidine-3'-phosphate
  modified_base 21: mod_base = OTHER; note = 2'-O-methyladenosine-3'- phosphorothioate
  modified_base 22: mod_base = OTHER; note = 2'-O-methyluridine-3'-phosphorothioate
  modified_base 23: mod_base = OTHER; note = 2'-O-methyluridine-3'-phosphate
tgattcgacaccaagatcccatt

SEQ ID NO: 2272 - RNA, 21 nt, synthetic construct
  misc_feature 1..21: note = Description of Artificial Sequence: Synthetic oligonucleotide
  source 1..21: mol_type = other RNA
  modified_base 1: mod_base = OTHER; note = 2'-O-methyladenosine-3'- phosphorothioate
  modified_base 2: mod_base = OTHER; note = 2'-O-methyluridine-3'-phosphorothioate
  modified_base 3: mod_base = OTHER; note = 2'-O-methylguanosine-3'-phosphate
  modified_base 4: mod_base = OTHER; note = 2'-O-methylguanosine-3'-phosphate
  modified_base 5: mod_base = OTHER; note = 2'-O-methylguanosine-3'-phosphate
  modified_base 6: mod_base = OTHER; note = 2'-O-methyladenosine-3'-phosphate
  modified_base 7: mod_base = OTHER; note = 2'-fluorouridine-3'-phosphate
  modified_base 8: mod_base = OTHER; note = 2'-O-methylcytidine-3'-phosphate
  modified_base 9: mod_base = OTHER; note = 2'-fluorouridine-3'-phosphate
  modified_base 10: mod_base = OTHER; note = 2'-fluorouridine-3'-phosphate
  modified_base 11: mod_base = OTHER; note = 2'-fluoroguanosine-3'-phosphate
  modified_base 12: mod_base = OTHER; note = 2'-O-methylguanosine-3'-phosphate
  modified_base 13: mod_base = OTHER; note = 2'-O-methyluridine-3'-phosphate
  modified_base 14: mod_base = OTHER; note = 2'-O-methylguanosine-3'-phosphate
  modified_base 15: mod_base = OTHER; note = 2'-O-methyluridine-3'-phosphate
  modified_base 16: mod_base = OTHER; note = 2'-O-methylcytidine-3'-phosphate
  modified_base 17: mod_base = OTHER; note = 2'-O-methylguanosine-3'-phosphate
  modified_base 18: mod_base = OTHER; note = 2'-O-methyladenosine-3'-phosphate
  modified_base 19: mod_base = OTHER; note = 2'-O-methyladenosine-3'-phosphate
  modified_base 20: mod_base = OTHER; note = 2'-O-methyluridine-3'-phosphate
  modified_base 21: mod_base = OTHER; note = 2'-O-methylcytidine-3'-phosphate attached to N-[tris(N-acetylgalactosamine-alkyl)-amidodecanoyl)]-4-hydr oxyprolinol Hyp-(N-acetylgalactosamine-alkyl)3
atgggatcttggtgtcgaatc

SEQ ID NO: 2273 - RNA, 23 nt, synthetic construct
  misc_feature 1..23: note = Description of Artificial Sequence: Synthetic oligonucleotide
  source 1..23: mol_type = other RNA
  modified_base 1: mod_base = OTHER; note = 2'-O-methylguanosine-3'- phosphorothioate
  modified_base 2: mod_base = OTHER; note = 2'-fluoroadenosine-3'-phosphorothioate
  modified_base 3: mod_base = OTHER; note = 2'-O-methyluridine-3'-phosphate
  modified_base 4: mod_base = OTHER; note = 2'-O-methyluridine-3'-phosphate
  modified_base 5: mod_base = OTHER; note = 2'-O-methylcytidine-3'-phosphate
  modified_base 6: mod_base = OTHER; note = 2'-fluoroguanosine-3'-phosphate
  modified_base 7: mod_base = OTHER; note = 2'-O-methyladenosine-3'-phosphate
  modified_base 8: mod_base = OTHER; note = 2'-fluorocytidine-3'-phosphate
  modified_base 9: mod_base = OTHER; note = 2'-fluoroadenosine-3'-phosphate
  modified_base 10: mod_base = OTHER; note = 2'-O-methylcytidine-3'-phosphate
  modified_base 11: mod_base = OTHER; note = 2'-O-methylcytidine-3'-phosphate
  modified_base 12: mod_base = OTHER; note = 2'-O-methyladenosine-3'-phosphate
  modified_base 13: mod_base = OTHER; note = 2'-O-methyladenosine-3'-phosphate
  modified_base 14: mod_base = OTHER; note = 2'-fluoroguanosine-3'-phosphate
  modified_base 15: mod_base = OTHER; note = 2'-O-methyladenosine-3'-phosphate
  modified_base 16: mod_base = OTHER; note = 2'-fluorouridine-3'-phosphate
  modified_base 17: mod_base = OTHER; note = 2'-O-methylcytidine-3'-phosphate
  modified_base 18: mod_base = OTHER; note = 2'-O-methylcytidine-3'-phosphate
  modified_base 19: mod_base = OTHER; note = 2'-O-methylcytidine-3'-phosphate
  modified_base 20: mod_base = OTHER; note = 2'-O-methyladenosine-3'-phosphate
  modified_base 21: mod_base = OTHER; note = 2'-O-methyluridine-3'-phosphorothioate
  modified_base 22: mod_base = OTHER; note = 2'-O-methyluridine-3'-phosphorothioate
  modified_base 23: mod_base = OTHER; note = 2'-O-methylcytidine-3'-phosphate
gattcgacaccaagatcccattc

SEQ ID NO: 2274 - RNA, 21 nt, synthetic construct
  misc_feature 1..21: note = Description of Artificial Sequence: Synthetic oligonucleotide
  source 1..21: mol_type = other RNA
  modified_base 1: mod_base = OTHER; note = 2'-O-methylguanosine-3'- phosphorothioate
  modified_base 2: mod_base = OTHER; note = 2'-O-methylcytidine-3'- phosphorothioate
  modified_base 3: mod_base = OTHER; note = 2'-O-methyluridine-3'-phosphate
  modified_base 4: mod_base = OTHER; note = 2'-O-methyladenosine-3'-phosphate
  modified_base 5: mod_base = OTHER; note = 2'-O-methylcytidine-3'-phosphate
  modified_base 6: mod_base = OTHER; note = 2'-O-methyladenosine-3'-phosphate
  modified_base 7: mod_base = OTHER; note = 2'-fluoroadenosine-3'-phosphate
  modified_base 8: mod_base = OTHER; note = 2'-O-methylguanosine-3'-phosphate
  modified_base 9: mod_base = OTHER; note = 2'-fluoroguanosine-3'-phosphate
  modified_base 10: mod_base = OTHER; note = 2'-fluorocytidine-3'-phosphate
  modified_base 11: mod_base = OTHER; note = 2'-fluorocytidine-3'-phosphate
  modified_base 12: mod_base = OTHER; note = 2'-O-methyladenosine-3'-phosphate
  modified_base 13: mod_base = OTHER; note = 2'-O-methyluridine-3'-phosphate
  modified_base 14: mod_base = OTHER; note = 2'-O-methyladenosine-3'-phosphate
  modified_base 15: mod_base = OTHER; note = 2'-O-methyluridine-3'-phosphate
  modified_base 16: mod_base = OTHER; note = 2'-O-methyluridine-3'-phosphate
  modified_base 17: mod_base = OTHER; note = 2'-O-methyluridine-3'-phosphate
  modified_base 18: mod_base = OTHER; note = 2'-O-methylguanosine-3'-phosphate
  modified_base 19: mod_base = OTHER; note = 2'-O-methyluridine-3'-phosphate
  modified_base 20: mod_base = OTHER; note = 2'-O-methylguanosine-3'-phosphate
  modified_base 21: mod_base = OTHER; note = 2'-O-methyladenosine-3'-phosphate attached to N-[tris(N-acetylgalactosamine-alkyl)-amidodecanoyl)]-4-hydr oxyprolinol Hyp-(N-acetylgalactosamine-alkyl)3
gctacaaggccatatttgtga

SEQ ID NO: 2275 - RNA, 23 nt, synthetic construct
  misc_feature 1..23: note = Description of Artificial Sequence: Synthetic oligonucleotide
  source 1..23: mol_type = other RNA
  modified_base 1: mod_base = OTHER; note = 2'-O-methyluridine-3'-phosphorothioate
  modified_base 2: mod_base = OTHER; note = 2'-fluorocytidine-3'-phosphorothioate
  modified_base 3: mod_base = OTHER; note = 2'-O-methyladenosine-3'-phosphate
  modified_base 4: mod_base = OTHER; note = 2'-O-methylcytidine-3'-phosphate
  modified_base 5: mod_base = OTHER; note = 2'-O-methyladenosine-3'-phosphate
  modified_base 6: mod_base = OTHER; note = 2'-fluoroadenosine-3'-phosphate
  modified_base 7: mod_base = OTHER; note = 2'-O-methyladenosine-3'-phosphate
  modified_base 8: mod_base = OTHER; note = 2'-fluorouridine-3'-phosphate
  modified_base 9: mod_base = OTHER; note = 2'-fluoroadenosine-3'-phosphate
  modified_base 10: mod_base = OTHER; note = 2'-O-methyluridine-3'-phosphate
  modified_base 11: mod_base = OTHER; note = 2'-O-methylguanosine-3'-phosphate
  modified_base 12: mod_base = OTHER; note = 2'-O-methylguanosine-3'-phosphate
  modified_base 13: mod_base = OTHER; note = 2'-O-methylcytidine-3'-phosphate
  modified_base 14: mod_base = OTHER; note = 2'-fluorocytidine-3'-phosphate
  modified_base 15: mod_base = OTHER; note = 2'-O-methyluridine-3'-phosphate
  modified_base 16: mod_base = OTHER; note = 2'-fluorouridine-3'-phosphate
  modified_base 17: mod_base = OTHER; note = 2'-O-methylguanosine-3'-phosphate
  modified_base 18: mod_base = OTHER; note = 2'-O-methyluridine-3'-phosphate
  modified_base 19: mod_base = OTHER; note = 2'-O-methyladenosine-3'-phosphate
  modified_base 20: mod_base = OTHER; note = 2'-O-methylguanosine-3'-phosphate
  modified_base 21: mod_base = OTHER; note = 2'-O-methylcytidine-3'- phosphorothioate
  modified_base 22: mod_base = OTHER; note = 2'-O-methylcytidine-3'- phosphorothioate
  modified_base 23: mod_base = OTHER; note = 2'-O-methylcytidine-3'-phosphate
tcacaaatatggccttgtagccc

SEQ ID NO: 2276 - RNA, 21 nt, synthetic construct
  misc_feature 1..21: note = Description of Artificial Sequence: Synthetic oligonucleotide
  source 1..21: mol_type = other RNA
  modified_base 1: mod_base = OTHER; note = 2'-O-methylcytidine-3'- phosphorothioate
  modified_base 2: mod_base = OTHER; note = 2'-O-methyluridine-3'-phosphorothioate
  modified_base 3: mod_base = OTHER; note = 2'-O-methyladenosine-3'-phosphate
  modified_base 4: mod_base = OTHER; note = 2'-O-methylcytidine-3'-phosphate
  modified_base 5: mod_base = OTHER; note = 2'-O-methyladenosine-3'-phosphate
  modified_base 6: mod_base = OTHER; note = 2'-O-methyladenosine-3'-phosphate
  modified_base 7: mod_base = OTHER; note = 2'-fluoroguanosine-3'-phosphate
  modified_base 8: mod_base = OTHER; note = 2'-O-methylguanosine-3'-phosphate
  modified_base 9: mod_base = OTHER; note = 2'-fluorocytidine-3'-phosphate
  modified_base 10: mod_base = OTHER; note = 2'-fluorocytidine-3'-phosphate
  modified_base 11: mod_base = OTHER; note = 2'-fluoroadenosine-3'-phosphate
  modified_base 12: mod_base = OTHER; note = 2'-O-methyluridine-3'-phosphate
  modified_base 13: mod_base = OTHER; note = 2'-O-methyladenosine-3'-phosphate
  modified_base 14: mod_base = OTHER; note = 2'-O-methyluridine-3'-phosphate
  modified_base 15: mod_base = OTHER; note = 2'-O-methyluridine-3'-phosphate
  modified_base 16: mod_base = OTHER; note = 2'-O-methyluridine-3'-phosphate
  modified_base 17: mod_base = OTHER; note = 2'-O-methylguanosine-3'-phosphate
  modified_base 18: mod_base = OTHER; note = 2'-O-methyluridine-3'-phosphate
  modified_base 19: mod_base = OTHER; note = 2'-O-methylguanosine-3'-phosphate
  modified_base 20: mod_base = OTHER; note = 2'-O-methyladenosine-3'-phosphate
  modified_base 21: mod_base = OTHER; note = 2'-O-methylcytidine-3'-phosphate attached to N-[tris(N-acetylgalactosamine-alkyl)-amidodecanoyl)]-4-hydr oxyprolinol Hyp-(N-acetylgalactosamine-alkyl)3
ctacaaggccatatttgtgac

SEQ ID NO: 2277 - RNA, 23 nt, synthetic construct
  misc_feature 1..23: note = Description of Artificial Sequence: Synthetic oligonucleotide
  source 1..23: mol_type = other RNA
  modified_base 1: mod_base = OTHER; note = 2'-O-methylguanosine-3'- phosphorothioate
  modified_base 2: mod_base = OTHER; note = 2'-fluorouridine -3'-phosphorothioate
  modified_base 3: mod_base = OTHER; note = 2'-O-methylcytidine-3'-phosphate
  modified_base 4: mod_base = OTHER; note = 2'-O-methyladenosine-3'-phosphate
  modified_base 5: mod_base = OTHER; note = 2'-O-methylcytidine-3'-phosphate
  modified_base 6: mod_base = OTHER; note = 2'-fluoroadenosine-3'-phosphate
  modified_base 7: mod_base = OTHER; note = 2'-O-methyladenosine-3'-phosphate
  modified_base 8: mod_base = OTHER; note = 2'-fluoroadenosine-3'-phosphate
  modified_base 9: mod_base = OTHER; note = 2'-fluorouridine-3'-phosphate
  modified_base 10: mod_base = OTHER; note = 2'-O-methyladenosine-3'-phosphate
  modified_base 11: mod_base = OTHER; note = 2'-O-methyluridine-3'-phosphate
  modified_base 12: mod_base = OTHER; note = 2'-O-methylguanosine-3'-phosphate
  modified_base 13: mod_base = OTHER; note = 2'-O-methylguanosine-3'-phosphate
  modified_base 14: mod_base = OTHER; note = 2'-fluorocytidine-3'-phosphate
  modified_base 15: mod_base = OTHER; note = 2'-O-methylcytidine-3'-phosphate
  modified_base 16: mod_base = OTHER; note = 2'-fluorouridine-3'-phosphate
  modified_base 17: mod_base = OTHER; note = 2'-O-methyluridine-3'-phosphate
  modified_base 18: mod_base = OTHER; note = 2'-O-methylguanosine-3'-phosphate
  modified_base 19: mod_base = OTHER; note = 2'-O-methyluridine-3'-phosphate
  modified_base 20: mod_base = OTHER; note = 2'-O-methyladenosine-3'-phosphate
  modified_base 21: mod_base = OTHER; note = 2'-O-methylguanosine-3'- phosphorothioate
  modified_base 22: mod_base = OTHER; note = 2'-O-methylcytidine-3'- phosphorothioate
  modified_base 23: mod_base = OTHER; note = 2'-O-methylcytidine-3'-phosphate
gtcacaaatatggccttgtagcc

SEQ ID NO: 2278 - RNA, 21 nt, synthetic construct
  misc_feature 1..21: note = Description of Artificial Sequence: Synthetic oligonucleotide
  source 1..21: mol_type = other RNA
  modified_base 1: mod_base = OTHER; note = 2'-O-methyladenosine-3'- phosphorothioate
  modified_base 2: mod_base = OTHER; note = 2'-O-methyluridine-3'-phosphorothioate
  modified_base 3: mod_base = OTHER; note = 2'-O-methylguanosine-3'-phosphate
  modified_base 4: mod_base = OTHER; note = 2'-O-methylguanosine-3'-phosphate
  modified_base 5: mod_base = OTHER; note = 2'-O-methylguanosine-3'-phosphate
  modified_base 6: mod_base = OTHER; note = 2'-O-methylcytidine-3'-phosphate
  modified_base 7: mod_base = OTHER; note = 2'-fluorouridine-3'-phosphate
  modified_base 8: mod_base = OTHER; note = 2'-O-methyladenosine-3'-phosphate
  modified_base 9: mod_base = OTHER; note = 2'-fluorocytidine-3'-phosphate
  modified_base 10: mod_base = OTHER; note = 2'-fluoroadenosine-3'-phosphate
  modified_base 11: mod_base = OTHER; note = 2'-fluoroadenosine-3'-phosphate
  modified_base 12: mod_base = OTHER; note = 2'-O-methylguanosine-3'-phosphate
  modified_base 13: mod_base = OTHER; note = 2'-O-methylguanosine-3'-phosphate
  modified_base 14: mod_base = OTHER; note = 2'-O-methylcytidine-3'-phosphate
  modified_base 15: mod_base = OTHER; note = 2'-O-methylcytidine-3'-phosphate
  modified_base 16: mod_base = OTHER; note = 2'-O-methyladenosine-3'-phosphate
  modified_base 17: mod_base = OTHER; note = 2'-O-methyluridine-3'-phosphate
  modified_base 18: mod_base = OTHER; note = 2'-O-methyladenosine-3'-phosphate
  modified_base 19: mod_base = OTHER; note = 2'-O-methyluridine-3'-phosphate
  modified_base 20: mod_base = OTHER; note = 2'-O-methyluridine-3'-phosphate
  modified_base 21: mod_base = OTHER; note = 2'-O-methyluridine-3'-phosphate attached to N-[tris(N-acetylgalactosamine-alkyl)-amidodecanoyl)]-4-hydr oxyprolinol Hyp-(N-acetylgalactosamine-alkyl)3
atgggctacaaggccatattt

SEQ ID NO: 2279 - RNA, 23 nt, synthetic construct
  misc_feature 1..23: note = Description of Artificial Sequence: Synthetic oligonucleotide
  source 1..23: mol_type = other RNA
  modified_base 1: mod_base = OTHER; note = 2'-O-methyladenosine-3'- phosphorothioate
  modified_base 2: mod_base = OTHER; note = 2'-fluoroadenosine-3'-phosphorothioate
  modified_base 3: mod_base = OTHER; note = 2'-O-methyladenosine-3'-phosphate
  modified_base 4: mod_base = OTHER; note = 2'-O-methyluridine-3'-phosphate
  modified_base 5: mod_base = OTHER; note = 2'-O-methyladenosine-3'-phosphate
  modified_base 6: mod_base = OTHER; note = 2'-fluorouridine-3'-phosphate
  modified_base 7: mod_base = OTHER; note = 2'-O-methylguanosine-3'-phosphate
  modified_base 8: mod_base = OTHER; note = 2'-fluoroguanosine-3'-phosphate
  modified_base 9: mod_base = OTHER; note = 2'-fluorocytidine-3'-phosphate
  modified_base 10: mod_base = OTHER; note = 2'-O-methylcytidine-3'-phosphate
  modified_base 11: mod_base = OTHER; note = 2'-O-methyluridine-3'-phosphate
  modified_base 12: mod_base = OTHER; note = 2'-O-methyluridine-3'-phosphate
  modified_base 13: mod_base = OTHER; note = 2'-O-methylguanosine-3'-phosphate
  modified_base 14: mod_base = OTHER; note = 2'-fluorouridine-3'-phosphate
  modified_base 15: mod_base = OTHER; note = 2'-O-methyladenosine-3'-phosphate
  modified_base 16: mod_base = OTHER; note = 2'-fluoroguanosine-3'-phosphate
  modified_base 17: mod_base = OTHER; note = 2'-O-methylcytidine-3'-phosphate
  modified_base 18: mod_base = OTHER; note = 2'-O-methylcytidine-3'-phosphate
  modified_base 19: mod_base = OTHER; note = 2'-O-methylcytidine-3'-phosphate
  modified_base 20: mod_base = OTHER; note = 2'-O-methyladenosine-3'-phosphate
  modified_base 21: mod_base = OTHER; note = 2'-O-methyluridine-3'-phosphorothioate
  modified_base 22: mod_base = OTHER; note = 2'-O-methylcytidine-3'- phosphorothioate
  modified_base 23: mod_base = OTHER; note = 2'-O-methyluridine-3'-phosphate
aaatatggccttgtagcccatct

SEQ ID NO: 2280 - RNA, 21 nt, synthetic construct
  misc_feature 1..21: note = Description of Artificial Sequence: Synthetic oligonucleotide
  source 1..21: mol_type = other RNA
  modified_base 1: mod_base = OTHER; note = 2'-O-methylguanosine-3'- phosphorothioate
  modified_base 2: mod_base = OTHER; note = 2'-O-methyladenosine-3'- phosphorothioate
  modified_base 3: mod_base = OTHER; note = 2'-O-methyluridine-3'-phosphate
  modified_base 4: mod_base = OTHER; note = 2'-O-methylguanosine-3'-phosphate
  modified_base 5: mod_base = OTHER; note = 2'-O-methylguanosine-3'-phosphate
  modified_base 6: mod_base = OTHER; note = 2'-O-methylguanosine-3'-phosphate
  modified_base 7: mod_base = OTHER; note = 2'-fluorocytidine-3'-phosphate
  modified_base 8: mod_base = OTHER; note = 2'-O-methyluridine-3'-phosphate
  modified_base 9: mod_base = OTHER; note = 2'-fluoroadenosine-3'-phosphate
  modified_base 10: mod_base = OTHER; note = 2'-fluorocytidine-3'-phosphate
  modified_base 11: mod_base = OTHER; note = 2'-fluoroadenosine-3'-phosphate
  modified_base 12: mod_base = OTHER; note = 2'-O-methyladenosine-3'-phosphate
  modified_base 13: mod_base = OTHER; note = 2'-O-methylguanosine-3'-phosphate
  modified_base 14: mod_base = OTHER; note = 2'-O-methylguanosine-3'-phosphate
  modified_base 15: mod_base = OTHER; note = 2'-O-methylcytidine-3'-phosphate
  modified_base 16: mod_base = OTHER; note = 2'-O-methylcytidine-3'-phosphate
  modified_base 17: mod_base = OTHER; note = 2'-O-methyladenosine-3'-phosphate
  modified_base 18: mod_base = OTHER; note = 2'-O-methyluridine-3'-phosphate
  modified_base 19: mod_base = OTHER; note = 2'-O-methyladenosine-3'-phosphate
  modified_base 20: mod_base = OTHER; note = 2'-O-methyluridine-3'-phosphate
  modified_base 21: mod_base = OTHER; note = 2'-O-methyluridine-3'-phosphate attached to N-[tris(N-acetylgalactosamine-alkyl)-amidodecanoyl)]-4-hydr oxyprolinol Hyp-(N-acetylgalactosamine-alkyl)3
gatgggctacaaggccatatt

SEQ ID NO: 2281 - RNA, 23 nt, synthetic construct
  misc_feature 1..23: note = Description of Artificial Sequence: Synthetic oligonucleotide
  source 1..23: mol_type = other RNA
  modified_base 1: mod_base = OTHER; note = 2'-O-methyladenosine-3'- phosphorothioate
  modified_base 2: mod_base = OTHER; note = 2'-fluoroadenosine-3'-phosphorothioate
  modified_base 3: mod_base = OTHER; note = 2'-O-methyluridine-3'-phosphate
  modified_base 4: mod_base = OTHER; note = 2'-O-methyladenosine-3'-phosphate
  modified_base 5: mod_base = OTHER; note = 2'-O-methyluridine-3'-phosphate
  modified_base 6: mod_base = OTHER; note = 2'-fluoroguanosine-3'-phosphate
  modified_base 7: mod_base = OTHER; note = 2'-O-methylguanosine-3'-phosphate
  modified_base 8: mod_base = OTHER; note = 2'-fluorocytidine-3'-phosphate
  modified_base 9: mod_base = OTHER; note = 2'-fluorocytidine-3'-phosphate
  modified_base 10: mod_base = OTHER; note = 2'-O-methyluridine-3'-phosphate
  modified_base 11: mod_base = OTHER; note = 2'-O-methyluridine-3'-phosphate
  modified_base 12: mod_base = OTHER; note = 2'-O-methylguanosine-3'-phosphate
  modified_base 13: mod_base = OTHER; note = 2'-O-methyluridine-3'-phosphate
  modified_base 14: mod_base = OTHER; note = 2'-fluoroadenosine-3'-phosphate
  modified_base 15: mod_base = OTHER; note = 2'-O-methylguanosine-3'-phosphate
  modified_base 16: mod_base = OTHER; note = 2'-fluorocytidine-3'-phosphate
  modified_base 17: mod_base = OTHER; note = 2'-O-methylcytidine-3'-phosphate
  modified_base 18: mod_base = OTHER; note = 2'-O-methylcytidine-3'-phosphate
  modified_base 19: mod_base = OTHER; note = 2'-O-methyladenosine-3'-phosphate
  modified_base 20: mod_base = OTHER; note = 2'-O-methyluridine-3'-phosphate
  modified_base 21: mod_base = OTHER; note = 2'-O-methylcytidine-3'- phosphorothioate
  modified_base 22: mod_base = OTHER; note = 2'-O-methyluridine-3'-phosphorothioate
  modified_base 23: mod_base = OTHER; note = 2'-O-methyluridine-3'-phosphate
aatatggccttgtagcccatctt

SEQ ID NO: 2282 - RNA, 21 nt, synthetic construct
  misc_feature 1..21: note = Description of Artificial Sequence: Synthetic oligonucleotide
  source 1..21: mol_type = other RNA
  modified_base 1: mod_base = OTHER; note = 2'-O-methyladenosine-3'- phosphorothioate
  modified_base 2: mod_base = OTHER; note = 2'-O-methylcytidine-3'- phosphorothioate
  modified_base 3: mod_base = OTHER; note = 2'-O-methyluridine-3'-phosphate
  modified_base 4: mod_base = OTHER; note = 2'-O-methylguanosine-3'-phosphate
  modified_base 5: mod_base = OTHER; note = 2'-O-methylguanosine-3'-phosphate
  modified_base 6: mod_base = OTHER; note = 2'-O-methyladenosine-3'-phosphate
  modified_base 7: mod_base = OTHER; note = 2'-fluoroguanosine-3'-phosphate
  modified_base 8: mod_base = OTHER; note = 2'-O-methyladenosine-3'-phosphate
  modified_base 9: mod_base = OTHER; note = 2'-fluoroguanosine-3'-phosphate
  modified_base 10: mod_base = OTHER; note = 2'-fluoroadenosine-3'-phosphate
  modified_base 11: mod_base = OTHER; note = 2'-fluoroadenosine-3'-phosphate
  modified_base 12: mod_base = OTHER; note = 2'-O-methyluridine-3'-phosphate
  modified_base 13: mod_base = OTHER; note = 2'-O-methyluridine-3'-phosphate
  modified_base 14: mod_base = OTHER; note = 2'-O-methylguanosine-3'-phosphate
  modified_base 15: mod_base = OTHER; note = 2'-O-methylguanosine-3'-phosphate
  modified_base 16: mod_base = OTHER; note = 2'-O-methyladenosine-3'-phosphate
  modified_base 17: mod_base = OTHER; note = 2'-O-methyladenosine-3'-phosphate
  modified_base 18: mod_base = OTHER; note = 2'-O-methyluridine-3'-phosphate
  modified_base 19: mod_base = OTHER; note = 2'-O-methylguanosine-3'-phosphate
  modified_base 20: mod_base = OTHER; note = 2'-O-methylguanosine-3'-phosphate
  modified_base 21: mod_base = OTHER; note = 2'-O-methylguanosine-3'-phosphate attached to N-[tris(N-acetylgalactosamine-alkyl)-amidodecanoyl)]-4-hydr oxyprolinol Hyp-(N-acetylgalactosamine-alkyl)3
actggagagaattggaatggg

SEQ ID NO: 2283 - RNA, 23 nt, synthetic construct
  misc_feature 1..23: note = Description of Artificial Sequence: Synthetic oligonucleotide
  source 1..23: mol_type = other RNA
  modified_base 1: mod_base = OTHER; note = 2'-O-methylcytidine-3'- phosphorothioate
  modified_base 2: mod_base = OTHER; note = 2'-fluorocytidine-3'-phosphorothioate
  modified_base 3: mod_base = OTHER; note = 2'-O-methylcytidine-3'-phosphate
  modified_base 4: mod_base = OTHER; note = 2'-O-methyladenosine-3'-phosphate
  modified_base 5: mod_base = OTHER; note = 2'-O-methyluridine-3'-phosphate
  modified_base 6: mod_base = OTHER; note = 2'-fluorouridine-3'-phosphate
  modified_base 7: mod_base = OTHER; note = 2'-O-methylcytidine-3'-phosphate
  modified_base 8: mod_base = OTHER; note = 2'-fluorocytidine-3'-phosphate
  modified_base 9: mod_base = OTHER; note = 2'-fluoroadenosine-3'-phosphate
  modified_base 10: mod_base = OTHER; note = 2'-O-methyladenosine-3'-phosphate
  modified_base 11: mod_base = OTHER; note = 2'-O-methyluridine-3'-phosphate
  modified_base 12: mod_base = OTHER; note = 2'-O-methyluridine-3'-phosphate
  modified_base 13: mod_base = OTHER; note = 2'-O-methylcytidine-3'-phosphate
  modified_base 14: mod_base = OTHER; note = 2'-fluorouridine-3'-phosphate
  modified_base 15: mod_base = OTHER; note = 2'-O-methylcytidine-3'-phosphate
  modified_base 16: mod_base = OTHER; note = 2'-fluorouridine-3'-phosphate
  modified_base 17: mod_base = OTHER; note = 2'-O-methylcytidine-3'-phosphate
  modified_base 18: mod_base = OTHER; note = 2'-O-methylcytidine-3'-phosphate
  modified_base 19: mod_base = OTHER; note = 2'-O-methyladenosine-3'-phosphate
  modified_base 20: mod_base = OTHER; note = 2'-O-methylguanosine-3'-phosphate
  modified_base 21: mod_base = OTHER; note = 2'-O-methyluridine-3'-phosphorothioate
  modified_base 22: mod_base = OTHER; note = 2'-O-methylguanosine-3'- phosphorothioate
  modified_base 23: mod_base = OTHER; note = 2'-O-methylcytidine-3'-phosphate
cccattccaattctctccagtgc

SEQ ID NO: 2284 - RNA, 21 nt, synthetic construct
  misc_feature 1..21: note = Description of Artificial Sequence: Synthetic oligonucleotide
  source 1..21: mol_type = other RNA
  modified_base 1: mod_base = OTHER; note = 2'-O-methylcytidine-3'- phosphorothioate
  modified_base 2: mod_base = OTHER; note = 2'-O-methyluridine-3'-phosphorothioate
  modified_base 3: mod_base = OTHER; note = 2'-O-methylguanosine-3'-phosphate
  modified_base 4: mod_base = OTHER; note = 2'-O-methylguanosine-3'-phosphate
  modified_base 5: mod_base = OTHER; note = 2'-O-methyladenosine-3'-phosphate
  modified_base 6: mod_base = OTHER; note = 2'-O-methylguanosine-3'-phosphate
  modified_base 7: mod_base = OTHER; note = 2'-fluoroadenosine-3'-phosphate
  modified_base 8: mod_base = OTHER; note = 2'-O-methylguanosine-3'-phosphate
  modified_base 9: mod_base = OTHER; note = 2'-fluoroadenosine-3'-phosphate
  modified_base 10: mod_base = OTHER; note = 2'-fluoroadenosine-3'-phosphate
  modified_base 11: mod_base = OTHER; note = 2'-fluorouridine-3'-phosphate
  modified_base 12: mod_base = OTHER; note = 2'-O-methyluridine-3'-phosphate
  modified_base 13: mod_base = OTHER; note = 2'-O-methylguanosine-3'-phosphate
  modified_base 14: mod_base = OTHER; note = 2'-O-methylguanosine-3'-phosphate
  modified_base 15: mod_base = OTHER; note = 2'-O-methyladenosine-3'-phosphate
  modified_base 16: mod_base = OTHER; note = 2'-O-methyladenosine-3'-phosphate
  modified_base 17: mod_base = OTHER; note = 2'-O-methyluridine-3'-phosphate
  modified_base 18: mod_base = OTHER; note = 2'-O-methylguanosine-3'-phosphate
  modified_base 19: mod_base = OTHER; note = 2'-O-methylguanosine-3'-phosphate
  modified_base 20: mod_base = OTHER; note = 2'-O-methylguanosine-3'-phosphate
  modified_base 21: mod_base = OTHER; note = 2'-O-methyluridine-3'-phosphate attached to N-[tris(N-acetylgalactosamine-alkyl)-amidodecanoyl)]-4-hydr oxyprolinol Hyp-(N-acetylgalactosamine-alkyl)3
ctggagagaattggaatgggt

SEQ ID NO: 2285 - RNA, 23 nt, synthetic construct
  misc_feature 1..23: note = Description of Artificial Sequence: Synthetic oligonucleotide
  source 1..23: mol_type = other RNA
  modified_base 1: mod_base = OTHER; note = 2'-O-methyladenosine-3'- phosphorothioate
  modified_base 2: mod_base = OTHER; note = 2'-fluorocytidine-3'-phosphorothioate
  modified_base 3: mod_base = OTHER; note = 2'-O-methylcytidine-3'-phosphate
  modified_base 4: mod_base = OTHER; note = 2'-O-methylcytidine-3'-phosphate
  modified_base 5: mod_base = OTHER; note = 2'-O-methyladenosine-3'-phosphate
  modified_base 6: mod_base = OTHER; note = 2'-fluorouridine-3'-phosphate
  modified_base 7: mod_base = OTHER; note = 2'-O-methyluridine-3'-phosphate
  modified_base 8: mod_base = OTHER; note = 2'-fluorocytidine-3'-phosphate
  modified_base 9: mod_base = OTHER; note = 2'-fluorocytidine-3'-phosphate
  modified_base 10: mod_base = OTHER; note = 2'-O-methyladenosine-3'-phosphate
  modified_base 11: mod_base = OTHER; note = 2'-O-methyladenosine-3'-phosphate
  modified_base 12: mod_base = OTHER; note = 2'-O-methyluridine-3'-phosphate
  modified_base 13: mod_base = OTHER; note = 2'-O-methyluridine-3'-phosphate
  modified_base 14: mod_base = OTHER; note = 2'-fluorocytidine-3'-phosphate
  modified_base 15: mod_base = OTHER; note = 2'-O-methyluridine-3'-phosphate
  modified_base 16: mod_base = OTHER; note = 2'-fluorocytidine-3'-phosphate
  modified_base 17: mod_base = OTHER; note = 2'-O-methyluridine-3'-phosphate
  modified_base 18: mod_base = OTHER; note = 2'-O-methylcytidine-3'-phosphate
  modified_base 19: mod_base = OTHER; note = 2'-O-methylcytidine-3'-phosphate
  modified_base 20: mod_base = OTHER; note = 2'-O-methyladenosine-3'-phosphate
  modified_base 21: mod_base = OTHER; note = 2'-O-methylguanosine-3'- phosphorothioate
  modified_base 22: mod_base = OTHER; note = 2'-O-methyluridine-3'-phosphorothioate
  modified_base 23: mod_base = OTHER; note = 2'-O-methylguanosine-3'-phosphate
acccattccaattctctccagtg

SEQ ID NO: 2286 - RNA, 21 nt, synthetic construct
  misc_feature 1..21: note = Description of Artificial Sequence: Synthetic oligonucleotide
  source 1..21: mol_type = other RNA
  modified_base 1: mod_base = OTHER; note = 2'-O-methyluridine-3'-phosphorothioate
  modified_base 2: mod_base = OTHER; note = 2'-O-methyladenosine-3'- phosphorothioate
  modified_base 3: mod_base = OTHER; note = 2'-O-methylguanosine-3'-phosphate
  modified_base 4: mod_base = OTHER; note = 2'-O-methylcytidine-3'-phosphate
  modified_base 5: mod_base = OTHER; note = 2'-O-methyladenosine-3'-phosphate
  modified_base 6: mod_base = OTHER; note = 2'-O-methylcytidine-3'-phosphate
  modified_base 7: mod_base = OTHER; note = 2'-fluorouridine-3'-phosphate
  modified_base 8: mod_base = OTHER; note = 2'-O-methylguanosine-3'-phosphate
  modified_base 9: mod_base = OTHER; note = 2'-fluoroguanosine-3'-phosphate
  modified_base 10: mod_base = OTHER; note = 2'-fluoroadenosine-3'-phosphate
  modified_base 11: mod_base = OTHER; note = 2'-fluoroguanosine-3'-phosphate
  modified_base 12: mod_base = OTHER; note = 2'-O-methyladenosine-3'-phosphate
  modified_base 13: mod_base = OTHER; note = 2'-O-methylguanosine-3'-phosphate
  modified_base 14: mod_base = OTHER; note = 2'-O-methyladenosine-3'-phosphate
  modified_base 15: mod_base = OTHER; note = 2'-O-methyladenosine-3'-phosphate
  modified_base 16: mod_base = OTHER; note = 2'-O-methyluridine-3'-phosphate
  modified_base 17: mod_base = OTHER; note = 2'-O-methyluridine-3'-phosphate
  modified_base 18: mod_base = OTHER; note = 2'-O-methylguanosine-3'-phosphate
  modified_base 19: mod_base = OTHER; note = 2'-O-methylguanosine-3'-phosphate
  modified_base 20: mod_base = OTHER; note = 2'-O-methyladenosine-3'-phosphate
  modified_base 21: mod_base = OTHER; note = 2'-O-methyladenosine-3'-phosphate attached to N-[tris(N-acetylgalactosamine-alkyl)-amidodecanoyl)]-4-hydr oxyprolinol Hyp-(N-acetylgalactosamine-alkyl)3
tagcactggagagaattggaa

SEQ ID NO: 2287 - RNA, 23 nt, synthetic construct
  misc_feature 1..23: note = Description of Artificial Sequence: Synthetic oligonucleotide
  source 1..23: mol_type = other RNA
  modified_base 1: mod_base = OTHER; note = 2'-O-methyluridine-3'-phosphorothioate
  modified_base 2: mod_base = OTHER; note = 2'-fluorouridine -3'-phosphorothioate
  modified_base 3: mod_base = OTHER; note = 2'-O-methylcytidine-3'-phosphate
  modified_base 4: mod_base = OTHER; note = 2'-O-methylcytidine-3'-phosphate
  modified_base 5: mod_base = OTHER; note = 2'-O-methyladenosine-3'-phosphate
  modified_base 6: mod_base = OTHER; note = 2'-fluoroadenosine-3'-phosphate
  modified_base 7: mod_base = OTHER; note = 2'-O-methyluridine-3'-phosphate
  modified_base 8: mod_base = OTHER; note = 2'-fluorouridine-3'-phosphate
  modified_base 9: mod_base = OTHER; note = 2'-fluorocytidine-3'-phosphate
  modified_base 10: mod_base = OTHER; note = 2'-O-methyluridine-3'-phosphate
  modified_base 11: mod_base = OTHER; note = 2'-O-methylcytidine-3'-phosphate
  modified_base 12: mod_base = OTHER; note = 2'-O-methyluridine-3'-phosphate
  modified_base 13: mod_base = OTHER; note = 2'-O-methylcytidine-3'-phosphate
  modified_base 14: mod_base = OTHER; note = 2'-fluorocytidine-3'-phosphate
  modified_base 15: mod_base = OTHER; note = 2'-O-methyladenosine-3'-phosphate
  modified_base 16: mod_base = OTHER; note = 2'-fluoroguanosine-3'-phosphate
  modified_base 17: mod_base = OTHER; note = 2'-O-methyluridine-3'-phosphate
  modified_base 18: mod_base = OTHER; note = 2'-O-methylguanosine-3'-phosphate
  modified_base 19: mod_base = OTHER; note = 2'-O-methylcytidine-3'-phosphate
  modified_base 20: mod_base = OTHER; note = 2'-O-methyluridine-3'-phosphate
  modified_base 21: mod_base = OTHER; note = 2'-O-methyladenosine-3'- phosphorothioate
  modified_base 22: mod_base = OTHER; note = 2'-O-methylcytidine-3'- phosphorothioate
  modified_base 23: mod_base = OTHER; note = 2'-O-methylcytidine-3'-phosphate
ttccaattctctccagtgctacc

SEQ ID NO: 2288 - RNA, 21 nt, synthetic construct
  misc_feature 1..21: note = Description of Artificial Sequence: Synthetic oligonucleotide
  source 1..21: mol_type = other RNA
  modified_base 1: mod_base = OTHER; note = 2'-O-methylguanosine-3'- phosphorothioate
  modified_base 2: mod_base = OTHER; note = 2'-O-methyluridine-3'-phosphorothioate
  modified_base 3: mod_base = OTHER; note = 2'-O-methyladenosine-3'-phosphate
  modified_base 4: mod_base = OTHER; note = 2'-O-methylguanosine-3'-phosphate
  modified_base 5: mod_base = OTHER; note = 2'-O-methylcytidine-3'-phosphate
  modified_base 6: mod_base = OTHER; note = 2'-O-methyladenosine-3'-phosphate
  modified_base 7: mod_base = OTHER; note = 2'-fluorocytidine-3'-phosphate
  modified_base 8: mod_base = OTHER; note = 2'-O-methyluridine-3'-phosphate
  modified_base 9: mod_base = OTHER; note = 2'-fluoroguanosine-3'-phosphate
  modified_base 10: mod_base = OTHER; note = 2'-fluoroguanosine-3'-phosphate
  modified_base 11: mod_base = OTHER; note = 2'-fluoroadenosine-3'-phosphate
  modified_base 12: mod_base = OTHER; note = 2'-O-methylguanosine-3'-phosphate
  modified_base 13: mod_base = OTHER; note = 2'-O-methyladenosine-3'-phosphate
  modified_base 14: mod_base = OTHER; note = 2'-O-methylguanosine-3'-phosphate
  modified_base 15: mod_base = OTHER; note = 2'-O-methyladenosine-3'-phosphate
  modified_base 16: mod_base = OTHER; note = 2'-O-methyladenosine-3'-phosphate
  modified_base 17: mod_base = OTHER; note = 2'-O-methyluridine-3'-phosphate
  modified_base 18: mod_base = OTHER; note = 2'-O-methyluridine-3'-phosphate
  modified_base 19: mod_base = OTHER; note = 2'-O-methylguanosine-3'-phosphate
  modified_base 20: mod_base = OTHER; note = 2'-O-methylguanosine-3'-phosphate
  modified_base 21: mod_base = OTHER; note = 2'-O-methyladenosine-3'-phosphate attached to N-[tris(N-acetylgalactosamine-alkyl)-amidodecanoyl)]-4-hydr oxyprolinol Hyp-(N-acetylgalactosamine-alkyl)3
gtagcactggagagaattgga

SEQ ID NO: 2289 - RNA, 23 nt, synthetic construct
  misc_feature 1..23: note = Description of Artificial Sequence: Synthetic oligonucleotide
  source 1..23: mol_type = other RNA
  modified_base 1: mod_base = OTHER; note = 2'-O-methyluridine-3'-phosphorothioate
  modified_base 2: mod_base = OTHER; note = 2'-fluorocytidine-3'-phosphorothioate
  modified_base 3: mod_base = OTHER; note = 2'-O-methylcytidine-3'-phosphate
  modified_base 4: mod_base = OTHER; note = 2'-O-methyladenosine-3'-phosphate
  modified_base 5: mod_base = OTHER; note = 2'-O-methyladenosine-3'-phosphate
  modified_base 6: mod_base = OTHER; note = 2'-fluorouridine-3'-phosphate
  modified_base 7: mod_base = OTHER; note = 2'-O-methyluridine-3'-phosphate
  modified_base 8: mod_base = OTHER; note = 2'-fluorocytidine-3'-phosphate
  modified_base 9: mod_base = OTHER; note = 2'-fluorouridine-3'-phosphate
  modified_base 10: mod_base = OTHER; note = 2'-O-methylcytidine-3'-phosphate
  modified_base 11: mod_base = OTHER; note = 2'-O-methyluridine-3'-phosphate
  modified_base 12: mod_base = OTHER; note = 2'-O-methylcytidine-3'-phosphate
  modified_base 13: mod_base = OTHER; note = 2'-O-methylcytidine-3'-phosphate
  modified_base 14: mod_base = OTHER; note = 2'-fluoroadenosine-3'-phosphate
  modified_base 15: mod_base = OTHER; note = 2'-O-methylguanosine-3'-phosphate
  modified_base 16: mod_base = OTHER; note = 2'-fluorouridine-3'-phosphate
  modified_base 17: mod_base = OTHER; note = 2'-O-methylguanosine-3'-phosphate
  modified_base 18: mod_base = OTHER; note = 2'-O-methylcytidine-3'-phosphate
  modified_base 19: mod_base = OTHER; note = 2'-O-methyluridine-3'-phosphate
  modified_base 20: mod_base = OTHER; note = 2'-O-methyladenosine-3'-phosphate
  modified_base 21: mod_base = OTHER; note = 2'-O-methylcytidine-3'- phosphorothioate
  modified_base 22: mod_base = OTHER; note = 2'-O-methylcytidine-3'- phosphorothioate
  modified_base 23: mod_base = OTHER; note = 2'-O-methyluridine-3'-phosphate
tccaattctctccagtgctacct

SEQ ID NO: 2290 - RNA, 21 nt, synthetic construct
  misc_feature 1..21: note = Description of Artificial Sequence: Synthetic oligonucleotide
  source 1..21: mol_type = other RNA
  modified_base 1: mod_base = OTHER; note = 2'-O-methyladenosine-3'- phosphorothioate
  modified_base 2: mod_base = OTHER; note = 2'-O-methylcytidine-3'- phosphorothioate
  modified_base 3: mod_base = OTHER; note = 2'-O-methyladenosine-3'-phosphate
  modified_base 4: mod_base = OTHER; note = 2'-O-methylguanosine-3'-phosphate
  modified_base 5: mod_base = OTHER; note = 2'-O-methyluridine-3'-phosphate
  modified_base 6: mod_base = OTHER; note = 2'-O-methylguanosine-3'-phosphate
  modified_base 7: mod_base = OTHER; note = 2'-fluoroguanosine-3'-phosphate
  modified_base 8: mod_base = OTHER; note = 2'-O-methyladenosine-3'-phosphate
  modified_base 9: mod_base = OTHER; note = 2'-fluorocytidine-3'-phosphate
  modified_base 10: mod_base = OTHER; note = 2'-fluoroadenosine-3'-phosphate
  modified_base 11: mod_base = OTHER; note = 2'-fluorocytidine-3'-phosphate
  modified_base 12: mod_base = OTHER; note = 2'-O-methyladenosine-3'-phosphate
  modified_base 13: mod_base = OTHER; note = 2'-O-methylcytidine-3'-phosphate
  modified_base 14: mod_base = OTHER; note = 2'-O-methylcytidine-3'-phosphate
  modified_base 15: mod_base = OTHER; note = 2'-O-methyluridine-3'-phosphate
  modified_base 16: mod_base = OTHER; note = 2'-O-methyluridine-3'-phosphate
  modified_base 17: mod_base = OTHER; note = 2'-O-methyladenosine-3'-phosphate
  modified_base 18: mod_base = OTHER; note = 2'-O-methylcytidine-3'-phosphate
  modified_base 19: mod_base = OTHER; note = 2'-O-methylcytidine-3'-phosphate
  modified_base 20: mod_base = OTHER; note = 2'-O-methyluridine-3'-phosphate
  modified_base 21: mod_base = OTHER; note = 2'-O-methylguanosine-3'-phosphate attached to N-[tris(N-acetylgalactosamine-alkyl)-amidodecanoyl)]-4-hydr oxyprolinol Hyp-(N-acetylgalactosamine-alkyl)3
acagtggacacaccttacctg

SEQ ID NO: 2291 - RNA, 23 nt, synthetic construct
  misc_feature 1..23: note = Description of Artificial Sequence: Synthetic oligonucleotide
  source 1..23: mol_type = other RNA
  modified_base 1: mod_base = OTHER; note = 2'-O-methylcytidine-3'- phosphorothioate
  modified_base 2: mod_base = OTHER; note = 2'-fluoroadenosine-3'-phosphorothioate
  modified_base 3: mod_base = OTHER; note = 2'-O-methylguanosine-3'-phosphate
  modified_base 4: mod_base = OTHER; note = 2'-O-methylguanosine-3'-phosphate
  modified_base 5: mod_base = OTHER; note = 2'-O-methyluridine-3'-phosphate
  modified_base 6: mod_base = OTHER; note = 2'-fluoroadenosine-3'-phosphate
  modified_base 7: mod_base = OTHER; note = 2'-O-methyladenosine-3'-phosphate
  modified_base 8: mod_base = OTHER; note = 2'-fluoroguanosine-3'-phosphate
  modified_base 9: mod_base = OTHER; note = 2'-fluoroguanosine-3'-phosphate
  modified_base 10: mod_base = OTHER; note = 2'-O-methyluridine-3'-phosphate
  modified_base 11: mod_base = OTHER; note = 2'-O-methylguanosine-3'-phosphate
  modified_base 12: mod_base = OTHER; note = 2'-O-methyluridine-3'-phosphate
  modified_base 13: mod_base = OTHER; note = 2'-O-methylguanosine-3'-phosphate
  modified_base 14: mod_base = OTHER; note = 2'-fluorouridine-3'-phosphate
  modified_base 15: mod_base = OTHER; note = 2'-O-methylcytidine-3'-phosphate
  modified_base 16: mod_base = OTHER; note = 2'-fluorocytidine-3'-phosphate
  modified_base 17: mod_base = OTHER; note = 2'-O-methyladenosine-3'-phosphate
  modified_base 18: mod_base = OTHER; note = 2'-O-methylcytidine-3'-phosphate
  modified_base 19: mod_base = OTHER; note = 2'-O-methyluridine-3'-phosphate
  modified_base 20: mod_base = OTHER; note = 2'-O-methylguanosine-3'-phosphate
  modified_base 21: mod_base = OTHER; note = 2'-O-methyluridine-3'-phosphorothioate
  modified_base 22: mod_base = OTHER; note = 2'-O-methylcytidine-3'- phosphorothioate
  modified_base 23: mod_base = OTHER; note = 2'-O-methyladenosine-3'-phosphate
caggtaaggtgtgtccactgtca

SEQ ID NO: 2292 - RNA, 21 nt, synthetic construct
  misc_feature 1..21: note = Description of Artificial Sequence: Synthetic oligonucleotide
  source 1..21: mol_type = other RNA
  modified_base 1: mod_base = OTHER; note = 2'-O-methylcytidine-3'- phosphorothioate
  modified_base 2: mod_base = OTHER; note = 2'-O-methyladenosine-3'- phosphorothioate
  modified_base 3: mod_base = OTHER; note = 2'-O-methylguanosine-3'-phosphate
  modified_base 4: mod_base = OTHER; note = 2'-O-methyluridine-3'-phosphate
  modified_base 5: mod_base = OTHER; note = 2'-O-methylguanosine-3'-phosphate
  modified_base 6: mod_base = OTHER; note = 2'-O-methylguanosine-3'-phosphate
  modified_base 7: mod_base = OTHER; note = 2'-fluoroadenosine-3'-phosphate
  modified_base 8: mod_base = OTHER; note = 2'-O-methylcytidine-3'-phosphate
  modified_base 9: mod_base = OTHER; note = 2'-fluoroadenosine-3'-phosphate
  modified_base 10: mod_base = OTHER; note = 2'-fluorocytidine-3'-phosphate
  modified_base 11: mod_base = OTHER; note = 2'-fluoroadenosine-3'-phosphate
  modified_base 12: mod_base = OTHER; note = 2'-O-methylcytidine-3'-phosphate
  modified_base 13: mod_base = OTHER; note = 2'-O-methylcytidine-3'-phosphate
  modified_base 14: mod_base = OTHER; note = 2'-O-methyluridine-3'-phosphate
  modified_base 15: mod_base = OTHER; note = 2'-O-methyluridine-3'-phosphate
  modified_base 16: mod_base = OTHER; note = 2'-O-methyladenosine-3'-phosphate
  modified_base 17: mod_base = OTHER; note = 2'-O-methylcytidine-3'-phosphate
  modified_base 18: mod_base = OTHER; note = 2'-O-methylcytidine-3'-phosphate
  modified_base 19: mod_base = OTHER; note = 2'-O-methyluridine-3'-phosphate
  modified_base 20: mod_base = OTHER; note = 2'-O-methylguanosine-3'-phosphate
  modified_base 21: mod_base = OTHER; note = 2'-O-methylguanosine-3'-phosphate attached to N-[tris(N-acetylgalactosamine-alkyl)-amidodecanoyl)]-4-hydr oxyprolinol Hyp-(N-acetylgalactosamine-alkyl)3
cagtggacacaccttacctgg

SEQ ID NO: 2293 - RNA, 23 nt, synthetic construct
  misc_feature 1..23: note = Description of Artificial Sequence: Synthetic oligonucleotide
  source 1..23: mol_type = other RNA
  modified_base 1: mod_base = OTHER; note = 2'-O-methylcytidine-3'- phosphorothioate
  modified_base 2: mod_base = OTHER; note = 2'-fluorocytidine-3'-phosphorothioate
  modified_base 3: mod_base = OTHER; note = 2'-O-methyladenosine-3'-phosphate
  modified_base 4: mod_base = OTHER; note = 2'-O-methylguanosine-3'-phosphate
  modified_base 5: mod_base = OTHER; note = 2'-O-methylguanosine-3'-phosphate
  modified_base 6: mod_base = OTHER; note = 2'-fluorouridine-3'-phosphate
  modified_base 7: mod_base = OTHER; note = 2'-O-methyladenosine-3'-phosphate
  modified_base 8: mod_base = OTHER; note = 2'-fluoroadenosine-3'-phosphate
  modified_base 9: mod_base = OTHER; note = 2'-fluoroguanosine-3'-phosphate
  modified_base 10: mod_base = OTHER; note = 2'-O-methylguanosine-3'-phosphate
  modified_base 11: mod_base = OTHER; note = 2'-O-methyluridine-3'-phosphate
  modified_base 12: mod_base = OTHER; note = 2'-O-methylguanosine-3'-phosphate
  modified_base 13: mod_base = OTHER; note = 2'-O-methyluridine-3'-phosphate
  modified_base 14: mod_base = OTHER; note = 2'-fluoroguanosine-3'-phosphate
  modified_base 15: mod_base = OTHER; note = 2'-O-methyluridine-3'-phosphate
  modified_base 16: mod_base = OTHER; note = 2'-fluorocytidine-3'-phosphate
  modified_base 17: mod_base = OTHER; note = 2'-O-methylcytidine-3'-phosphate
  modified_base 18: mod_base = OTHER; note = 2'-O-methyladenosine-3'-phosphate
  modified_base 19: mod_base = OTHER; note = 2'-O-methylcytidine-3'-phosphate
  modified_base 20: mod_base = OTHER; note = 2'-O-methyluridine-3'-phosphate
  modified_base 21: mod_base = OTHER; note = 2'-O-methylguanosine-3'- phosphorothioate
  modified_base 22: mod_base = OTHER; note = 2'-O-methyluridine-3'-phosphorothioate
  modified_base 23: mod_base = OTHER; note = 2'-O-methylcytidine-3'-phosphate
ccaggtaaggtgtgtccactgtc

SEQ ID NO: 2294 - RNA, 21 nt, synthetic construct
  misc_feature 1..21: note = Description of Artificial Sequence: Synthetic oligonucleotide
  source 1..21: mol_type = other RNA
  modified_base 1: mod_base = OTHER; note = 2'-O-methyluridine-3'-phosphorothioate
  modified_base 2: mod_base = OTHER; note = 2'-O-methylguanosine-3'- phosphorothioate
  modified_base 3: mod_base = OTHER; note = 2'-O-methyluridine-3'-phosphate
  modified_base 4: mod_base = OTHER; note = 2'-O-methylguanosine-3'-phosphate
  modified_base 5: mod_base = OTHER; note = 2'-O-methyladenosine-3'-phosphate
  modified_base 6: mod_base = OTHER; note = 2'-O-methylcytidine-3'-phosphate
  modified_base 7: mod_base = OTHER; note = 2'-fluoroadenosine-3'-phosphate
  modified_base 8: mod_base = OTHER; note = 2'-O-methylguanosine-3'-phosphate
  modified_base 9: mod_base = OTHER; note = 2'-fluorouridine-3'-phosphate
  modified_base 10: mod_base = OTHER; note = 2'-fluoroguanosine-3'-phosphate
  modified_base 11: mod_base = OTHER; note = 2'-fluoroguanosine-3'-phosphate
  modified_base 12: mod_base = OTHER; note = 2'-O-methyladenosine-3'-phosphate
  modified_base 13: mod_base = OTHER; note = 2'-O-methylcytidine-3'-phosphate
  modified_base 14: mod_base = OTHER; note = 2'-O-methyladenosine-3'-phosphate
  modified_base 15: mod_base = OTHER; note = 2'-O-methylcytidine-3'-phosphate
  modified_base 16: mod_base = OTHER; note = 2'-O-methyladenosine-3'-phosphate
  modified_base 17: mod_base = OTHER; note = 2'-O-methylcytidine-3'-phosphate
  modified_base 18: mod_base = OTHER; note = 2'-O-methylcytidine-3'-phosphate
  modified_base 19: mod_base = OTHER; note = 2'-O-methyluridine-3'-phosphate
  modified_base 20: mod_base = OTHER; note = 2'-O-methyluridine-3'-phosphate
  modified_base 21: mod_base = OTHER; note = 2'-O-methyladenosine-3'-phosphate attached to N-[tris(N-acetylgalactosamine-alkyl)-amidodecanoyl)]-4-hydr oxyprolinol Hyp-(N-acetylgalactosamine-alkyl)3
tgtgacagtggacacacctta

SEQ ID NO: 2295 - RNA, 23 nt, synthetic construct
  misc_feature 1..23: note = Description of Artificial Sequence: Synthetic oligonucleotide
  source 1..23: mol_type = other RNA
  modified_base 1: mod_base = OTHER; note = 2'-O-methyluridine-3'-phosphorothioate
  modified_base 2: mod_base = OTHER; note = 2'-fluoroadenosine-3'-phosphorothioate
  modified_base 3: mod_base = OTHER; note = 2'-O-methyladenosine-3'-phosphate
  modified_base 4: mod_base = OTHER; note = 2'-O-methylguanosine-3'-phosphate
  modified_base 5: mod_base = OTHER; note = 2'-O-methylguanosine-3'-phosphate
  modified_base 6: mod_base = OTHER; note = 2'-fluorouridine-3'-phosphate
  modified_base 7: mod_base = OTHER; note = 2'-O-methylguanosine-3'-phosphate
  modified_base 8: mod_base = OTHER; note = 2'-fluorouridine-3'-phosphate
  modified_base 9: mod_base = OTHER; note = 2'-fluoroguanosine-3'-phosphate
  modified_base 10: mod_base = OTHER; note = 2'-O-methyluridine-3'-phosphate
  modified_base 11: mod_base = OTHER; note = 2'-O-methylcytidine-3'-phosphate
  modified_base 12: mod_base = OTHER; note = 2'-O-methylcytidine-3'-phosphate
  modified_base 13: mod_base = OTHER; note = 2'-O-methyladenosine-3'-phosphate
  modified_base 14: mod_base = OTHER; note = 2'-fluorocytidine-3'-phosphate
  modified_base 15: mod_base = OTHER; note = 2'-O-methyluridine-3'-phosphate
  modified_base 16: mod_base = OTHER; note = 2'-fluoroguanosine-3'-phosphate
  modified_base 17: mod_base = OTHER; note = 2'-O-methyluridine-3'-phosphate
  modified_base 18: mod_base = OTHER; note = 2'-O-methylcytidine-3'-phosphate
  modified_base 19: mod_base = OTHER; note = 2'-O-methyladenosine-3'-phosphate
  modified_base 20: mod_base = OTHER; note = 2'-O-methylcytidine-3'-phosphate
  modified_base 21: mod_base = OTHER; note = 2'-O-methyladenosine-3'- phosphorothioate
  modified_base 22: mod_base = OTHER; note = 2'-O-methyladenosine-3'- phosphorothioate
  modified_base 23: mod_base = OTHER; note = 2'-O-methyladenosine-3'-phosphate
taaggtgtgtccactgtcacaaa

SEQ ID NO: 2296 - RNA, 21 nt, synthetic construct
  misc_feature 1..21: note = Description of Artificial Sequence: Synthetic oligonucleotide
  source 1..21: mol_type = other RNA
  modified_base 1: mod_base = OTHER; note = 2'-O-methyluridine-3'-phosphorothioate
  modified_base 2: mod_base = OTHER; note = 2'-O-methyluridine-3'-phosphorothioate
  modified_base 3: mod_base = OTHER; note = 2'-O-methylguanosine-3'-phosphate
  modified_base 4: mod_base = OTHER; note = 2'-O-methyluridine-3'-phosphate
  modified_base 5: mod_base = OTHER; note = 2'-O-methylguanosine-3'-phosphate
  modified_base 6: mod_base = OTHER; note = 2'-O-methyladenosine-3'-phosphate
  modified_base 7: mod_base = OTHER; note = 2'-fluorocytidine-3'-phosphate
  modified_base 8: mod_base = OTHER; note = 2'-O-methyladenosine-3'-phosphate
  modified_base 9: mod_base = OTHER; note = 2'-fluoroguanosine-3'-phosphate
  modified_base 10: mod_base = OTHER; note = 2'-fluorouridine-3'-phosphate
  modified_base 11: mod_base = OTHER; note = 2'-fluoroguanosine-3'-phosphate
  modified_base 12: mod_base = OTHER; note = 2'-O-methylguanosine-3'-phosphate
  modified_base 13: mod_base = OTHER; note = 2'-O-methyladenosine-3'-phosphate
  modified_base 14: mod_base = OTHER; note = 2'-O-methylcytidine-3'-phosphate
  modified_base 15: mod_base = OTHER; note = 2'-O-methyladenosine-3'-phosphate
  modified_base 16: mod_base = OTHER; note = 2'-O-methylcytidine-3'-phosphate
  modified_base 17: mod_base = OTHER; note = 2'-O-methyladenosine-3'-phosphate
  modified_base 18: mod_base = OTHER; note = 2'-O-methylcytidine-3'-phosphate
  modified_base 19: mod_base = OTHER; note = 2'-O-methylcytidine-3'-phosphate
  modified_base 20: mod_base = OTHER; note = 2'-O-methyluridine-3'-phosphate
  modified_base 21: mod_base = OTHER; note = 2'-O-methyluridine-3'-phosphate attached to N-[tris(N-acetylgalactosamine-alkyl)-amidodecanoyl)]-4-hydr oxyprolinol Hyp-(N-acetylgalactosamine-alkyl)3
ttgtgacagtggacacacctt

SEQ ID NO: 2297 - RNA, 23 nt, synthetic construct
  misc_feature 1..23: note = Description of Artificial Sequence: Synthetic oligonucleotide
  source 1..23: mol_type = other RNA
  modified_base 1: mod_base = OTHER; note = 2'-O-methyladenosine-3'- phosphorothioate
  modified_base 2: mod_base = OTHER; note = 2'-fluoroadenosine-3'-phosphorothioate
  modified_base 3: mod_base = OTHER; note = 2'-O-methylguanosine-3'-phosphate
  modified_base 4: mod_base = OTHER; note = 2'-O-methylguanosine-3'-phosphate
  modified_base 5: mod_base = OTHER; note = 2'-O-methyluridine-3'-phosphate
  modified_base 6: mod_base = OTHER; note = 2'-fluoroguanosine-3'-phosphate
  modified_base 7: mod_base = OTHER; note = 2'-O-methyluridine-3'-phosphate
  modified_base 8: mod_base = OTHER; note = 2'-fluoroguanosine-3'-phosphate
  modified_base 9: mod_base = OTHER; note = 2'-fluorouridine-3'-phosphate
  modified_base 10: mod_base = OTHER; note = 2'-O-methylcytidine-3'-phosphate
  modified_base 11: mod_base = OTHER; note = 2'-O-methylcytidine-3'-phosphate
  modified_base 12: mod_base = OTHER; note = 2'-O-methyladenosine-3'-phosphate
  modified_base 13: mod_base = OTHER; note = 2'-O-methylcytidine-3'-phosphate
  modified_base 14: mod_base = OTHER; note = 2'-fluorouridine-3'-phosphate
  modified_base 15: mod_base = OTHER; note = 2'-O-methylguanosine-3'-phosphate
  modified_base 16: mod_base = OTHER; note = 2'-fluorouridine-3'-phosphate
  modified_base 17: mod_base = OTHER; note = 2'-O-methylcytidine-3'-phosphate
  modified_base 18: mod_base = OTHER; note = 2'-O-methyladenosine-3'-phosphate
  modified_base 19: mod_base = OTHER; note = 2'-O-methylcytidine-3'-phosphate
  modified_base 20: mod_base = OTHER; note = 2'-O-methyladenosine-3'-phosphate
  modified_base 21: mod_base = OTHER; note = 2'-O-methyladenosine-3'- phosphorothioate
  modified_base 22: mod_base = OTHER; note = 2'-O-methyladenosine-3'- phosphorothioate
  modified_base 23: mod_base = OTHER; note = 2'-O-methyluridine-3'-phosphate
aaggtgtgtccactgtcacaaat

SEQ ID NO: 2298 - RNA, 21 nt, synthetic construct
  misc_feature 1..21: note = Description of Artificial Sequence: Synthetic oligonucleotide
  source 1..21: mol_type = other RNA
  modified_base 1: mod_base = OTHER; note = 2'-O-methylguanosine-3'- phosphorothioate
  modified_base 2: mod_base = OTHER; note = 2'-O-methyladenosine-3'- phosphorothioate
  modified_base 3: mod_base = OTHER; note = 2'-O-methyladenosine-3'-phosphate
  modified_base 4: mod_base = OTHER; note = 2'-O-methylguanosine-3'-phosphate
  modified_base 5: mod_base = OTHER; note = 2'-O-methyladenosine-3'-phosphate
  modified_base 6: mod_base = OTHER; note = 2'-O-methylcytidine-3'-phosphate
  modified_base 7: mod_base = OTHER; note = 2'-fluorouridine-3'-phosphate
  modified_base 8: mod_base = OTHER; note = 2'-O-methylguanosine-3'-phosphate
  modified_base 9: mod_base = OTHER; note = 2'-fluoroadenosine-3'-phosphate
  modified_base 10: mod_base = OTHER; note = 2'-fluorocytidine-3'-phosphate
  modified_base 11: mod_base = OTHER; note = 2'-fluoroadenosine-3'-phosphate
  modified_base 12: mod_base = OTHER; note = 2'-O-methyluridine-3'-phosphate
  modified_base 13: mod_base = OTHER; note = 2'-O-methylcytidine-3'-phosphate
  modified_base 14: mod_base = OTHER; note = 2'-O-methyladenosine-3'-phosphate
  modified_base 15: mod_base = OTHER; note = 2'-O-methyluridine-3'-phosphate
  modified_base 16: mod_base = OTHER; note = 2'-O-methyluridine-3'-phosphate
  modified_base 17: mod_base = OTHER; note = 2'-O-methylguanosine-3'-phosphate
  modified_base 18: mod_base = OTHER; note = 2'-O-methylcytidine-3'-phosphate
  modified_base 19: mod_base = OTHER; note = 2'-O-methylcytidine-3'-phosphate
  modified_base 20: mod_base = OTHER; note = 2'-O-methyladenosine-3'-phosphate
  modified_base 21: mod_base = OTHER; note = 2'-O-methyladenosine-3'-phosphate attached to N-[tris(N-acetylgalactosamine-alkyl)-amidodecanoyl)]-4-hydr oxyprolinol Hyp-(N-acetylgalactosamine-alkyl)3
gaagactgacatcattgccaa

SEQ ID NO: 2299 - RNA, 23 nt, synthetic construct
  misc_feature 1..23: note = Description of Artificial Sequence: Synthetic oligonucleotide
  source 1..23: mol_type = other RNA
  modified_base 1: mod_base = OTHER; note = 2'-O-methyluridine-3'-phosphorothioate
  modified_base 2: mod_base = OTHER; note = 2'-fluorouridine -3'-phosphorothioate
  modified_base 3: mod_base = OTHER; note = 2'-O-methylguanosine-3'-phosphate
  modified_base 4: mod_base = OTHER; note = 2'-O-methylguanosine-3'-phosphate
  modified_base 5: mod_base = OTHER; note = 2'-O-methylcytidine-3'-phosphate
  modified_base 6: mod_base = OTHER; note = 2'-fluoroadenosine-3'-phosphate
  modified_base 7: mod_base = OTHER; note = 2'-O-methyladenosine-3'-phosphate
  modified_base 8: mod_base = OTHER; note = 2'-fluorouridine-3'-phosphate
  modified_base 9: mod_base = OTHER; note = 2'-fluoroguanosine-3'-phosphate
  modified_base 10: mod_base = OTHER; note = 2'-O-methyladenosine-3'-phosphate
  modified_base 11: mod_base = OTHER; note = 2'-O-methyluridine-3'-phosphate
  modified_base 12: mod_base = OTHER; note = 2'-O-methylguanosine-3'-phosphate
  modified_base 13: mod_base = OTHER; note = 2'-O-methyluridine-3'-phosphate
  modified_base 14: mod_base = OTHER; note = 2'-fluorocytidine-3'-phosphate
  modified_base 15: mod_base = OTHER; note = 2'-O-methyladenosine-3'-phosphate
  modified_base 16: mod_base = OTHER; note = 2'-fluoroguanosine-3'-phosphate
  modified_base 17: mod_base = OTHER; note = 2'-O-methyluridine-3'-phosphate
  modified_base 18: mod_base = OTHER; note = 2'-O-methylcytidine-3'-phosphate
  modified_base 19: mod_base = OTHER; note = 2'-O-methyluridine-3'-phosphate
  modified_base 20: mod_base = OTHER; note = 2'-O-methyluridine-3'-phosphate
  modified_base 21: mod_base = OTHER; note = 2'-O-methylcytidine-3'- phosphorothioate
  modified_base 22: mod_base = OTHER; note = 2'-O-methyluridine-3'-phosphorothioate
  modified_base 23: mod_base = OTHER; note = 2'-O-methylcytidine-3'-phosphate
ttggcaatgatgtcagtcttctc

SEQ ID NO: 2300 - RNA, 21 nt, synthetic construct
  misc_feature 1..21: note = Description of Artificial Sequence: Synthetic oligonucleotide
  source 1..21: mol_type = other RNA
  modified_base 1: mod_base = OTHER; note = 2'-O-methyladenosine-3'- phosphorothioate
  modified_base 2: mod_base = OTHER; note = 2'-O-methyladenosine-3'- phosphorothioate
  modified_base 3: mod_base = OTHER; note = 2'-O-methylguanosine-3'-phosphate
  modified_base 4: mod_base = OTHER; note = 2'-O-methyladenosine-3'-phosphate
  modified_base 5: mod_base = OTHER; note = 2'-O-methylcytidine-3'-phosphate
  modified_base 6: mod_base = OTHER; note = 2'-O-methyluridine-3'-phosphate
  modified_base 7: mod_base = OTHER; note = 2'-fluoroguanosine-3'-phosphate
  modified_base 8: mod_base = OTHER; note = 2'-O-methyladenosine-3'-phosphate
  modified_base 9: mod_base = OTHER; note = 2'-fluorocytidine-3'-phosphate
  modified_base 10: mod_base = OTHER; note = 2'-fluoroadenosine-3'-phosphate
  modified_base 11: mod_base = OTHER; note = 2'-fluorouridine-3'-phosphate
  modified_base 12: mod_base = OTHER; note = 2'-O-methylcytidine-3'-phosphate
  modified_base 13: mod_base = OTHER; note = 2'-O-methyladenosine-3'-phosphate
  modified_base 14: mod_base = OTHER; note = 2'-O-methyluridine-3'-phosphate
  modified_base 15: mod_base = OTHER; note = 2'-O-methyluridine-3'-phosphate
  modified_base 16: mod_base = OTHER; note = 2'-O-methylguanosine-3'-phosphate
  modified_base 17: mod_base = OTHER; note = 2'-O-methylcytidine-3'-phosphate
  modified_base 18: mod_base = OTHER; note = 2'-O-methylcytidine-3'-phosphate
  modified_base 19: mod_base = OTHER; note = 2'-O-methyladenosine-3'-phosphate
  modified_base 20: mod_base = OTHER; note = 2'-O-methyladenosine-3'-phosphate
  modified_base 21: mod_base = OTHER; note = 2'-O-methyluridine-3'-phosphate attached to N-[tris(N-acetylgalactosamine-alkyl)-amidodecanoyl)]-4-hydr oxyprolinol Hyp-(N-acetylgalactosamine-alkyl)3
aagactgacatcattgccaat

SEQ ID NO: 2301 - RNA, 23 nt, synthetic construct
  misc_feature 1..23: note = Description of Artificial Sequence: Synthetic oligonucleotide
  source 1..23: mol_type = other RNA
  modified_base 1: mod_base = OTHER; note = 2'-O-methyladenosine-3'- phosphorothioate
  modified_base 2: mod_base = OTHER; note = 2'-fluorouridine -3'-phosphorothioate
  modified_base 3: mod_base = OTHER; note = 2'-O-methyluridine-3'-phosphate
  modified_base 4: mod_base = OTHER; note = 2'-O-methylguanosine-3'-phosphate
  modified_base 5: mod_base = OTHER; note = 2'-O-methylguanosine-3'-phosphate
  modified_base 6: mod_base = OTHER; note = 2'-fluorocytidine-3'-phosphate
  modified_base 7: mod_base = OTHER; note = 2'-O-methyladenosine-3'-phosphate
  modified_base 8: mod_base = OTHER; note = 2'-fluoroadenosine-3'-phosphate
  modified_base 9: mod_base = OTHER; note = 2'-fluorouridine-3'-phosphate
  modified_base 10: mod_base = OTHER; note = 2'-O-methylguanosine-3'-phosphate
  modified_base 11: mod_base = OTHER; note = 2'-O-methyladenosine-3'-phosphate
  modified_base 12: mod_base = OTHER; note = 2'-O-methyluridine-3'-phosphate
  modified_base 13: mod_base = OTHER; note = 2'-O-methylguanosine-3'-phosphate
  modified_base 14: mod_base = OTHER; note = 2'-fluorouridine-3'-phosphate
  modified_base 15: mod_base = OTHER; note = 2'-O-methylcytidine-3'-phosphate
  modified_base 16: mod_base = OTHER; note = 2'-fluoroadenosine-3'-phosphate
  modified_base 17: mod_base = OTHER; note = 2'-O-methylguanosine-3'-phosphate
  modified_base 18: mod_base = OTHER; note = 2'-O-methyluridine-3'-phosphate
  modified_base 19: mod_base = OTHER; note = 2'-O-methylcytidine-3'-phosphate
  modified_base 20: mod_base = OTHER; note = 2'-O-methyluridine-3'-phosphate
  modified_base 21: mod_base = OTHER; note = 2'-O-methyluridine-3'-phosphorothioate
  modified_base 22: mod_base = OTHER; note = 2'-O-methylcytidine-3'- phosphorothioate
  modified_base 23: mod_base = OTHER; note = 2'-O-methyluridine-3'-phosphate
attggcaatgatgtcagtcttct

SEQ ID NO: 2302 - RNA, 21 nt, synthetic construct
  misc_feature 1..21: note = Description of Artificial Sequence: Synthetic oligonucleotide
  source 1..21: mol_type = other RNA
  modified_base 1: mod_base = OTHER; note = 2'-O-methylcytidine-3'- phosphorothioate
  modified_base 2: mod_base = OTHER; note = 2'-O-methyluridine-3'-phosphorothioate
  modified_base 3: mod_base = OTHER; note = 2'-O-methylguanosine-3'-phosphate
  modified_base 4: mod_base = OTHER; note = 2'-O-methyladenosine-3'-phosphate
  modified_base 5: mod_base = OTHER; note = 2'-O-methylguanosine-3'-phosphate
  modified_base 6: mod_base = OTHER; note = 2'-O-methyladenosine-3'-phosphate
  modified_base 7: mod_base = OTHER; note = 2'-fluoroadenosine-3'-phosphate
  modified_base 8: mod_base = OTHER; note = 2'-O-methylguanosine-3'-phosphate
  modified_base 9: mod_base = OTHER; note = 2'-fluoroadenosine-3'-phosphate
  modified_base 10: mod_base = OTHER; note = 2'-fluorocytidine-3'-phosphate
  modified_base 11: mod_base = OTHER; note = 2'-fluorouridine-3'-phosphate
  modified_base 12: mod_base = OTHER; note = 2'-O-methylguanosine-3'-phosphate
  modified_base 13: mod_base = OTHER; note = 2'-O-methyladenosine-3'-phosphate
  modified_base 14: mod_base = OTHER; note = 2'-O-methylcytidine-3'-phosphate
  modified_base 15: mod_base = OTHER; note = 2'-O-methyladenosine-3'-phosphate
  modified_base 16: mod_base = OTHER; note = 2'-O-methyluridine-3'-phosphate
  modified_base 17: mod_base = OTHER; note = 2'-O-methylcytidine-3'-phosphate
  modified_base 18: mod_base = OTHER; note = 2'-O-methyladenosine-3'-phosphate
  modified_base 19: mod_base = OTHER; note = 2'-O-methyluridine-3'-phosphate
  modified_base 20: mod_base = OTHER; note = 2'-O-methyluridine-3'-phosphate
  modified_base 21: mod_base = OTHER; note = 2'-O-methylguanosine-3'-phosphate attached to N-[tris(N-acetylgalactosamine-alkyl)-amidodecanoyl)]-4-hydr oxyprolinol Hyp-(N-acetylgalactosamine-alkyl)3
ctgagaagactgacatcattg

SEQ ID NO: 2303 - RNA, 23 nt, synthetic construct
  misc_feature 1..23: note = Description of Artificial Sequence: Synthetic oligonucleotide
  source 1..23: mol_type = other RNA
  modified_base 1: mod_base = OTHER; note = 2'-O-methylcytidine-3'- phosphorothioate
  modified_base 2: mod_base = OTHER; note = 2'-fluoroadenosine-3'-phosphorothioate
  modified_base 3: mod_base = OTHER; note = 2'-O-methyladenosine-3'-phosphate
  modified_base 4: mod_base = OTHER; note = 2'-O-methyluridine-3'-phosphate
  modified_base 5: mod_base = OTHER; note = 2'-O-methylguanosine-3'-phosphate
  modified_base 6: mod_base = OTHER; note = 2'-fluoroadenosine-3'-phosphate
  modified_base 7: mod_base = OTHER; note = 2'-O-methyluridine-3'-phosphate
  modified_base 8: mod_base = OTHER; note = 2'-fluoroguanosine-3'-phosphate
  modified_base 9: mod_base = OTHER; note = 2'-fluorouridine-3'-phosphate
  modified_base 10: mod_base = OTHER; note = 2'-O-methylcytidine-3'-phosphate
  modified_base 11: mod_base = OTHER; note = 2'-O-methyladenosine-3'-phosphate
  modified_base 12: mod_base = OTHER; note = 2'-O-methylguanosine-3'-phosphate
  modified_base 13: mod_base = OTHER; note = 2'-O-methyluridine-3'-phosphate
  modified_base 14: mod_base = OTHER; note = 2'-fluorocytidine-3'-phosphate
  modified_base 15: mod_base = OTHER; note = 2'-O-methyluridine-3'-phosphate
  modified_base 16: mod_base = OTHER; note = 2'-fluorouridine-3'-phosphate
  modified_base 17: mod_base = OTHER; note = 2'-O-methylcytidine-3'-phosphate
  modified_base 18: mod_base = OTHER; note = 2'-O-methyluridine-3'-phosphate
  modified_base 19: mod_base = OTHER; note = 2'-O-methylcytidine-3'-phosphate
  modified_base 20: mod_base = OTHER; note = 2'-O-methyladenosine-3'-phosphate
  modified_base 21: mod_base = OTHER; note = 2'-O-methylguanosine-3'- phosphorothioate
  modified_base 22: mod_base = OTHER; note = 2'-O-methylcytidine-3'- phosphorothioate
  modified_base 23: mod_base = OTHER; note = 2'-O-methylcytidine-3'-phosphate
caatgatgtcagtcttctcagcc

SEQ ID NO: 2304 - RNA, 21 nt, synthetic construct
  misc_feature 1..21: note = Description of Artificial Sequence: Synthetic oligonucleotide
  source 1..21: mol_type = other RNA
  modified_base 1: mod_base = OTHER; note = 2'-O-methylguanosine-3'- phosphorothioate
  modified_base 2: mod_base = OTHER; note = 2'-O-methylcytidine-3'- phosphorothioate
  modified_base 3: mod_base = OTHER; note = 2'-O-methyluridine-3'-phosphate
  modified_base 4: mod_base = OTHER; note = 2'-O-methylguanosine-3'-phosphate
  modified_base 5: mod_base = OTHER; note = 2'-O-methyladenosine-3'-phosphate
  modified_base 6: mod_base = OTHER; note = 2'-O-methylguanosine-3'-phosphate
  modified_base 7: mod_base = OTHER; note = 2'-fluoroadenosine-3'-phosphate
  modified_base 8: mod_base = OTHER; note = 2'-O-methyladenosine-3'-phosphate
  modified_base 9: mod_base = OTHER; note = 2'-fluoroguanosine-3'-phosphate
  modified_base 10: mod_base = OTHER; note = 2'-fluoroadenosine-3'-phosphate
  modified_base 11: mod_base = OTHER; note = 2'-fluorocytidine-3'-phosphate
  modified_base 12: mod_base = OTHER; note = 2'-O-methyluridine-3'-phosphate
  modified_base 13: mod_base = OTHER; note = 2'-O-methylguanosine-3'-phosphate
  modified_base 14: mod_base = OTHER; note = 2'-O-methyladenosine-3'-phosphate
  modified_base 15: mod_base = OTHER; note = 2'-O-methylcytidine-3'-phosphate
  modified_base 16: mod_base = OTHER; note = 2'-O-methyladenosine-3'-phosphate
  modified_base 17: mod_base = OTHER; note = 2'-O-methyluridine-3'-phosphate
  modified_base 18: mod_base = OTHER; note = 2'-O-methylcytidine-3'-phosphate
  modified_base 19: mod_base = OTHER; note = 2'-O-methyladenosine-3'-phosphate
  modified_base 20: mod_base = OTHER; note = 2'-O-methyluridine-3'-phosphate
  modified_base 21: mod_base = OTHER; note = 2'-O-methyluridine-3'-phosphate attached to N-[tris(N-acetylgalactosamine-alkyl)-amidodecanoyl)]-4-hydr oxyprolinol Hyp-(N-acetylgalactosamine-alkyl)3
gctgagaagactgacatcatt

SEQ ID NO: 2305 - RNA, 23 nt, synthetic construct
  misc_feature 1..23: note = Description of Artificial Sequence: Synthetic oligonucleotide
  source 1..23: mol_type = other RNA
  modified_base 1: mod_base = OTHER; note = 2'-O-methyladenosine-3'- phosphorothioate
  modified_base 2: mod_base = OTHER; note = 2'-fluoroadenosine-3'-phosphorothioate
  modified_base 3: mod_base = OTHER; note = 2'-O-methyluridine-3'-phosphate
  modified_base 4: mod_base = OTHER; note = 2'-O-methylguanosine-3'-phosphate
  modified_base 5: mod_base = OTHER; note = 2'-O-methyladenosine-3'-phosphate
  modified_base 6: mod_base = OTHER; note = 2'-fluorouridine-3'-phosphate
  modified_base 7: mod_base = OTHER; note = 2'-O-methylguanosine-3'-phosphate
  modified_base 8: mod_base = OTHER; note = 2'-fluorouridine-3'-phosphate
  modified_base 9: mod_base = OTHER; note = 2'-fluorocytidine-3'-phosphate
  modified_base 10: mod_base = OTHER; note = 2'-O-methyladenosine-3'-phosphate
  modified_base 11: mod_base = OTHER; note = 2'-O-methylguanosine-3'-phosphate
  modified_base 12: mod_base = OTHER; note = 2'-O-methyluridine-3'-phosphate
  modified_base 13: mod_base = OTHER; note = 2'-O-methylcytidine-3'-phosphate
  modified_base 14: mod_base = OTHER; note = 2'-fluorouridine-3'-phosphate
  modified_base 15: mod_base = OTHER; note = 2'-O-methyluridine-3'-phosphate
  modified_base 16: mod_base = OTHER; note = 2'-fluorocytidine-3'-phosphate
  modified_base 17: mod_base = OTHER; note = 2'-O-methyluridine-3'-phosphate
  modified_base 18: mod_base = OTHER; note = 2'-O-methylcytidine-3'-phosphate
  modified_base 19: mod_base = OTHER; note = 2'-O-methyladenosine-3'-phosphate
  modified_base 20: mod_base = OTHER; note = 2'-O-methylguanosine-3'-phosphate
  modified_base 21: mod_base = OTHER; note = 2'-O-methylcytidine-3'- phosphorothioate
  modified_base 22: mod_base = OTHER; note = 2'-O-methylcytidine-3'- phosphorothioate
  modified_base 23: mod_base = OTHER; note = 2'-O-methyladenosine-3'-phosphate
aatgatgtcagtcttctcagcca

SEQ ID NO: 2306 - RNA, 21 nt, synthetic construct
  misc_feature 1..21: note = Description of Artificial Sequence: Synthetic oligonucleotide
  source 1..21: mol_type = other RNA
  modified_base 1: mod_base = OTHER; note = 2'-O-methylguanosine-3'- phosphorothioate
  modified_base 2: mod_base = OTHER; note = 2'-O-methylcytidine-3'- phosphorothioate
  modified_base 3: mod_base = OTHER; note = 2'-O-methyluridine-3'-phosphate
  modified_base 4: mod_base = OTHER; note = 2'-O-methylcytidine-3'-phosphate
  modified_base 5: mod_base = OTHER; note = 2'-O-methyladenosine-3'-phosphate
  modified_base 6: mod_base = OTHER; note = 2'-O-methylguanosine-3'-phosphate
  modified_base 7: mod_base = OTHER; note = 2'-fluoroguanosine-3'-phosphate
  modified_base 8: mod_base = OTHER; note = 2'-O-methyluridine-3'-phosphate
  modified_base 9: mod_base = OTHER; note = 2'-fluorouridine-3'-phosphate
  modified_base 10: mod_base = OTHER; note = 2'-fluorocytidine-3'-phosphate
  modified_base 11: mod_base = OTHER; note = 2'-fluoroadenosine-3'-phosphate
  modified_base 12: mod_base = OTHER; note = 2'-O-methyladenosine-3'-phosphate
  modified_base 13: mod_base = OTHER; note = 2'-O-methyladenosine-3'-phosphate
  modified_base 14: mod_base = OTHER; note = 2'-O-methylguanosine-3'-phosphate
  modified_base 15: mod_base = OTHER; note = 2'-O-methyluridine-3'-phosphate
  modified_base 16: mod_base = OTHER; note = 2'-O-methylguanosine-3'-phosphate
  modified_base 17: mod_base = OTHER; note = 2'-O-methyluridine-3'-phosphate
  modified_base 18: mod_base = OTHER; note = 2'-O-methyluridine-3'-phosphate
  modified_base 19: mod_base = OTHER; note = 2'-O-methylguanosine-3'-phosphate
  modified_base 20: mod_base = OTHER; note = 2'-O-methylguanosine-3'-phosphate
  modified_base 21: mod_base = OTHER; note = 2'-O-methyluridine-3'-phosphate attached to N-[tris(N-acetylgalactosamine-alkyl)-amidodecanoyl)]-4-hydr oxyprolinol Hyp-(N-acetylgalactosamine-alkyl)3
gctcaggttcaaagtgttggt

SEQ ID NO: 2307 - RNA, 23 nt, synthetic construct
  misc_feature 1..23: note = Description of Artificial Sequence: Synthetic oligonucleotide
  source 1..23: mol_type = other RNA
  modified_base 1: mod_base = OTHER; note = 2'-O-methyladenosine-3'- phosphorothioate
  modified_base 2: mod_base = OTHER; note = 2'-fluorocytidine-3'-phosphorothioate
  modified_base 3: mod_base = OTHER; note = 2'-O-methylcytidine-3'-phosphate
  modified_base 4: mod_base = OTHER; note = 2'-O-methyladenosine-3'-phosphate
  modified_base 5: mod_base = OTHER; note = 2'-O-methyladenosine-3'-phosphate
  modified_base 6: mod_base = OTHER; note = 2'-fluorocytidine-3'-phosphate
  modified_base 7: mod_base = OTHER; note = 2'-O-methyladenosine-3'-phosphate
  modified_base 8: mod_base = OTHER; note = 2'-fluorocytidine-3'-phosphate
  modified_base 9: mod_base = OTHER; note = 2'-fluorouridine-3'-phosphate
  modified_base 10: mod_base = OTHER; note = 2'-O-methyluridine-3'-phosphate
  modified_base 11: mod_base = OTHER; note = 2'-O-methyluridine-3'-phosphate
  modified_base 12: mod_base = OTHER; note = 2'-O-methylguanosine-3'-phosphate
  modified_base 13: mod_base = OTHER; note = 2'-O-methyladenosine-3'-phosphate
  modified_base 14: mod_base = OTHER; note = 2'-fluoroadenosine-3'-phosphate
  modified_base 15: mod_base = OTHER; note = 2'-O-methylcytidine-3'-phosphate
  modified_base 16: mod_base = OTHER; note = 2'-fluorocytidine-3'-phosphate
  modified_base 17: mod_base = OTHER; note = 2'-O-methyluridine-3'-phosphate
  modified_base 18: mod_base = OTHER; note = 2'-O-methylguanosine-3'-phosphate
  modified_base 19: mod_base = OTHER; note = 2'-O-methyladenosine-3'-phosphate
  modified_base 20: mod_base = OTHER; note = 2'-O-methylguanosine-3'-phosphate
  modified_base 21: mod_base = OTHER; note = 2'-O-methylcytidine-3'- phosphorothioate
  modified_base 22: mod_base = OTHER; note = 2'-O-methyluridine-3'-phosphorothioate
  modified_base 23: mod_base = OTHER; note = 2'-O-methyluridine-3'-phosphate
accaacactttgaacctgagctt

SEQ ID NO: 2308 - RNA, 21 nt, synthetic construct
  misc_feature 1..21: note = Description of Artificial Sequence: Synthetic oligonucleotide
  source 1..21: mol_type = other RNA
  modified_base 1: mod_base = OTHER; note = 2'-O-methylcytidine-3'- phosphorothioate
  modified_base 2: mod_base = OTHER; note = 2'-O-methyluridine-3'-phosphorothioate
  modified_base 3: mod_base = OTHER; note = 2'-O-methylcytidine-3'-phosphate
  modified_base 4: mod_base = OTHER; note = 2'-O-methyladenosine-3'-phosphate
  modified_base 5: mod_base = OTHER; note = 2'-O-methylguanosine-3'-phosphate
  modified_base 6: mod_base = OTHER; note = 2'-O-methylguanosine-3'-phosphate
  modified_base 7: mod_base = OTHER; note = 2'-fluorouridine-3'-phosphate
  modified_base 8: mod_base = OTHER; note = 2'-O-methyluridine-3'-phosphate
  modified_base 9: mod_base = OTHER; note = 2'-fluorocytidine-3'-phosphate
  modified_base 10: mod_base = OTHER; note = 2'-fluoroadenosine-3'-phosphate
  modified_base 11: mod_base = OTHER; note = 2'-fluoroadenosine-3'-phosphate
  modified_base 12: mod_base = OTHER; note = 2'-O-methyladenosine-3'-phosphate
  modified_base 13: mod_base = OTHER; note = 2'-O-methylguanosine-3'-phosphate
  modified_base 14: mod_base = OTHER; note = 2'-O-methyluridine-3'-phosphate
  modified_base 15: mod_base = OTHER; note = 2'-O-methylguanosine-3'-phosphate
  modified_base 16: mod_base = OTHER; note = 2'-O-methyluridine-3'-phosphate
  modified_base 17: mod_base = OTHER; note = 2'-O-methyluridine-3'-phosphate
  modified_base 18: mod_base = OTHER; note = 2'-O-methylguanosine-3'-phosphate
  modified_base 19: mod_base = OTHER; note = 2'-O-methylguanosine-3'-phosphate
  modified_base 20: mod_base = OTHER; note = 2'-O-methyluridine-3'-phosphate
  modified_base 21: mod_base = OTHER; note = 2'-O-methyladenosine-3'-phosphate attached to N-[tris(N-acetylgalactosamine-alkyl)-amidodecanoyl)]-4-hydr oxyprolinol Hyp-(N-acetylgalactosamine-alkyl)3
ctcaggttcaaagtgttggta

SEQ ID NO: 2309 - RNA, 23 nt, synthetic construct
  misc_feature 1..23: note = Description of Artificial Sequence: Synthetic oligonucleotide
  source 1..23: mol_type = other RNA
  modified_base 1: mod_base = OTHER; note = 2'-O-methyluridine-3'-phosphorothioate
  modified_base 2: mod_base = OTHER; note = 2'-fluoroadenosine-3'-phosphorothioate
  modified_base 3: mod_base = OTHER; note = 2'-O-methylcytidine-3'-phosphate
  modified_base 4: mod_base = OTHER; note = 2'-O-methylcytidine-3'-phosphate
  modified_base 5: mod_base = OTHER; note = 2'-O-methyladenosine-3'-phosphate
  modified_base 6: mod_base = OTHER; note = 2'-fluoroadenosine-3'-phosphate
  modified_base 7: mod_base = OTHER; note = 2'-O-methylcytidine-3'-phosphate
  modified_base 8: mod_base = OTHER; note = 2'-fluoroadenosine-3'-phosphate
  modified_base 9: mod_base = OTHER; note = 2'-fluorocytidine-3'-phosphate
  modified_base 10: mod_base = OTHER; note = 2'-O-methyluridine-3'-phosphate
  modified_base 11: mod_base = OTHER; note = 2'-O-methyluridine-3'-phosphate
  modified_base 12: mod_base = OTHER; note = 2'-O-methyluridine-3'-phosphate
  modified_base 13: mod_base = OTHER; note = 2'-O-methylguanosine-3'-phosphate
  modified_base 14: mod_base = OTHER; note = 2'-fluoroadenosine-3'-phosphate
  modified_base 15: mod_base = OTHER; note = 2'-O-methyladenosine-3'-phosphate
  modified_base 16: mod_base = OTHER; note = 2'-fluorocytidine-3'-phosphate
  modified_base 17: mod_base = OTHER; note = 2'-O-methylcytidine-3'-phosphate
  modified_base 18: mod_base = OTHER; note = 2'-O-methyluridine-3'-phosphate
  modified_base 19: mod_base = OTHER; note = 2'-O-methylguanosine-3'-phosphate
  modified_base 20: mod_base = OTHER; note = 2'-O-methyladenosine-3'-phosphate
  modified_base 21: mod_base = OTHER; note = 2'-O-methylguanosine-3'- phosphorothioate
  modified_base 22: mod_base = OTHER; note = 2'-O-methylcytidine-3'- phosphorothioate
  modified_base 23: mod_base = OTHER; note = 2'-O-methyluridine-3'-phosphate
taccaacactttgaacctgagct

SEQ ID NO: 2310 - RNA, 21 nt, synthetic construct
  misc_feature 1..21: note = Description of Artificial Sequence: Synthetic oligonucleotide
  source 1..21: mol_type = other RNA
  modified_base 1: mod_base = OTHER; note = 2'-O-methylguanosine-3'- phosphorothioate
  modified_base 2: mod_base = OTHER; note = 2'-O-methyluridine-3'-phosphorothioate
  modified_base 3: mod_base = OTHER; note = 2'-O-methyladenosine-3'-phosphate
  modified_base 4: mod_base = OTHER; note = 2'-O-methyladenosine-3'-phosphate
  modified_base 5: mod_base = OTHER; note = 2'-O-methylguanosine-3'-phosphate
  modified_base 6: mod_base = OTHER; note = 2'-O-methylcytidine-3'-phosphate
  modified_base 7: mod_base = OTHER; note = 2'-fluorouridine-3'-phosphate
  modified_base 8: mod_base = OTHER; note = 2'-O-methylcytidine-3'-phosphate
  modified_base 9: mod_base = OTHER; note = 2'-fluoroadenosine-3'-phosphate
  modified_base 10: mod_base = OTHER; note = 2'-fluoroguanosine-3'-phosphate
  modified_base 11: mod_base = OTHER; note = 2'-fluoroguanosine-3'-phosphate
  modified_base 12: mod_base = OTHER; note = 2'-O-methyluridine-3'-phosphate
  modified_base 13: mod_base = OTHER; note = 2'-O-methyluridine-3'-phosphate
  modified_base 14: mod_base = OTHER; note = 2'-O-methylcytidine-3'-phosphate
  modified_base 15: mod_base = OTHER; note = 2'-O-methyladenosine-3'-phosphate
  modified_base 16: mod_base = OTHER; note = 2'-O-methyladenosine-3'-phosphate
  modified_base 17: mod_base = OTHER; note = 2'-O-methyladenosine-3'-phosphate
  modified_base 18: mod_base = OTHER; note = 2'-O-methylguanosine-3'-phosphate
  modified_base 19: mod_base = OTHER; note = 2'-O-methyluridine-3'-phosphate
  modified_base 20: mod_base = OTHER; note = 2'-O-methylguanosine-3'-phosphate
  modified_base 21: mod_base = OTHER; note = 2'-O-methyluridine-3'-phosphate attached to N-[tris(N-acetylgalactosamine-alkyl)-amidodecanoyl)]-4-hydr oxyprolinol Hyp-(N-acetylgalactosamine-alkyl)3
gtaagctcaggttcaaagtgt

SEQ ID NO: 2311 - RNA, 23 nt, synthetic construct
  misc_feature 1..23: note = Description of Artificial Sequence: Synthetic oligonucleotide
  source 1..23: mol_type = other RNA
  modified_base 1: mod_base = OTHER; note = 2'-O-methyladenosine-3'- phosphorothioate
  modified_base 2: mod_base = OTHER; note = 2'-fluorocytidine-3'-phosphorothioate
  modified_base 3: mod_base = OTHER; note = 2'-O-methyladenosine-3'-phosphate
  modified_base 4: mod_base = OTHER; note = 2'-O-methylcytidine-3'-phosphate
  modified_base 5: mod_base = OTHER; note = 2'-O-methyluridine-3'-phosphate
  modified_base 6: mod_base = OTHER; note = 2'-fluorouridine-3'-phosphate
  modified_base 7: mod_base = OTHER; note = 2'-O-methyluridine-3'-phosphate
  modified_base 8: mod_base = OTHER; note = 2'-fluoroguanosine-3'-phosphate
  modified_base 9: mod_base = OTHER; note = 2'-fluoroadenosine-3'-phosphate
  modified_base 10: mod_base = OTHER; note = 2'-O-methyladenosine-3'-phosphate
  modified_base 11: mod_base = OTHER; note = 2'-O-methylcytidine-3'-phosphate
  modified_base 12: mod_base = OTHER; note = 2'-O-methylcytidine-3'-phosphate
  modified_base 13: mod_base = OTHER; note = 2'-O-methyluridine-3'-phosphate
  modified_base 14: mod_base = OTHER; note = 2'-fluoroguanosine-3'-phosphate
  modified_base 15: mod_base = OTHER; note = 2'-O-methyladenosine-3'-phosphate
  modified_base 16: mod_base = OTHER; note = 2'-fluoroguanosine-3'-phosphate
  modified_base 17: mod_base = OTHER; note = 2'-O-methylcytidine-3'-phosphate
  modified_base 18: mod_base = OTHER; note = 2'-O-methyluridine-3'-phosphate
  modified_base 19: mod_base = OTHER; note = 2'-O-methyluridine-3'-phosphate
  modified_base 20: mod_base = OTHER; note = 2'-O-methyladenosine-3'-phosphate
  modified_base 21: mod_base = OTHER; note = 2'-O-methylcytidine-3'- phosphorothioate
  modified_base 22: mod_base = OTHER; note = 2'-O-methyladenosine-3'- phosphorothioate
  modified_base 23: mod_base = OTHER; note = 2'-O-methyladenosine-3'-phosphate
acactttgaacctgagcttacaa

SEQ ID NO: 2312 - RNA, 21 nt, synthetic construct
  misc_feature 1..21: note = Description of Artificial Sequence: Synthetic oligonucleotide
  source 1..21: mol_type = other RNA
  modified_base 1: mod_base = OTHER; note = 2'-O-methyluridine-3'-phosphorothioate
  modified_base 2: mod_base = OTHER; note = 2'-O-methylguanosine-3'- phosphorothioate
  modified_base 3: mod_base = OTHER; note = 2'-O-methyluridine-3'-phosphate
  modified_base 4: mod_base = OTHER; note = 2'-O-methyladenosine-3'-phosphate
  modified_base 5: mod_base = OTHER; note = 2'-O-methyladenosine-3'-phosphate
  modified_base 6: mod_base = OTHER; note = 2'-O-methylguanosine-3'-phosphate
  modified_base 7: mod_base = OTHER; note = 2'-fluorocytidine-3'-phosphate
  modified_base 8: mod_base = OTHER; note = 2'-O-methyluridine-3'-phosphate
  modified_base 9: mod_base = OTHER; note = 2'-fluorocytidine-3'-phosphate
  modified_base 10: mod_base = OTHER; note = 2'-fluoroadenosine-3'-phosphate
  modified_base 11: mod_base = OTHER; note = 2'-fluoroguanosine-3'-phosphate
  modified_base 12: mod_base = OTHER; note = 2'-O-methylguanosine-3'-phosphate
  modified_base 13: mod_base = OTHER; note = 2'-O-methyluridine-3'-phosphate
  modified_base 14: mod_base = OTHER; note = 2'-O-methyluridine-3'-phosphate
  modified_base 15: mod_base = OTHER; note = 2'-O-methylcytidine-3'-phosphate
  modified_base 16: mod_base = OTHER; note = 2'-O-methyladenosine-3'-phosphate
  modified_base 17: mod_base = OTHER; note = 2'-O-methyladenosine-3'-phosphate
  modified_base 18: mod_base = OTHER; note = 2'-O-methyladenosine-3'-phosphate
  modified_base 19: mod_base = OTHER; note = 2'-O-methylguanosine-3'-phosphate
  modified_base 20: mod_base = OTHER; note = 2'-O-methyluridine-3'-phosphate
  modified_base 21: mod_base = OTHER; note = 2'-O-methylguanosine-3'-phosphate attached to N-[tris(N-acetylgalactosamine-alkyl)-amidodecanoyl)]-4-hydr oxyprolinol Hyp-(N-acetylgalactosamine-alkyl)3
tgtaagctcaggttcaaagtg

SEQ ID NO: 2313 - RNA, 23 nt, synthetic construct
  misc_feature 1..23: note = Description of Artificial Sequence: Synthetic oligonucleotide
  source 1..23: mol_type = other RNA
  modified_base 1: mod_base = OTHER; note = 2'-O-methylcytidine-3'- phosphorothioate
  modified_base 2: mod_base = OTHER; note = 2'-fluoroadenosine-3'-phosphorothioate
  modified_base 3: mod_base = OTHER; note = 2'-O-methylcytidine-3'-phosphate
  modified_base 4: mod_base = OTHER; note = 2'-O-methyluridine-3'-phosphate
  modified_base 5: mod_base = OTHER; note = 2'-O-methyluridine-3'-phosphate
  modified_base 6: mod_base = OTHER; note = 2'-fluorouridine-3'-phosphate
  modified_base 7: mod_base = OTHER; note = 2'-O-methylguanosine-3'-phosphate
  modified_base 8: mod_base = OTHER; note = 2'-fluoroadenosine-3'-phosphate
  modified_base 9: mod_base = OTHER; note = 2'-fluoroadenosine-3'-phosphate
  modified_base 10: mod_base = OTHER; note = 2'-O-methylcytidine-3'-phosphate
  modified_base 11: mod_base = OTHER; note = 2'-O-methylcytidine-3'-phosphate
  modified_base 12: mod_base = OTHER; note = 2'-O-methyluridine-3'-phosphate
  modified_base 13: mod_base = OTHER; note = 2'-O-methylguanosine-3'-phosphate
  modified_base 14: mod_base = OTHER; note = 2'-fluoroadenosine-3'-phosphate
  modified_base 15: mod_base = OTHER; note = 2'-O-methylguanosine-3'-phosphate
  modified_base 16: mod_base = OTHER; note = 2'-fluorocytidine-3'-phosphate
  modified_base 17: mod_base = OTHER; note = 2'-O-methyluridine-3'-phosphate
  modified_base 18: mod_base = OTHER; note = 2'-O-methyluridine-3'-phosphate
  modified_base 19: mod_base = OTHER; note = 2'-O-methyladenosine-3'-phosphate
  modified_base 20: mod_base = OTHER; note = 2'-O-methylcytidine-3'-phosphate
  modified_base 21: mod_base = OTHER; note = 2'-O-methyladenosine-3'- phosphorothioate
  modified_base 22: mod_base = OTHER; note = 2'-O-methyladenosine-3'- phosphorothioate
  modified_base 23: mod_base = OTHER; note = 2'-O-methyluridine-3'-phosphate
cactttgaacctgagcttacaat

SEQ ID NO: 2314 - RNA, 21 nt, synthetic construct
  misc_feature 1..21: note = Description of Artificial Sequence: Synthetic oligonucleotide
  source 1..21: mol_type = other RNA
  modified_base 1: mod_base = OTHER; note = 2'-O-methyladenosine-3'- phosphorothioate
  modified_base 2: mod_base = OTHER; note = 2'-O-methyluridine-3'-phosphorothioate
  modified_base 3: mod_base = OTHER; note = 2'-O-methylguanosine-3'-phosphate
  modified_base 4: mod_base = OTHER; note = 2'-O-methyluridine-3'-phosphate
  modified_base 5: mod_base = OTHER; note = 2'-O-methyladenosine-3'-phosphate
  modified_base 6: mod_base = OTHER; note = 2'-O-methyluridine-3'-phosphate
  modified_base 7: mod_base = OTHER; note = 2'-fluorouridine-3'-phosphate
  modified_base 8: mod_base = OTHER; note = 2'-O-methyladenosine-3'-phosphate
  modified_base 9: mod_base = OTHER; note = 2'-fluorocytidine-3'-phosphate
  modified_base 10: mod_base = OTHER; note = 2'-fluorouridine-3'-phosphate
  modified_base 11: mod_base = OTHER; note = 2'-fluorouridine-3'-phosphate
  modified_base 12: mod_base = OTHER; note = 2'-O-methylguanosine-3'-phosphate
  modified_base 13: mod_base = OTHER; note = 2'-O-methyladenosine-3'-phosphate
  modified_base 14: mod_base = OTHER; note = 2'-O-methylcytidine-3'-phosphate
  modified_base 15: mod_base = OTHER; note = 2'-O-methyladenosine-3'-phosphate
  modified_base 16: mod_base = OTHER; note = 2'-O-methyladenosine-3'-phosphate
  modified_base 17: mod_base = OTHER; note = 2'-O-methyladenosine-3'-phosphate
  modified_base 18: mod_base = OTHER; note = 2'-O-methylguanosine-3'-phosphate
  modified_base 19: mod_base = OTHER; note = 2'-O-methyladenosine-3'-phosphate
  modified_base 20: mod_base = OTHER; note = 2'-O-methylguanosine-3'-phosphate
  modified_base 21: mod_base = OTHER; note = 2'-O-methyladenosine-3'-phosphate attached to N-[tris(N-acetylgalactosamine-alkyl)-amidodecanoyl)]-4-hydr oxyprolinol Hyp-(N-acetylgalactosamine-alkyl)3
atgtattacttgacaaagaga

SEQ ID NO: 2315 - RNA, 23 nt, synthetic construct
  misc_feature 1..23: note = Description of Artificial Sequence: Synthetic oligonucleotide
  source 1..23: mol_type = other RNA
  modified_base 1: mod_base = OTHER; note = 2'-O-methyluridine-3'-phosphorothioate
  modified_base 2: mod_base = OTHER; note = 2'-fluorocytidine-3'-phosphorothioate
  modified_base 3: mod_base = OTHER; note = 2'-O-methyluridine-3'-phosphate
  modified_base 4: mod_base = OTHER; note = 2'-O-methylcytidine-3'-phosphate
  modified_base 5: mod_base = OTHER; note = 2'-O-methyluridine-3'-phosphate
  modified_base 6: mod_base = OTHER; note = 2'-fluorouridine-3'-phosphate
  modified_base 7: mod_base = OTHER; note = 2'-O-methyluridine-3'-phosphate
  modified_base 8: mod_base = OTHER; note = 2'-fluoroguanosine-3'-phosphate
  modified_base 9: mod_base = OTHER; note = 2'-fluorouridine-3'-phosphate
  modified_base 10: mod_base = OTHER; note = 2'-O-methylcytidine-3'-phosphate
  modified_base 11: mod_base = OTHER; note = 2'-O-methyladenosine-3'-phosphate
  modified_base 12: mod_base = OTHER; note = 2'-O-methyladenosine-3'-phosphate
  modified_base 13: mod_base = OTHER; note = 2'-O-methylguanosine-3'-phosphate
  modified_base 14: mod_base = OTHER; note = 2'-fluorouridine-3'-phosphate
  modified_base 15: mod_base = OTHER; note = 2'-O-methyladenosine-3'-phosphate
  modified_base 16: mod_base = OTHER; note = 2'-fluoroadenosine-3'-phosphate
  modified_base 17: mod_base = OTHER; note = 2'-O-methyluridine-3'-phosphate
  modified_base 18: mod_base = OTHER; note = 2'-O-methyladenosine-3'-phosphate
  modified_base 19: mod_base = OTHER; note = 2'-O-methylcytidine-3'-phosphate
  modified_base 20: mod_base = OTHER; note = 2'-O-methyladenosine-3'-phosphate
  modified_base 21: mod_base = OTHER; note = 2'-O-methyluridine-3'-phosphorothioate
  modified_base 22: mod_base = OTHER; note = 2'-O-methylguanosine-3'- phosphorothioate
  modified_base 23: mod_base = OTHER; note = 2'-O-methylcytidine-3'-phosphate
tctctttgtcaagtaatacatgc

SEQ ID NO: 2316 - RNA, 21 nt, synthetic construct
  misc_feature 1..21: note = Description of Artificial Sequence: Synthetic oligonucleotide
  source 1..21: mol_type = other RNA
  modified_base 1: mod_base = OTHER; note = 2'-O-methyluridine-3'-phosphorothioate
  modified_base 2: mod_base = OTHER; note = 2'-O-methylguanosine-3'- phosphorothioate
  modified_base 3: mod_base = OTHER; note = 2'-O-methyluridine-3'-phosphate
  modified_base 4: mod_base = OTHER; note = 2'-O-methyladenosine-3'-phosphate
  modified_base 5: mod_base = OTHER; note = 2'-O-methyluridine-3'-phosphate
  modified_base 6: mod_base = OTHER; note = 2'-O-methyluridine-3'-phosphate
  modified_base 7: mod_base = OTHER; note = 2'-fluoroadenosine-3'-phosphate
  modified_base 8: mod_base = OTHER; note = 2'-O-methylcytidine-3'-phosphate
  modified_base 9: mod_base = OTHER; note = 2'-fluorouridine-3'-phosphate
  modified_base 10: mod_base = OTHER; note = 2'-fluorouridine-3'-phosphate
  modified_base 11: mod_base = OTHER; note = 2'-fluoroguanosine-3'-phosphate
  modified_base 12: mod_base = OTHER; note = 2'-O-methyladenosine-3'-phosphate
  modified_base 13: mod_base = OTHER; note = 2'-O-methylcytidine-3'-phosphate
  modified_base 14: mod_base = OTHER; note = 2'-O-methyladenosine-3'-phosphate
  modified_base 15: mod_base = OTHER; note = 2'-O-methyladenosine-3'-phosphate
  modified_base 16: mod_base = OTHER; note = 2'-O-methyladenosine-3'-phosphate
  modified_base 17: mod_base = OTHER; note = 2'-O-methylguanosine-3'-phosphate
  modified_base 18: mod_base = OTHER; note = 2'-O-methyladenosine-3'-phosphate
  modified_base 19: mod_base = OTHER; note = 2'-O-methylguanosine-3'-phosphate
  modified_base 20: mod_base = OTHER; note = 2'-O-methyladenosine-3'-phosphate
  modified_base 21: mod_base = OTHER; note = 2'-O-methylcytidine-3'-phosphate attached to N-[tris(N-acetylgalactosamine-alkyl)-amidodecanoyl)]-4-hydr oxyprolinol Hyp-(N-acetylgalactosamine-alkyl)3
tgtattacttgacaaagagac

SEQ ID NO: 2317 - RNA, 23 nt, synthetic construct
  misc_feature 1..23: note = Description of Artificial Sequence: Synthetic oligonucleotide
  source 1..23: mol_type = other RNA
  modified_base 1: mod_base = OTHER; note = 2'-O-methylguanosine-3'- phosphorothioate
  modified_base 2: mod_base = OTHER; note = 2'-fluorouridine -3'-phosphorothioate
  modified_base 3: mod_base = OTHER; note = 2'-O-methylcytidine-3'-phosphate
  modified_base 4: mod_base = OTHER; note = 2'-O-methyluridine-3'-phosphate
  modified_base 5: mod_base = OTHER; note = 2'-O-methylcytidine-3'-phosphate
  modified_base 6: mod_base = OTHER; note = 2'-fluorouridine-3'-phosphate
  modified_base 7: mod_base = OTHER; note = 2'-O-methyluridine-3'-phosphate
  modified_base 8: mod_base = OTHER; note = 2'-fluorouridine-3'-phosphate
  modified_base 9: mod_base = OTHER; note = 2'-fluoroguanosine-3'-phosphate
  modified_base 10: mod_base = OTHER; note = 2'-O-methyluridine-3'-phosphate
  modified_base 11: mod_base = OTHER; note = 2'-O-methylcytidine-3'-phosphate
  modified_base 12: mod_base = OTHER; note = 2'-O-methyladenosine-3'-phosphate
  modified_base 13: mod_base = OTHER; note = 2'-O-methyladenosine-3'-phosphate
  modified_base 14: mod_base = OTHER; note = 2'-fluoroguanosine-3'-phosphate
  modified_base 15: mod_base = OTHER; note = 2'-O-methyluridine-3'-phosphate
  modified_base 16: mod_base = OTHER; note = 2'-fluoroadenosine-3'-phosphate
  modified_base 17: mod_base = OTHER; note = 2'-O-methyladenosine-3'-phosphate
  modified_base 18: mod_base = OTHER; note = 2'-O-methyluridine-3'-phosphate
  modified_base 19: mod_base = OTHER; note = 2'-O-methyladenosine-3'-phosphate
  modified_base 20: mod_base = OTHER; note = 2'-O-methylcytidine-3'-phosphate
  modified_base 21: mod_base = OTHER; note = 2'-O-methyladenosine-3'- phosphorothioate
  modified_base 22: mod_base = OTHER; note = 2'-O-methyluridine-3'-phosphorothioate
  modified_base 23: mod_base = OTHER; note = 2'-O-methylguanosine-3'-phosphate
gtctctttgtcaagtaatacatg

SEQ ID NO: 2318 - RNA, 21 nt, synthetic construct
  misc_feature 1..21: note = Description of Artificial Sequence: Synthetic oligonucleotide
  source 1..21: mol_type = other RNA
  modified_base 1: mod_base = OTHER; note = 2'-O-methylcytidine-3'- phosphorothioate
  modified_base 2: mod_base = OTHER; note = 2'-O-methyladenosine-3'- phosphorothioate
  modified_base 3: mod_base = OTHER; note = 2'-O-methylguanosine-3'-phosphate
  modified_base 4: mod_base = OTHER; note = 2'-O-methylcytidine-3'-phosphate
  modified_base 5: mod_base = OTHER; note = 2'-O-methyladenosine-3'-phosphate
  modified_base 6: mod_base = OTHER; note = 2'-O-methyluridine-3'-phosphate
  modified_base 7: mod_base = OTHER; note = 2'-fluoroguanosine-3'-phosphate
  modified_base 8: mod_base = OTHER; note = 2'-O-methyluridine-3'-phosphate
  modified_base 9: mod_base = OTHER; note = 2'-fluoroadenosine-3'-phosphate
  modified_base 10: mod_base = OTHER; note = 2'-fluorouridine-3'-phosphate
  modified_base 11: mod_base = OTHER; note = 2'-fluorouridine-3'-phosphate
  modified_base 12: mod_base = OTHER; note = 2'-O-methyladenosine-3'-phosphate
  modified_base 13: mod_base = OTHER; note = 2'-O-methylcytidine-3'-phosphate
  modified_base 14: mod_base = OTHER; note = 2'-O-methyluridine-3'-phosphate
  modified_base 15: mod_base = OTHER; note = 2'-O-methyluridine-3'-phosphate
  modified_base 16: mod_base = OTHER; note = 2'-O-methylguanosine-3'-phosphate
  modified_base 17: mod_base = OTHER; note = 2'-O-methyladenosine-3'-phosphate
  modified_base 18: mod_base = OTHER; note = 2'-O-methylcytidine-3'-phosphate
  modified_base 19: mod_base = OTHER; note = 2'-O-methyladenosine-3'-phosphate
  modified_base 20: mod_base = OTHER; note = 2'-O-methyladenosine-3'-phosphate
  modified_base 21: mod_base = OTHER; note = 2'-O-methyladenosine-3'-phosphate attached to N-[tris(N-acetylgalactosamine-alkyl)-amidodecanoyl)]-4-hydr oxyprolinol Hyp-(N-acetylgalactosamine-alkyl)3
cagcatgtattacttgacaaa

SEQ ID NO: 2319 - RNA, 23 nt, synthetic construct
  misc_feature 1..23: note = Description of Artificial Sequence: Synthetic oligonucleotide
  source 1..23: mol_type = other RNA
  modified_base 1: mod_base = OTHER; note = 2'-O-methyluridine-3'-phosphorothioate
  modified_base 2: mod_base = OTHER; note = 2'-fluorouridine -3'-phosphorothioate
  modified_base 3: mod_base = OTHER; note = 2'-O-methyluridine-3'-phosphate
  modified_base 4: mod_base = OTHER; note = 2'-O-methylguanosine-3'-phosphate
  modified_base 5: mod_base = OTHER; note = 2'-O-methyluridine-3'-phosphate
  modified_base 6: mod_base = OTHER; note = 2'-fluorocytidine-3'-phosphate
  modified_base 7: mod_base = OTHER; note = 2'-O-methyladenosine-3'-phosphate
  modified_base 8: mod_base = OTHER; note = 2'-fluoroadenosine-3'-phosphate
  modified_base 9: mod_base = OTHER; note = 2'-fluoroguanosine-3'-phosphate
  modified_base 10: mod_base = OTHER; note = 2'-O-methyluridine-3'-phosphate
  modified_base 11: mod_base = OTHER; note = 2'-O-methyladenosine-3'-phosphate
  modified_base 12: mod_base = OTHER; note = 2'-O-methyladenosine-3'-phosphate
  modified_base 13: mod_base = OTHER; note = 2'-O-methyluridine-3'-phosphate
  modified_base 14: mod_base = OTHER; note = 2'-fluoroadenosine-3'-phosphate
  modified_base 15: mod_base = OTHER; note = 2'-O-methylcytidine-3'-phosphate
  modified_base 16: mod_base = OTHER; note = 2'-fluoroadenosine-3'-phosphate
  modified_base 17: mod_base = OTHER; note = 2'-O-methyluridine-3'-phosphate
  modified_base 18: mod_base = OTHER; note = 2'-O-methylguanosine-3'-phosphate
  modified_base 19: mod_base = OTHER; note = 2'-O-methylcytidine-3'-phosphate
  modified_base 20: mod_base = OTHER; note = 2'-O-methyluridine-3'-phosphate
  modified_base 21: mod_base = OTHER; note = 2'-O-methylguanosine-3'- phosphorothioate
  modified_base 22: mod_base = OTHER; note = 2'-O-methyladenosine-3'- phosphorothioate
  modified_base 23: mod_base = OTHER; note = 2'-O-methyladenosine-3'-phosphate
tttgtcaagtaatacatgctgaa

SEQ ID NO: 2320 - RNA, 21 nt, synthetic construct
  misc_feature 1..21: note = Description of Artificial Sequence: Synthetic oligonucleotide
  source 1..21: mol_type = other RNA
  modified_base 1: mod_base = OTHER; note = 2'-O-methyluridine-3'-phosphorothioate
  modified_base 2: mod_base = OTHER; note = 2'-O-methylcytidine-3'- phosphorothioate
  modified_base 3: mod_base = OTHER; note = 2'-O-methyladenosine-3'-phosphate
  modified_base 4: mod_base = OTHER; note = 2'-O-methylguanosine-3'-phosphate
  modified_base 5: mod_base = OTHER; note = 2'-O-methylcytidine-3'-phosphate
  modified_base 6: mod_base = OTHER; note = 2'-O-methyladenosine-3'-phosphate
  modified_base 7: mod_base = OTHER; note = 2'-fluorouridine-3'-phosphate
  modified_base 8: mod_base = OTHER; note = 2'-O-methylguanosine-3'-phosphate
  modified_base 9: mod_base = OTHER; note = 2'-fluorouridine-3'-phosphate
  modified_base 10: mod_base = OTHER; note = 2'-fluoroadenosine-3'-phosphate
  modified_base 11: mod_base = OTHER; note = 2'-fluorouridine-3'-phosphate
  modified_base 12: mod_base = OTHER; note = 2'-O-methyluridine-3'-phosphate
  modified_base 13: mod_base = OTHER; note = 2'-O-methyladenosine-3'-phosphate
  modified_base 14: mod_base = OTHER; note = 2'-O-methylcytidine-3'-phosphate
  modified_base 15: mod_base = OTHER; note = 2'-O-methyluridine-3'-phosphate
  modified_base 16: mod_base = OTHER; note = 2'-O-methyluridine-3'-phosphate
  modified_base 17: mod_base = OTHER; note = 2'-O-methylguanosine-3'-phosphate
  modified_base 18: mod_base = OTHER; note = 2'-O-methyladenosine-3'-phosphate
  modified_base 19: mod_base = OTHER; note = 2'-O-methylcytidine-3'-phosphate
  modified_base 20: mod_base = OTHER; note = 2'-O-methyladenosine-3'-phosphate
  modified_base 21: mod_base = OTHER; note = 2'-O-methyladenosine-3'-phosphate attached to N-[tris(N-acetylgalactosamine-alkyl)-amidodecanoyl)]-4-hydr oxyprolinol Hyp-(N-acetylgalactosamine-alkyl)3
tcagcatgtattacttgacaa

SEQ ID NO: 2321 - RNA, 23 nt, synthetic construct
  misc_feature 1..23: note = Description of Artificial Sequence: Synthetic oligonucleotide
  source 1..23: mol_type = other RNA
  modified_base 1: mod_base = OTHER; note = 2'-O-methyluridine-3'-phosphorothioate
  modified_base 2: mod_base = OTHER; note = 2'-fluorouridine -3'-phosphorothioate
  modified_base 3: mod_base = OTHER; note = 2'-O-methylguanosine-3'-phosphate
  modified_base 4: mod_base = OTHER; note = 2'-O-methyluridine-3'-phosphate
  modified_base 5: mod_base = OTHER; note = 2'-O-methylcytidine-3'-phosphate
  modified_base 6: mod_base = OTHER; note = 2'-fluoroadenosine-3'-phosphate
  modified_base 7: mod_base = OTHER; note = 2'-O-methyladenosine-3'-phosphate
  modified_base 8: mod_base = OTHER; note = 2'-fluoroguanosine-3'-phosphate
  modified_base 9: mod_base = OTHER; note = 2'-fluorouridine-3'-phosphate
  modified_base 10: mod_base = OTHER; note = 2'-O-methyladenosine-3'-phosphate
  modified_base 11: mod_base = OTHER; note = 2'-O-methyladenosine-3'-phosphate
  modified_base 12: mod_base = OTHER; note = 2'-O-methyluridine-3'-phosphate
  modified_base 13: mod_base = OTHER; note = 2'-O-methyladenosine-3'-phosphate
  modified_base 14: mod_base = OTHER; note = 2'-fluorocytidine-3'-phosphate
  modified_base 15: mod_base = OTHER; note = 2'-O-methyladenosine-3'-phosphate
  modified_base 16: mod_base = OTHER; note = 2'-fluorouridine-3'-phosphate
  modified_base 17: mod_base = OTHER; note = 2'-O-methylguanosine-3'-phosphate
  modified_base 18: mod_base = OTHER; note = 2'-O-methylcytidine-3'-phosphate
  modified_base 19: mod_base = OTHER; note = 2'-O-methyluridine-3'-phosphate
  modified_base 20: mod_base = OTHER; note = 2'-O-methylguanosine-3'-phosphate
  modified_base 21: mod_base = OTHER; note = 2'-O-methyladenosine-3'- phosphorothioate
  modified_base 22: mod_base = OTHER; note = 2'-O-methyladenosine-3'- phosphorothioate
  modified_base 23: mod_base = OTHER; note = 2'-O-methyladenosine-3'-phosphate
ttgtcaagtaatacatgctgaaa

SEQ ID NO: 2322 - RNA, 21 nt, synthetic construct
  misc_feature 1..21: note = Description of Artificial Sequence: Synthetic oligonucleotide
  source 1..21: mol_type = other RNA
  modified_base 1: mod_base = OTHER; note = 2'-O-methylcytidine-3'- phosphorothioate
  modified_base 2: mod_base = OTHER; note = 2'-O-methyluridine-3'-phosphorothioate
  modified_base 3: mod_base = OTHER; note = 2'-O-methylguanosine-3'-phosphate
  modified_base 4: mod_base = OTHER; note = 2'-O-methylcytidine-3'-phosphate
  modified_base 5: mod_base = OTHER; note = 2'-O-methyladenosine-3'-phosphate
  modified_base 6: mod_base = OTHER; note = 2'-O-methyladenosine-3'-phosphate
  modified_base 7: mod_base = OTHER; note = 2'-fluorocytidine-3'-phosphate
  modified_base 8: mod_base = OTHER; note = 2'-O-methyluridine-3'-phosphate
  modified_base 9: mod_base = OTHER; note = 2'-fluoroguanosine-3'-phosphate
  modified_base 10: mod_base = OTHER; note = 2'-fluorouridine-3'-phosphate
  modified_base 11: mod_base = OTHER; note = 2'-fluoroadenosine-3'-phosphate
  modified_base 12: mod_base = OTHER; note = 2'-O-methyluridine-3'-phosphate
  modified_base 13: mod_base = OTHER; note = 2'-O-methyladenosine-3'-phosphate
  modified_base 14: mod_base = OTHER; note = 2'-O-methyluridine-3'-phosphate
  modified_base 15: mod_base = OTHER; note = 2'-O-methylcytidine-3'-phosphate
  modified_base 16: mod_base = OTHER; note = 2'-O-methyluridine-3'-phosphate
  modified_base 17: mod_base = OTHER; note = 2'-O-methyladenosine-3'-phosphate
  modified_base 18: mod_base = OTHER; note = 2'-O-methylcytidine-3'-phosphate
  modified_base 19: mod_base = OTHER; note = 2'-O-methyladenosine-3'-phosphate
  modified_base 20: mod_base = OTHER; note = 2'-O-methyladenosine-3'-phosphate
  modified_base 21: mod_base = OTHER; note = 2'-O-methylguanosine-3'-phosphate attached to N-[tris(N-acetylgalactosamine-alkyl)-amidodecanoyl)]-4-hydr oxyprolinol Hyp-(N-acetylgalactosamine-alkyl)3
ctgcaactgtatatctacaag

SEQ ID NO: 2323 - RNA, 23 nt, synthetic construct
  misc_feature 1..23: note = Description of Artificial Sequence: Synthetic oligonucleotide
  source 1..23: mol_type = other RNA
  modified_base 1: mod_base = OTHER; note = 2'-O-methylcytidine-3'- phosphorothioate
  modified_base 2: mod_base = OTHER; note = 2'-fluorouridine -3'-phosphorothioate
  modified_base 3: mod_base = OTHER; note = 2'-O-methyluridine-3'-phosphate
  modified_base 4: mod_base = OTHER; note = 2'-O-methylguanosine-3'-phosphate
  modified_base 5: mod_base = OTHER; note = 2'-O-methyluridine-3'-phosphate
  modified_base 6: mod_base = OTHER; note = 2'-fluoroadenosine-3'-phosphate
  modified_base 7: mod_base = OTHER; note = 2'-O-methylguanosine-3'-phosphate
  modified_base 8: mod_base = OTHER; note = 2'-fluoroadenosine-3'-phosphate
  modified_base 9: mod_base = OTHER; note = 2'-fluorouridine-3'-phosphate
  modified_base 10: mod_base = OTHER; note = 2'-O-methyladenosine-3'-phosphate
  modified_base 11: mod_base = OTHER; note = 2'-O-methyluridine-3'-phosphate
  modified_base 12: mod_base = OTHER; note = 2'-O-methyladenosine-3'-phosphate
  modified_base 13: mod_base = OTHER; note = 2'-O-methylcytidine-3'-phosphate
  modified_base 14: mod_base = OTHER; note = 2'-fluoroadenosine-3'-phosphate
  modified_base 15: mod_base = OTHER; note = 2'-O-methylguanosine-3'-phosphate
  modified_base 16: mod_base = OTHER; note = 2'-fluorouridine-3'-phosphate
  modified_base 17: mod_base = OTHER; note = 2'-O-methyluridine-3'-phosphate
  modified_base 18: mod_base = OTHER; note = 2'-O-methylguanosine-3'-phosphate
  modified_base 19: mod_base = OTHER; note = 2'-O-methylcytidine-3'-phosphate
  modified_base 20: mod_base = OTHER; note = 2'-O-methyladenosine-3'-phosphate
  modified_base 21: mod_base = OTHER; note = 2'-O-methylguanosine-3'- phosphorothioate
  modified_base 22: mod_base = OTHER; note = 2'-O-methylcytidine-3'- phosphorothioate
  modified_base 23: mod_base = OTHER; note = 2'-O-methylcytidine-3'-phosphate
cttgtagatatacagttgcagcc

SEQ ID NO: 2324 - RNA, 21 nt, synthetic construct
  misc_feature 1..21: note = Description of Artificial Sequence: Synthetic oligonucleotide
  source 1..21: mol_type = other RNA
  modified_base 1: mod_base = OTHER; note = 2'-O-methyluridine-3'-phosphorothioate
  modified_base 2: mod_base = OTHER; note = 2'-O-methylguanosine-3'- phosphorothioate
  modified_base 3: mod_base = OTHER; note = 2'-O-methylcytidine-3'-phosphate
  modified_base 4: mod_base = OTHER; note = 2'-O-methyladenosine-3'-phosphate
  modified_base 5: mod_base = OTHER; note = 2'-O-methyladenosine-3'-phosphate
  modified_base 6: mod_base = OTHER; note = 2'-O-methylcytidine-3'-phosphate
  modified_base 7: mod_base = OTHER; note = 2'-fluorouridine-3'-phosphate
  modified_base 8: mod_base = OTHER; note = 2'-O-methylguanosine-3'-phosphate
  modified_base 9: mod_base = OTHER; note = 2'-fluorouridine-3'-phosphate
  modified_base 10: mod_base = OTHER; note = 2'-fluoroadenosine-3'-phosphate
  modified_base 11: mod_base = OTHER; note = 2'-fluorouridine-3'-phosphate
  modified_base 12: mod_base = OTHER; note = 2'-O-methyladenosine-3'-phosphate
  modified_base 13: mod_base = OTHER; note = 2'-O-methyluridine-3'-phosphate
  modified_base 14: mod_base = OTHER; note = 2'-O-methylcytidine-3'-phosphate
  modified_base 15: mod_base = OTHER; note = 2'-O-methyluridine-3'-phosphate
  modified_base 16: mod_base = OTHER; note = 2'-O-methyladenosine-3'-phosphate
  modified_base 17: mod_base = OTHER; note = 2'-O-methylcytidine-3'-phosphate
  modified_base 18: mod_base = OTHER; note = 2'-O-methyladenosine-3'-phosphate
  modified_base 19: mod_base = OTHER; note = 2'-O-methyladenosine-3'-phosphate
  modified_base 20: mod_base = OTHER; note = 2'-O-methylguanosine-3'-phosphate
  modified_base 21: mod_base = OTHER; note = 2'-O-methylguanosine-3'-phosphate attached to N-[tris(N-acetylgalactosamine-alkyl)-amidodecanoyl)]-4-hydr oxyprolinol Hyp-(N-acetylgalactosamine-alkyl)3
tgcaactgtatatctacaagg

SEQ ID NO: 2325 - RNA, 23 nt, synthetic construct
  misc_feature 1..23: note = Description of Artificial Sequence: Synthetic oligonucleotide
  source 1..23: mol_type = other RNA
  modified_base 1: mod_base = OTHER; note = 2'-O-methylcytidine-3'- phosphorothioate
  modified_base 2: mod_base = OTHER; note = 2'-fluorocytidine-3'-phosphorothioate
  modified_base 3: mod_base = OTHER; note = 2'-O-methyluridine-3'-phosphate
  modified_base 4: mod_base = OTHER; note = 2'-O-methyluridine-3'-phosphate
  modified_base 5: mod_base = OTHER; note = 2'-O-methylguanosine-3'-phosphate
  modified_base 6: mod_base = OTHER; note = 2'-fluorouridine-3'-phosphate
  modified_base 7: mod_base = OTHER; note = 2'-O-methyladenosine-3'-phosphate
  modified_base 8: mod_base = OTHER; note = 2'-fluoroguanosine-3'-phosphate
  modified_base 9: mod_base = OTHER; note = 2'-fluoroadenosine-3'-phosphate
  modified_base 10: mod_base = OTHER; note = 2'-O-methyluridine-3'-phosphate
  modified_base 11: mod_base = OTHER; note = 2'-O-methyladenosine-3'-phosphate
  modified_base 12: mod_base = OTHER; note = 2'-O-methyluridine-3'-phosphate
  modified_base 13: mod_base = OTHER; note = 2'-O-methyladenosine-3'-phosphate
  modified_base 14: mod_base = OTHER; note = 2'-fluorocytidine-3'-phosphate
  modified_base 15: mod_base = OTHER; note = 2'-O-methyladenosine-3'-phosphate
  modified_base 16: mod_base = OTHER; note = 2'-fluoroguanosine-3'-phosphate
  modified_base 17: mod_base = OTHER; note = 2'-O-methyluridine-3'-phosphate
  modified_base 18: mod_base = OTHER; note = 2'-O-methyluridine-3'-phosphate
  modified_base 19: mod_base = OTHER; note = 2'-O-methylguanosine-3'-phosphate
  modified_base 20: mod_base = OTHER; note = 2'-O-methylcytidine-3'-phosphate
  modified_base 21: mod_base = OTHER; note = 2'-O-methyladenosine-3'- phosphorothioate
  modified_base 22: mod_base = OTHER; note = 2'-O-methylguanosine-3'- phosphorothioate
  modified_base 23: mod_base = OTHER; note = 2'-O-methylcytidine-3'-phosphate
ccttgtagatatacagttgcagc

SEQ ID NO: 2326 - RNA, 21 nt, synthetic construct
  misc_feature 1..21: note = Description of Artificial Sequence: Synthetic oligonucleotide
  source 1..21: mol_type = other RNA
  modified_base 1: mod_base = OTHER; note = 2'-O-methyluridine-3'-phosphorothioate
  modified_base 2: mod_base = OTHER; note = 2'-O-methyluridine-3'-phosphorothioate
  modified_base 3: mod_base = OTHER; note = 2'-O-methylguanosine-3'-phosphate
  modified_base 4: mod_base = OTHER; note = 2'-O-methylguanosine-3'-phosphate
  modified_base 5: mod_base = OTHER; note = 2'-O-methylcytidine-3'-phosphate
  modified_base 6: mod_base = OTHER; note = 2'-O-methyluridine-3'-phosphate
  modified_base 7: mod_base = OTHER; note = 2'-fluoroguanosine-3'-phosphate
  modified_base 8: mod_base = OTHER; note = 2'-O-methylcytidine-3'-phosphate
  modified_base 9: mod_base = OTHER; note = 2'-fluoroadenosine-3'-phosphate
  modified_base 10: mod_base = OTHER; note = 2'-fluoroadenosine-3'-phosphate
  modified_base 11: mod_base = OTHER; note = 2'-fluorocytidine-3'-phosphate
  modified_base 12: mod_base = OTHER; note = 2'-O-methyluridine-3'-phosphate
  modified_base 13: mod_base = OTHER; note = 2'-O-methylguanosine-3'-phosphate
  modified_base 14: mod_base = OTHER; note = 2'-O-methyluridine-3'-phosphate
  modified_base 15: mod_base = OTHER; note = 2'-O-methyladenosine-3'-phosphate
  modified_base 16: mod_base = OTHER; note = 2'-O-methyluridine-3'-phosphate
  modified_base 17: mod_base = OTHER; note = 2'-O-methyladenosine-3'-phosphate
  modified_base 18: mod_base = OTHER; note = 2'-O-methyluridine-3'-phosphate
  modified_base 19: mod_base = OTHER; note = 2'-O-methylcytidine-3'-phosphate
  modified_base 20: mod_base = OTHER; note = 2'-O-methyluridine-3'-phosphate
  modified_base 21: mod_base = OTHER; note = 2'-O-methyladenosine-3'-phosphate attached to N-[tris(N-acetylgalactosamine-alkyl)-amidodecanoyl)]-4-hydr oxyprolinol Hyp-(N-acetylgalactosamine-alkyl)3
ttggctgcaactgtatatcta

SEQ ID NO: 2327 - RNA, 23 nt, synthetic construct
  misc_feature 1..23: note = Description of Artificial Sequence: Synthetic oligonucleotide
  source 1..23: mol_type = other RNA
  modified_base 1: mod_base = OTHER; note = 2'-O-methyluridine-3'-phosphorothioate
  modified_base 2: mod_base = OTHER; note = 2'-fluoroadenosine-3'-phosphorothioate
  modified_base 3: mod_base = OTHER; note = 2'-O-methylguanosine-3'-phosphate
  modified_base 4: mod_base = OTHER; note = 2'-O-methyladenosine-3'-phosphate
  modified_base 5: mod_base = OTHER; note = 2'-O-methyluridine-3'-phosphate
  modified_base 6: mod_base = OTHER; note = 2'-fluoroadenosine-3'-phosphate
  modified_base 7: mod_base = OTHER; note = 2'-O-methyluridine-3'-phosphate
  modified_base 8: mod_base = OTHER; note = 2'-fluoroadenosine-3'-phosphate
  modified_base 9: mod_base = OTHER; note = 2'-fluorocytidine-3'-phosphate
  modified_base 10: mod_base = OTHER; note = 2'-O-methyladenosine-3'-phosphate
  modified_base 11: mod_base = OTHER; note = 2'-O-methylguanosine-3'-phosphate
  modified_base 12: mod_base = OTHER; note = 2'-O-methyluridine-3'-phosphate
  modified_base 13: mod_base = OTHER; note = 2'-O-methyluridine-3'-phosphate
  modified_base 14: mod_base = OTHER; note = 2'-fluoroguanosine-3'-phosphate
  modified_base 15: mod_base = OTHER; note = 2'-O-methylcytidine-3'-phosphate
  modified_base 16: mod_base = OTHER; note = 2'-fluoroadenosine-3'-phosphate
  modified_base 17: mod_base = OTHER; note = 2'-O-methylguanosine-3'-phosphate
  modified_base 18: mod_base = OTHER; note = 2'-O-methylcytidine-3'-phosphate
  modified_base 19: mod_base = OTHER; note = 2'-O-methylcytidine-3'-phosphate
  modified_base 20: mod_base = OTHER; note = 2'-O-methyladenosine-3'-phosphate
  modified_base 21: mod_base = OTHER; note = 2'-O-methyladenosine-3'- phosphorothioate
  modified_base 22: mod_base = OTHER; note = 2'-O-methylcytidine-3'- phosphorothioate
  modified_base 23: mod_base = OTHER; note = 2'-O-methylguanosine-3'-phosphate
tagatatacagttgcagccaacg

SEQ ID NO: 2328 - RNA, 21 nt, synthetic construct
  misc_feature 1..21: note = Description of Artificial Sequence: Synthetic oligonucleotide
  source 1..21: mol_type = other RNA
  modified_base 1: mod_base = OTHER; note = 2'-O-methylguanosine-3'- phosphorothioate
  modified_base 2: mod_base = OTHER; note = 2'-O-methyluridine-3'-phosphorothioate
  modified_base 3: mod_base = OTHER; note = 2'-O-methyluridine-3'-phosphate
  modified_base 4: mod_base = OTHER; note = 2'-O-methylguanosine-3'-phosphate
  modified_base 5: mod_base = OTHER; note = 2'-O-methylguanosine-3'-phosphate
  modified_base 6: mod_base = OTHER; note = 2'-O-methylcytidine-3'-phosphate
  modified_base 7: mod_base = OTHER; note = 2'-fluorouridine-3'-phosphate
  modified_base 8: mod_base = OTHER; note = 2'-O-methylguanosine-3'-phosphate
  modified_base 9: mod_base = OTHER; note = 2'-fluorocytidine-3'-phosphate
  modified_base 10: mod_base = OTHER; note = 2'-fluoroadenosine-3'-phosphate
  modified_base 11: mod_base = OTHER; note = 2'-fluoroadenosine-3'-phosphate
  modified_base 12: mod_base = OTHER; note = 2'-O-methylcytidine-3'-phosphate
  modified_base 13: mod_base = OTHER; note = 2'-O-methyluridine-3'-phosphate
  modified_base 14: mod_base = OTHER; note = 2'-O-methylguanosine-3'-phosphate
  modified_base 15: mod_base = OTHER; note = 2'-O-methyluridine-3'-phosphate
  modified_base 16: mod_base = OTHER; note = 2'-O-methyladenosine-3'-phosphate
  modified_base 17: mod_base = OTHER; note = 2'-O-methyluridine-3'-phosphate
  modified_base 18: mod_base = OTHER; note = 2'-O-methyladenosine-3'-phosphate
  modified_base 19: mod_base = OTHER; note = 2'-O-methyluridine-3'-phosphate
  modified_base 20: mod_base = OTHER; note = 2'-O-methylcytidine-3'-phosphate
  modified_base 21: mod_base = OTHER; note = 2'-O-methyluridine-3'-phosphate attached to N-[tris(N-acetylgalactosamine-alkyl)-amidodecanoyl)]-4-hydr oxyprolinol Hyp-(N-acetylgalactosamine-alkyl)3
gttggctgcaactgtatatct

SEQ ID NO: 2329 - RNA, 23 nt, synthetic construct
  misc_feature 1..23: note = Description of Artificial Sequence: Synthetic oligonucleotide
  source 1..23: mol_type = other RNA
  modified_base 1: mod_base = OTHER; note = 2'-O-methyladenosine-3'- phosphorothioate
  modified_base 2: mod_base = OTHER; note = 2'-fluoroguanosine-3'-phosphorothioate
  modified_base 3: mod_base = OTHER; note = 2'-O-methyladenosine-3'-phosphate
  modified_base 4: mod_base = OTHER; note = 2'-O-methyluridine-3'-phosphate
  modified_base 5: mod_base = OTHER; note = 2'-O-methyladenosine-3'-phosphate
  modified_base 6: mod_base = OTHER; note = 2'-fluorouridine-3'-phosphate
  modified_base 7: mod_base = OTHER; note = 2'-O-methyladenosine-3'-phosphate
  modified_base 8: mod_base = OTHER; note = 2'-fluorocytidine-3'-phosphate
  modified_base 9: mod_base = OTHER; note = 2'-fluoroadenosine-3'-phosphate
  modified_base 10: mod_base = OTHER; note = 2'-O-methylguanosine-3'-phosphate
  modified_base 11: mod_base = OTHER; note = 2'-O-methyluridine-3'-phosphate
  modified_base 12: mod_base = OTHER; note = 2'-O-methyluridine-3'-phosphate
  modified_base 13: mod_base = OTHER; note = 2'-O-methylguanosine-3'-phosphate
  modified_base 14: mod_base = OTHER; note = 2'-fluorocytidine-3'-phosphate
  modified_base 15: mod_base = OTHER; note = 2'-O-methyladenosine-3'-phosphate
  modified_base 16: mod_base = OTHER; note = 2'-fluoroguanosine-3'-phosphate
  modified_base 17: mod_base = OTHER; note = 2'-O-methylcytidine-3'-phosphate
  modified_base 18: mod_base = OTHER; note = 2'-O-methylcytidine-3'-phosphate
  modified_base 19: mod_base = OTHER; note = 2'-O-methyladenosine-3'-phosphate
  modified_base 20: mod_base = OTHER; note = 2'-O-methyladenosine-3'-phosphate
  modified_base 21: mod_base = OTHER; note = 2'-O-methylcytidine-3'- phosphorothioate
  modified_base 22: mod_base = OTHER; note = 2'-O-methylguanosine-3'- phosphorothioate
  modified_base 23: mod_base = OTHER; note = 2'-O-methyladenosine-3'-phosphate
agatatacagttgcagccaacga

SEQ ID NO: 2330 - RNA, 21 nt, synthetic construct
  misc_feature 1..21: note = Description of Artificial Sequence: Synthetic oligonucleotide
  source 1..21: mol_type = other RNA
  modified_base 1: mod_base = OTHER; note = 2'-O-methylcytidine-3'- phosphorothioate
  modified_base 2: mod_base = OTHER; note = 2'-O-methyladenosine-3'- phosphorothioate
  modified_base 3: mod_base = OTHER; note = 2'-O-methyladenosine-3'-phosphate
  modified_base 4: mod_base = OTHER; note = 2'-O-methyladenosine-3'-phosphate
  modified_base 5: mod_base = OTHER; note = 2'-O-methyluridine-3'-phosphate
  modified_base 6: mod_base = OTHER; note = 2'-O-methylguanosine-3'-phosphate
  modified_base 7: mod_base = OTHER; note = 2'-fluoroadenosine-3'-phosphate
  modified_base 8: mod_base = OTHER; note = 2'-O-methyluridine-3'-phosphate
  modified_base 9: mod_base = OTHER; note = 2'-fluoroguanosine-3'-phosphate
  modified_base 10: mod_base = OTHER; note = 2'-fluoroadenosine-3'-phosphate
  modified_base 11: mod_base = OTHER; note = 2'-fluoroadenosine-3'-phosphate
  modified_base 12: mod_base = OTHER; note = 2'-O-methylguanosine-3'-phosphate
  modified_base 13: mod_base = OTHER; note = 2'-O-methyladenosine-3'-phosphate
  modified_base 14: mod_base = OTHER; note = 2'-O-methyladenosine-3'-phosphate
  modified_base 15: mod_base = OTHER; note = 2'-O-methyladenosine-3'-phosphate
  modified_base 16: mod_base = OTHER; note = 2'-O-methylcytidine-3'-phosphate
  modified_base 17: mod_base = OTHER; note = 2'-O-methyluridine-3'-phosphate
  modified_base 18: mod_base = OTHER; note = 2'-O-methyluridine-3'-phosphate
  modified_base 19: mod_base = OTHER; note = 2'-O-methyluridine-3'-phosphate
  modified_base 20: mod_base = OTHER; note = 2'-O-methylguanosine-3'-phosphate
  modified_base 21: mod_base = OTHER; note = 2'-O-methylguanosine-3'-phosphate attached to N-[tris(N-acetylgalactosamine-alkyl)-amidodecanoyl)]-4-hydr oxyprolinol Hyp-(N-acetylgalactosamine-alkyl)3
caaatgatgaagaaactttgg

SEQ ID NO: 2331 - RNA, 23 nt, synthetic construct
  misc_feature 1..23: note = Description of Artificial Sequence: Synthetic oligonucleotide
  source 1..23: mol_type = other RNA
  modified_base 1: mod_base = OTHER; note = 2'-O-methylcytidine-3'- phosphorothioate
  modified_base 2: mod_base = OTHER; note = 2'-fluorocytidine-3'-phosphorothioate
  modified_base 3: mod_base = OTHER; note = 2'-O-methyladenosine-3'-phosphate
  modified_base 4: mod_base = OTHER; note = 2'-O-methyladenosine-3'-phosphate
  modified_base 5: mod_base = OTHER; note = 2'-O-methyladenosine-3'-phosphate
  modified_base 6: mod_base = OTHER; note = 2'-fluoroguanosine-3'-phosphate
  modified_base 7: mod_base = OTHER; note = 2'-O-methyluridine-3'-phosphate
  modified_base 8: mod_base = OTHER; note = 2'-fluorouridine-3'-phosphate
  modified_base 9: mod_base = OTHER; note = 2'-fluorouridine-3'-phosphate
  modified_base 10: mod_base = OTHER; note = 2'-O-methylcytidine-3'-phosphate
  modified_base 11: mod_base = OTHER; note = 2'-O-methyluridine-3'-phosphate
  modified_base 12: mod_base = OTHER; note = 2'-O-methyluridine-3'-phosphate
  modified_base 13: mod_base = OTHER; note = 2'-O-methylcytidine-3'-phosphate
  modified_base 14: mod_base = OTHER; note = 2'-fluoroadenosine-3'-phosphate
  modified_base 15: mod_base = OTHER; note = 2'-O-methyluridine-3'-phosphate
  modified_base 16: mod_base = OTHER; note = 2'-fluorocytidine-3'-phosphate
  modified_base 17: mod_base = OTHER; note = 2'-O-methyladenosine-3'-phosphate
  modified_base 18: mod_base = OTHER; note = 2'-O-methyluridine-3'-phosphate
  modified_base 19: mod_base = OTHER; note = 2'-O-methyluridine-3'-phosphate
  modified_base 20: mod_base = OTHER; note = 2'-O-methyluridine-3'-phosphate
  modified_base 21: mod_base = OTHER; note = 2'-O-methylguanosine-3'- phosphorothioate
  modified_base 22: mod_base = OTHER; note = 2'-O-methylcytidine-3'- phosphorothioate
  modified_base 23: mod_base = OTHER; note = 2'-O-methylcytidine-3'-phosphate
ccaaagtttcttcatcatttgcc

SEQ ID NO: 2332 - RNA, 21 nt, synthetic construct
  misc_feature 1..21: note = Description of Artificial Sequence: Synthetic oligonucleotide
  source 1..21: mol_type = other RNA
  modified_base 1: mod_base = OTHER; note = 2'-O-methyladenosine-3'- phosphorothioate
  modified_base 2: mod_base = OTHER; note = 2'-O-methyladenosine-3'- phosphorothioate
  modified_base 3: mod_base = OTHER; note = 2'-O-methyladenosine-3'-phosphate
  modified_base 4: mod_base = OTHER; note = 2'-O-methyluridine-3'-phosphate
  modified_base 5: mod_base = OTHER; note = 2'-O-methylguanosine-3'-phosphate
  modified_base 6: mod_base = OTHER; note = 2'-O-methyladenosine-3'-phosphate
  modified_base 7: mod_base = OTHER; note = 2'-fluorouridine-3'-phosphate
  modified_base 8: mod_base = OTHER; note = 2'-O-methylguanosine-3'-phosphate
  modified_base 9: mod_base = OTHER; note = 2'-fluoroadenosine-3'-phosphate
  modified_base 10: mod_base = OTHER; note = 2'-fluoroadenosine-3'-phosphate
  modified_base 11: mod_base = OTHER; note = 2'-fluoroguanosine-3'-phosphate
  modified_base 12: mod_base = OTHER; note = 2'-O-methyladenosine-3'-phosphate
  modified_base 13: mod_base = OTHER; note = 2'-O-methyladenosine-3'-phosphate
  modified_base 14: mod_base = OTHER; note = 2'-O-methyladenosine-3'-phosphate
  modified_base 15: mod_base = OTHER; note = 2'-O-methylcytidine-3'-phosphate
  modified_base 16: mod_base = OTHER; note = 2'-O-methyluridine-3'-phosphate
  modified_base 17: mod_base = OTHER; note = 2'-O-methyluridine-3'-phosphate
  modified_base 18: mod_base = OTHER; note = 2'-O-methyluridine-3'-phosphate
  modified_base 19: mod_base = OTHER; note = 2'-O-methylguanosine-3'-phosphate
  modified_base 20: mod_base = OTHER; note = 2'-O-methylguanosine-3'-phosphate
  modified_base 21: mod_base = OTHER; note = 2'-O-methylcytidine-3'-phosphate attached to N-[tris(N-acetylgalactosamine-alkyl)-amidodecanoyl)]-4-hydr oxyprolinol Hyp-(N-acetylgalactosamine-alkyl)3
aaatgatgaagaaactttggc

SEQ ID NO: 2333 - RNA, 23 nt, synthetic construct
  misc_feature 1..23: note = Description of Artificial Sequence: Synthetic oligonucleotide
  source 1..23: mol_type = other RNA
  modified_base 1: mod_base = OTHER; note = 2'-O-methylguanosine-3'- phosphorothioate
  modified_base 2: mod_base = OTHER; note = 2'-fluorocytidine-3'-phosphorothioate
  modified_base 3: mod_base = OTHER; note = 2'-O-methylcytidine-3'-phosphate
  modified_base 4: mod_base = OTHER; note = 2'-O-methyladenosine-3'-phosphate
  modified_base 5: mod_base = OTHER; note = 2'-O-methyladenosine-3'-phosphate
  modified_base 6: mod_base = OTHER; note = 2'-fluoroadenosine-3'-phosphate
  modified_base 7: mod_base = OTHER; note = 2'-O-methylguanosine-3'-phosphate
  modified_base 8: mod_base = OTHER; note = 2'-fluorouridine-3'-phosphate
  modified_base 9: mod_base = OTHER; note = 2'-fluorouridine-3'-phosphate
  modified_base 10: mod_base = OTHER; note = 2'-O-methyluridine-3'-phosphate
  modified_base 11: mod_base = OTHER; note = 2'-O-methylcytidine-3'-phosphate
  modified_base 12: mod_base = OTHER; note = 2'-O-methyluridine-3'-phosphate
  modified_base 13: mod_base = OTHER; note = 2'-O-methyluridine-3'-phosphate
  modified_base 14: mod_base = OTHER; note = 2'-fluorocytidine-3'-phosphate
  modified_base 15: mod_base = OTHER; note = 2'-O-methyladenosine-3'-phosphate
  modified_base 16: mod_base = OTHER; note = 2'-fluorouridine-3'-phosphate
  modified_base 17: mod_base = OTHER; note = 2'-O-methylcytidine-3'-phosphate
  modified_base 18: mod_base = OTHER; note = 2'-O-methyladenosine-3'-phosphate
  modified_base 19: mod_base = OTHER; note = 2'-O-methyluridine-3'-phosphate
  modified_base 20: mod_base = OTHER; note = 2'-O-methyluridine-3'-phosphate
  modified_base 21: mod_base = OTHER; note = 2'-O-methyluridine-3'-phosphorothioate
  modified_base 22: mod_base = OTHER; note = 2'-O-methylguanosine-3'- phosphorothioate
  modified_base 23: mod_base = OTHER; note = 2'-O-methylcytidine-3'-phosphate
gccaaagtttcttcatcatttgc

SEQ ID NO: 2334 - RNA, 21 nt, synthetic construct
  misc_feature 1..21: note = Description of Artificial Sequence: Synthetic oligonucleotide
  source 1..21: mol_type = other RNA
  modified_base 1: mod_base = OTHER; note = 2'-O-methylguanosine-3'- phosphorothioate
  modified_base 2: mod_base = OTHER; note = 2'-O-methylguanosine-3'- phosphorothioate
  modified_base 3: mod_base = OTHER; note = 2'-O-methylguanosine-3'-phosphate
  modified_base 4: mod_base = OTHER; note = 2'-O-methylguanosine-3'-phosphate
  modified_base 5: mod_base = OTHER; note = 2'-O-methylcytidine-3'-phosphate
  modified_base 6: mod_base = OTHER; note = 2'-O-methyladenosine-3'-phosphate
  modified_base 7: mod_base = OTHER; note = 2'-fluoroadenosine-3'-phosphate
  modified_base 8: mod_base = OTHER; note = 2'-O-methyladenosine-3'-phosphate
  modified_base 9: mod_base = OTHER; note = 2'-fluorouridine-3'-phosphate
  modified_base 10: mod_base = OTHER; note = 2'-fluoroguanosine-3'-phosphate
  modified_base 11: mod_base = OTHER; note = 2'-fluoroadenosine-3'-phosphate
  modified_base 12: mod_base = OTHER; note = 2'-O-methyluridine-3'-phosphate
  modified_base 13: mod_base = OTHER; note = 2'-O-methylguanosine-3'-phosphate
  modified_base 14: mod_base = OTHER; note = 2'-O-methyladenosine-3'-phosphate
  modified_base 15: mod_base = OTHER; note = 2'-O-methyladenosine-3'-phosphate
  modified_base 16: mod_base = OTHER; note = 2'-O-methylguanosine-3'-phosphate
  modified_base 17: mod_base = OTHER; note = 2'-O-methyladenosine-3'-phosphate
  modified_base 18: mod_base = OTHER; note = 2'-O-methyladenosine-3'-phosphate
  modified_base 19: mod_base = OTHER; note = 2'-O-methyladenosine-3'-phosphate
  modified_base 20: mod_base = OTHER; note = 2'-O-methylcytidine-3'-phosphate
  modified_base 21: mod_base = OTHER; note = 2'-O-methyluridine-3'-phosphate attached to N-[tris(N-acetylgalactosamine-alkyl)-amidodecanoyl)]-4-hydr oxyprolinol Hyp-(N-acetylgalactosamine-alkyl)3
ggggcaaatgatgaagaaact

SEQ ID NO: 2335 - RNA, 23 nt, synthetic construct
  misc_feature 1..23: note = Description of Artificial Sequence: Synthetic oligonucleotide
  source 1..23: mol_type = other RNA
  modified_base 1: mod_base = OTHER; note = 2'-O-methyladenosine-3'- phosphorothioate
  modified_base 2: mod_base = OTHER; note = 2'-fluoroguanosine-3'-phosphorothioate
  modified_base 3: mod_base = OTHER; note = 2'-O-methyluridine-3'-phosphate
  modified_base 4: mod_base = OTHER; note = 2'-O-methyluridine-3'-phosphate
  modified_base 5: mod_base = OTHER; note = 2'-O-methyluridine-3'-phosphate
  modified_base 6: mod_base = OTHER; note = 2'-fluorocytidine-3'-phosphate
  modified_base 7: mod_base = OTHER; note = 2'-O-methyluridine-3'-phosphate
  modified_base 8: mod_base = OTHER; note = 2'-fluorouridine-3'-phosphate
  modified_base 9: mod_base = OTHER; note = 2'-fluorocytidine-3'-phosphate
  modified_base 10: mod_base = OTHER; note = 2'-O-methyladenosine-3'-phosphate
  modified_base 11: mod_base = OTHER; note = 2'-O-methyluridine-3'-phosphate
  modified_base 12: mod_base = OTHER; note = 2'-O-methylcytidine-3'-phosphate
  modified_base 13: mod_base = OTHER; note = 2'-O-methyladenosine-3'-phosphate
  modified_base 14: mod_base = OTHER; note = 2'-fluorouridine-3'-phosphate
  modified_base 15: mod_base = OTHER; note = 2'-O-methyluridine-3'-phosphate
  modified_base 16: mod_base = OTHER; note = 2'-fluorouridine-3'-phosphate
  modified_base 17: mod_base = OTHER; note = 2'-O-methylguanosine-3'-phosphate
  modified_base 18: mod_base = OTHER; note = 2'-O-methylcytidine-3'-phosphate
  modified_base 19: mod_base = OTHER; note = 2'-O-methylcytidine-3'-phosphate
  modified_base 20: mod_base = OTHER; note = 2'-O-methylcytidine-3'-phosphate
  modified_base 21: mod_base = OTHER; note = 2'-O-methylcytidine-3'- phosphorothioate
  modified_base 22: mod_base = OTHER; note = 2'-O-methyladenosine-3'- phosphorothioate
  modified_base 23: mod_base = OTHER; note = 2'-O-methylguanosine-3'-phosphate
agtttcttcatcatttgccccag

SEQ ID NO: 2336 - RNA, 21 nt, synthetic construct
  misc_feature 1..21: note = Description of Artificial Sequence: Synthetic oligonucleotide
  source 1..21: mol_type = other RNA
  modified_base 1: mod_base = OTHER; note = 2'-O-methyluridine-3'-phosphorothioate
  modified_base 2: mod_base = OTHER; note = 2'-O-methylguanosine-3'- phosphorothioate
  modified_base 3: mod_base = OTHER; note = 2'-O-methylguanosine-3'-phosphate
  modified_base 4: mod_base = OTHER; note = 2'-O-methylguanosine-3'-phosphate
  modified_base 5: mod_base = OTHER; note = 2'-O-methylguanosine-3'-phosphate
  modified_base 6: mod_base = OTHER; note = 2'-O-methylcytidine-3'-phosphate
  modified_base 7: mod_base = OTHER; note = 2'-fluoroadenosine-3'-phosphate
  modified_base 8: mod_base = OTHER; note = 2'-O-methyladenosine-3'-phosphate
  modified_base 9: mod_base = OTHER; note = 2'-fluoroadenosine-3'-phosphate
  modified_base 10: mod_base = OTHER; note = 2'-fluorouridine-3'-phosphate
  modified_base 11: mod_base = OTHER; note = 2'-fluoroguanosine-3'-phosphate
  modified_base 12: mod_base = OTHER; note = 2'-O-methyladenosine-3'-phosphate
  modified_base 13: mod_base = OTHER; note = 2'-O-methyluridine-3'-phosphate
  modified_base 14: mod_base = OTHER; note = 2'-O-methylguanosine-3'-phosphate
  modified_base 15: mod_base = OTHER; note = 2'-O-methyladenosine-3'-phosphate
  modified_base 16: mod_base = OTHER; note = 2'-O-methyladenosine-3'-phosphate
  modified_base 17: mod_base = OTHER; note = 2'-O-methylguanosine-3'-phosphate
  modified_base 18: mod_base = OTHER; note = 2'-O-methyladenosine-3'-phosphate
  modified_base 19: mod_base = OTHER; note = 2'-O-methyladenosine-3'-phosphate
  modified_base 20: mod_base = OTHER; note = 2'-O-methyladenosine-3'-phosphate
  modified_base 21: mod_base = OTHER; note = 2'-O-methylcytidine-3'-phosphate attached to N-[tris(N-acetylgalactosamine-alkyl)-amidodecanoyl)]-4-hydr oxyprolinol Hyp-(N-acetylgalactosamine-alkyl)3
tggggcaaatgatgaagaaac

SEQ ID NO: 2337 - RNA, 23 nt, synthetic construct
  misc_feature 1..23: note = Description of Artificial Sequence: Synthetic oligonucleotide
  source 1..23: mol_type = other RNA
  modified_base 1: mod_base = OTHER; note = 2'-O-methylguanosine-3'- phosphorothioate
  modified_base 2: mod_base = OTHER; note = 2'-fluorouridine -3'-phosphorothioate
  modified_base 3: mod_base = OTHER; note = 2'-O-methyluridine-3'-phosphate
  modified_base 4: mod_base = OTHER; note = 2'-O-methyluridine-3'-phosphate
  modified_base 5: mod_base = OTHER; note = 2'-O-methylcytidine-3'-phosphate
  modified_base 6: mod_base = OTHER; note = 2'-fluorouridine-3'-phosphate
  modified_base 7: mod_base = OTHER; note = 2'-O-methyluridine-3'-phosphate
  modified_base 8: mod_base = OTHER; note = 2'-fluorocytidine-3'-phosphate
  modified_base 9: mod_base = OTHER; note = 2'-fluoroadenosine-3'-phosphate
  modified_base 10: mod_base = OTHER; note = 2'-O-methyluridine-3'-phosphate
  modified_base 11: mod_base = OTHER; note = 2'-O-methylcytidine-3'-phosphate
  modified_base 12: mod_base = OTHER; note = 2'-O-methyladenosine-3'-phosphate
  modified_base 13: mod_base = OTHER; note = 2'-O-methyluridine-3'-phosphate
  modified_base 14: mod_base = OTHER; note = 2'-fluorouridine-3'-phosphate
  modified_base 15: mod_base = OTHER; note = 2'-O-methyluridine-3'-phosphate
  modified_base 16: mod_base = OTHER; note = 2'-fluoroguanosine-3'-phosphate
  modified_base 17: mod_base = OTHER; note = 2'-O-methylcytidine-3'-phosphate
  modified_base 18: mod_base = OTHER; note = 2'-O-methylcytidine-3'-phosphate
  modified_base 19: mod_base = OTHER; note = 2'-O-methylcytidine-3'-phosphate
  modified_base 20: mod_base = OTHER; note = 2'-O-methylcytidine-3'-phosphate
  modified_base 21: mod_base = OTHER; note = 2'-O-methyladenosine-3'- phosphorothioate
  modified_base 22: mod_base = OTHER; note = 2'-O-methylguanosine-3'- phosphorothioate
  modified_base 23: mod_base = OTHER; note = 2'-O-methyladenosine-3'-phosphate
gtttcttcatcatttgccccaga

SEQ ID NO: 2338 - RNA, 21 nt, synthetic construct
  misc_feature 1..21: note = Description of Artificial Sequence: Synthetic oligonucleotide
  source 1..21: mol_type = other RNA
  modified_base 1: mod_base = OTHER; note = 2'-O-methylcytidine-3'- phosphorothioate
  modified_base 2: mod_base = OTHER; note = 2'-O-methyladenosine-3'- phosphorothioate
  modified_base 3: mod_base = OTHER; note = 2'-O-methyladenosine-3'-phosphate
  modified_base 4: mod_base = OTHER; note = 2'-O-methyladenosine-3'-phosphate
  modified_base 5: mod_base = OTHER; note = 2'-O-methylguanosine-3'-phosphate
  modified_base 6: mod_base = OTHER; note = 2'-O-methylguanosine-3'-phosphate
  modified_base 7: mod_base = OTHER; note = 2'-fluoroguanosine-3'-phosphate
  modified_base 8: mod_base = OTHER; note = 2'-O-methyluridine-3'-phosphate
  modified_base 9: mod_base = OTHER; note = 2'-fluoroguanosine-3'-phosphate
  modified_base 10: mod_base = OTHER; note = 2'-fluorouridine-3'-phosphate
  modified_base 11: mod_base = OTHER; note = 2'-fluorocytidine-3'-phosphate
  modified_base 12: mod_base = OTHER; note = 2'-O-methylguanosine-3'-phosphate
  modified_base 13: mod_base = OTHER; note = 2'-O-methyluridine-3'-phosphate
  modified_base 14: mod_base = OTHER; note = 2'-O-methyluridine-3'-phosphate
  modified_base 15: mod_base = OTHER; note = 2'-O-methylcytidine-3'-phosphate
  modified_base 16: mod_base = OTHER; note = 2'-O-methyluridine-3'-phosphate
  modified_base 17: mod_base = OTHER; note = 2'-O-methyluridine-3'-phosphate
  modified_base 18: mod_base = OTHER; note = 2'-O-methyluridine-3'-phosphate
  modified_base 19: mod_base = OTHER; note = 2'-O-methyluridine-3'-phosphate
  modified_base 20: mod_base = OTHER; note = 2'-O-methylcytidine-3'-phosphate
  modified_base 21: mod_base = OTHER; note = 2'-O-methylcytidine-3'-phosphate attached to N-[tris(N-acetylgalactosamine-alkyl)-amidodecanoyl)]-4-hydr oxyprolinol Hyp-(N-acetylgalactosamine-alkyl)3
caaagggtgtcgttcttttcc

SEQ ID NO: 2339 - RNA, 23 nt, synthetic construct
  misc_feature 1..23: note = Description of Artificial Sequence: Synthetic oligonucleotide
  source 1..23: mol_type = other RNA
  modified_base 1: mod_base = OTHER; note = 2'-O-methylguanosine-3'- phosphorothioate
  modified_base 2: mod_base = OTHER; note = 2'-fluoroguanosine-3'-phosphorothioate
  modified_base 3: mod_base = OTHER; note = 2'-O-methyladenosine-3'-phosphate
  modified_base 4: mod_base = OTHER; note = 2'-O-methyladenosine-3'-phosphate
  modified_base 5: mod_base = OTHER; note = 2'-O-methyladenosine-3'-phosphate
  modified_base 6: mod_base = OTHER; note = 2'-fluoroadenosine-3'-phosphate
  modified_base 7: mod_base = OTHER; note = 2'-O-methylguanosine-3'-phosphate
  modified_base 8: mod_base = OTHER; note = 2'-fluoroadenosine-3'-phosphate
  modified_base 9: mod_base = OTHER; note = 2'-fluoroadenosine-3'-phosphate
  modified_base 10: mod_base = OTHER; note = 2'-O-methylcytidine-3'-phosphate
  modified_base 11: mod_base = OTHER; note = 2'-O-methylguanosine-3'-phosphate
  modified_base 12: mod_base = OTHER; note = 2'-O-methyladenosine-3'-phosphate
  modified_base 13: mod_base = OTHER; note = 2'-O-methylcytidine-3'-phosphate
  modified_base 14: mod_base = OTHER; note = 2'-fluoroadenosine-3'-phosphate
  modified_base 15: mod_base = OTHER; note = 2'-O-methylcytidine-3'-phosphate
  modified_base 16: mod_base = OTHER; note = 2'-fluorocytidine-3'-phosphate
  modified_base 17: mod_base = OTHER; note = 2'-O-methylcytidine-3'-phosphate
  modified_base 18: mod_base = OTHER; note = 2'-O-methyluridine-3'-phosphate
  modified_base 19: mod_base = OTHER; note = 2'-O-methyluridine-3'-phosphate
  modified_base 20: mod_base = OTHER; note = 2'-O-methyluridine-3'-phosphate
  modified_base 21: mod_base = OTHER; note = 2'-O-methylguanosine-3'- phosphorothioate
  modified_base 22: mod_base = OTHER; note = 2'-O-methyluridine-3'-phosphorothioate
  modified_base 23: mod_base = OTHER; note = 2'-O-methyladenosine-3'-phosphate
ggaaaagaacgacaccctttgta

SEQ ID NO: 2340 - RNA, 21 nt, synthetic construct
  misc_feature 1..21: note = Description of Artificial Sequence: Synthetic oligonucleotide
  source 1..21: mol_type = other RNA
  modified_base 1: mod_base = OTHER; note = 2'-O-methyladenosine-3'- phosphorothioate
  modified_base 2: mod_base = OTHER; note = 2'-O-methyladenosine-3'- phosphorothioate
  modified_base 3: mod_base = OTHER; note = 2'-O-methyladenosine-3'-phosphate
  modified_base 4: mod_base = OTHER; note = 2'-O-methylguanosine-3'-phosphate
  modified_base 5: mod_base = OTHER; note = 2'-O-methylguanosine-3'-phosphate
  modified_base 6: mod_base = OTHER; note = 2'-O-methylguanosine-3'-phosphate
  modified_base 7: mod_base = OTHER; note = 2'-fluorouridine-3'-phosphate
  modified_base 8: mod_base = OTHER; note = 2'-O-methylguanosine-3'-phosphate
  modified_base 9: mod_base = OTHER; note = 2'-fluorouridine-3'-phosphate
  modified_base 10: mod_base = OTHER; note = 2'-fluorocytidine-3'-phosphate
  modified_base 11: mod_base = OTHER; note = 2'-fluoroguanosine-3'-phosphate
  modified_base 12: mod_base = OTHER; note = 2'-O-methyluridine-3'-phosphate
  modified_base 13: mod_base = OTHER; note = 2'-O-methyluridine-3'-phosphate
  modified_base 14: mod_base = OTHER; note = 2'-O-methylcytidine-3'-phosphate
  modified_base 15: mod_base = OTHER; note = 2'-O-methyluridine-3'-phosphate
  modified_base 16: mod_base = OTHER; note = 2'-O-methyluridine-3'-phosphate
  modified_base 17: mod_base = OTHER; note = 2'-O-methyluridine-3'-phosphate
  modified_base 18: mod_base = OTHER; note = 2'-O-methyluridine-3'-phosphate
  modified_base 19: mod_base = OTHER; note = 2'-O-methylcytidine-3'-phosphate
  modified_base 20: mod_base = OTHER; note = 2'-O-methylcytidine-3'-phosphate
  modified_base 21: mod_base = OTHER; note = 2'-O-methyladenosine-3'-phosphate attached to N-[tris(N-acetylgalactosamine-alkyl)-amidodecanoyl)]-4-hydr oxyprolinol Hyp-(N-acetylgalactosamine-alkyl)3
aaagggtgtcgttcttttcca

SEQ ID NO: 2341 - RNA, 23 nt, synthetic construct
  misc_feature 1..23: note = Description of Artificial Sequence: Synthetic oligonucleotide
  source 1..23: mol_type = other RNA
  modified_base 1: mod_base = OTHER; note = 2'-O-methyluridine-3'-phosphorothioate
  modified_base 2: mod_base = OTHER; note = 2'-fluoroguanosine-3'-phosphorothioate
  modified_base 3: mod_base = OTHER; note = 2'-O-methylguanosine-3'-phosphate
  modified_base 4: mod_base = OTHER; note = 2'-O-methyladenosine-3'-phosphate
  modified_base 5: mod_base = OTHER; note = 2'-O-methyladenosine-3'-phosphate
  modified_base 6: mod_base = OTHER; note = 2'-fluoroadenosine-3'-phosphate
  modified_base 7: mod_base = OTHER; note = 2'-O-methyladenosine-3'-phosphate
  modified_base 8: mod_base = OTHER; note = 2'-fluoroguanosine-3'-phosphate
  modified_base 9: mod_base = OTHER; note = 2'-fluoroadenosine-3'-phosphate
  modified_base 10: mod_base = OTHER; note = 2'-O-methyladenosine-3'-phosphate
  modified_base 11: mod_base = OTHER; note = 2'-O-methylcytidine-3'-phosphate
  modified_base 12: mod_base = OTHER; note = 2'-O-methylguanosine-3'-phosphate
  modified_base 13: mod_base = OTHER; note = 2'-O-methyladenosine-3'-phosphate
  modified_base 14: mod_base = OTHER; note = 2'-fluorocytidine-3'-phosphate
  modified_base 15: mod_base = OTHER; note = 2'-O-methyladenosine-3'-phosphate
  modified_base 16: mod_base = OTHER; note = 2'-fluorocytidine-3'-phosphate
  modified_base 17: mod_base = OTHER; note = 2'-O-methylcytidine-3'-phosphate
  modified_base 18: mod_base = OTHER; note = 2'-O-methylcytidine-3'-phosphate
  modified_base 19: mod_base = OTHER; note = 2'-O-methyluridine-3'-phosphate
  modified_base 20: mod_base = OTHER; note = 2'-O-methyluridine-3'-phosphate
  modified_base 21: mod_base = OTHER; note = 2'-O-methyluridine-3'-phosphorothioate
  modified_base 22: mod_base = OTHER; note = 2'-O-methylguanosine-3'- phosphorothioate
  modified_base 23: mod_base = OTHER; note = 2'-O-methyluridine-3'-phosphate
tggaaaagaacgacaccctttgt

SEQ ID NO: 2342 - RNA, 21 nt, synthetic construct
  misc_feature 1..21: note = Description of Artificial Sequence: Synthetic oligonucleotide
  source 1..21: mol_type = other RNA
  modified_base 1: mod_base = OTHER; note = 2'-O-methyladenosine-3'- phosphorothioate
  modified_base 2: mod_base = OTHER; note = 2'-O-methyladenosine-3'- phosphorothioate
  modified_base 3: mod_base = OTHER; note = 2'-O-methyluridine-3'-phosphate
  modified_base 4: mod_base = OTHER; note = 2'-O-methyladenosine-3'-phosphate
  modified_base 5: mod_base = OTHER; note = 2'-O-methylcytidine-3'-phosphate
  modified_base 6: mod_base = OTHER; note = 2'-O-methyladenosine-3'-phosphate
  modified_base 7: mod_base = OTHER; note = 2'-fluoroadenosine-3'-phosphate
  modified_base 8: mod_base = OTHER; note = 2'-O-methyladenosine-3'-phosphate
  modified_base 9: mod_base = OTHER; note = 2'-fluoroguanosine-3'-phosphate
  modified_base 10: mod_base = OTHER; note = 2'-fluoroguanosine-3'-phosphate
  modified_base 11: mod_base = OTHER; note = 2'-fluoroguanosine-3'-phosphate
  modified_base 12: mod_base = OTHER; note = 2'-O-methyluridine-3'-phosphate
  modified_base 13: mod_base = OTHER; note = 2'-O-methylguanosine-3'-phosphate
  modified_base 14: mod_base = OTHER; note = 2'-O-methyluridine-3'-phosphate
  modified_base 15: mod_base = OTHER; note = 2'-O-methylcytidine-3'-phosphate
  modified_base 16: mod_base = OTHER; note = 2'-O-methylguanosine-3'-phosphate
  modified_base 17: mod_base = OTHER; note = 2'-O-methyluridine-3'-phosphate
  modified_base 18: mod_base = OTHER; note = 2'-O-methyluridine-3'-phosphate
  modified_base 19: mod_base = OTHER; note = 2'-O-methylcytidine-3'-phosphate
  modified_base 20: mod_base = OTHER; note = 2'-O-methyluridine-3'-phosphate
  modified_base 21: mod_base = OTHER; note = 2'-O-methyluridine-3'-phosphate attached to N-[tris(N-acetylgalactosamine-alkyl)-amidodecanoyl)]-4-hydr oxyprolinol Hyp-(N-acetylgalactosamine-alkyl)3
aatacaaagggtgtcgttctt

SEQ ID NO: 2343 - RNA, 23 nt, synthetic construct
  misc_feature 1..23: note = Description of Artificial Sequence: Synthetic oligonucleotide
  source 1..23: mol_type = other RNA
  modified_base 1: mod_base = OTHER; note = 2'-O-methyladenosine-3'- phosphorothioate
  modified_base 2: mod_base = OTHER; note = 2'-fluoroadenosine-3'-phosphorothioate
  modified_base 3: mod_base = OTHER; note = 2'-O-methylguanosine-3'-phosphate
  modified_base 4: mod_base = OTHER; note = 2'-O-methyladenosine-3'-phosphate
  modified_base 5: mod_base = OTHER; note = 2'-O-methyladenosine-3'-phosphate
  modified_base 6: mod_base = OTHER; note = 2'-fluorocytidine-3'-phosphate
  modified_base 7: mod_base = OTHER; note = 2'-O-methylguanosine-3'-phosphate
  modified_base 8: mod_base = OTHER; note = 2'-fluoroadenosine-3'-phosphate
  modified_base 9: mod_base = OTHER; note = 2'-fluorocytidine-3'-phosphate
  modified_base 10: mod_base = OTHER; note = 2'-O-methyladenosine-3'-phosphate
  modified_base 11: mod_base = OTHER; note = 2'-O-methylcytidine-3'-phosphate
  modified_base 12: mod_base = OTHER; note = 2'-O-methylcytidine-3'-phosphate
  modified_base 13: mod_base = OTHER; note = 2'-O-methylcytidine-3'-phosphate
  modified_base 14: mod_base = OTHER; note = 2'-fluorouridine-3'-phosphate
  modified_base 15: mod_base = OTHER; note = 2'-O-methyluridine-3'-phosphate
  modified_base 16: mod_base = OTHER; note = 2'-fluorouridine-3'-phosphate
  modified_base 17: mod_base = OTHER; note = 2'-O-methylguanosine-3'-phosphate
  modified_base 18: mod_base = OTHER; note = 2'-O-methyluridine-3'-phosphate
  modified_base 19: mod_base = OTHER; note = 2'-O-methyladenosine-3'-phosphate
  modified_base 20: mod_base = OTHER; note = 2'-O-methyluridine-3'-phosphate
  modified_base 21: mod_base = OTHER; note = 2'-O-methyluridine-3'-phosphorothioate
  modified_base 22: mod_base = OTHER; note = 2'-O-methylguanosine-3'- phosphorothioate
  modified_base 23: mod_base = OTHER; note = 2'-O-methyladenosine-3'-phosphate
aagaacgacaccctttgtattga

SEQ ID NO: 2344 - RNA, 21 nt, synthetic construct
  misc_feature 1..21: note = Description of Artificial Sequence: Synthetic oligonucleotide
  source 1..21: mol_type = other RNA
  modified_base 1: mod_base = OTHER; note = 2'-O-methylcytidine-3'- phosphorothioate
  modified_base 2: mod_base = OTHER; note = 2'-O-methyladenosine-3'- phosphorothioate
  modified_base 3: mod_base = OTHER; note = 2'-O-methyladenosine-3'-phosphate
  modified_base 4: mod_base = OTHER; note = 2'-O-methyluridine-3'-phosphate
  modified_base 5: mod_base = OTHER; note = 2'-O-methyladenosine-3'-phosphate
  modified_base 6: mod_base = OTHER; note = 2'-O-methylcytidine-3'-phosphate
  modified_base 7: mod_base = OTHER; note = 2'-fluoroadenosine-3'-phosphate
  modified_base 8: mod_base = OTHER; note = 2'-O-methyladenosine-3'-phosphate
  modified_base 9: mod_base = OTHER; note = 2'-fluoroadenosine-3'-phosphate
  modified_base 10: mod_base = OTHER; note = 2'-fluoroguanosine-3'-phosphate
  modified_base 11: mod_base = OTHER; note = 2'-fluoroguanosine-3'-phosphate
  modified_base 12: mod_base = OTHER; note = 2'-O-methylguanosine-3'-phosphate
  modified_base 13: mod_base = OTHER; note = 2'-O-methyluridine-3'-phosphate
  modified_base 14: mod_base = OTHER; note = 2'-O-methylguanosine-3'-phosphate
  modified_base 15: mod_base = OTHER; note = 2'-O-methyluridine-3'-phosphate
  modified_base 16: mod_base = OTHER; note = 2'-O-methylcytidine-3'-phosphate
  modified_base 17: mod_base = OTHER; note = 2'-O-methylguanosine-3'-phosphate
  modified_base 18: mod_base = OTHER; note = 2'-O-methyluridine-3'-phosphate
  modified_base 19: mod_base = OTHER; note = 2'-O-methyluridine-3'-phosphate
  modified_base 20: mod_base = OTHER; note = 2'-O-methylcytidine-3'-phosphate
  modified_base 21: mod_base = OTHER; note = 2'-O-methyluridine-3'-phosphate attached to N-[tris(N-acetylgalactosamine-alkyl)-amidodecanoyl)]-4-hydr oxyprolinol Hyp-(N-acetylgalactosamine-alkyl)3
caatacaaagggtgtcgttct

SEQ ID NO: 2345 - RNA, 23 nt, synthetic construct
  misc_feature 1..23: note = Description of Artificial Sequence: Synthetic oligonucleotide
  source 1..23: mol_type = other RNA
  modified_base 1: mod_base = OTHER; note = 2'-O-methyladenosine-3'- phosphorothioate
  modified_base 2: mod_base = OTHER; note = 2'-fluoroguanosine-3'-phosphorothioate
  modified_base 3: mod_base = OTHER; note = 2'-O-methyladenosine-3'-phosphate
  modified_base 4: mod_base = OTHER; note = 2'-O-methyladenosine-3'-phosphate
  modified_base 5: mod_base = OTHER; note = 2'-O-methylcytidine-3'-phosphate
  modified_base 6: mod_base = OTHER; note = 2'-fluoroguanosine-3'-phosphate
  modified_base 7: mod_base = OTHER; note = 2'-O-methyladenosine-3'-phosphate
  modified_base 8: mod_base = OTHER; note = 2'-fluorocytidine-3'-phosphate
  modified_base 9: mod_base = OTHER; note = 2'-fluoroadenosine-3'-phosphate
  modified_base 10: mod_base = OTHER; note = 2'-O-methylcytidine-3'-phosphate
  modified_base 11: mod_base = OTHER; note = 2'-O-methylcytidine-3'-phosphate
  modified_base 12: mod_base = OTHER; note = 2'-O-methylcytidine-3'-phosphate
  modified_base 13: mod_base = OTHER; note = 2'-O-methyluridine-3'-phosphate
  modified_base 14: mod_base = OTHER; note = 2'-fluorouridine-3'-phosphate
  modified_base 15: mod_base = OTHER; note = 2'-O-methyluridine-3'-phosphate
  modified_base 16: mod_base = OTHER; note = 2'-fluoroguanosine-3'-phosphate
  modified_base 17: mod_base = OTHER; note = 2'-O-methyluridine-3'-phosphate
  modified_base 18: mod_base = OTHER; note = 2'-O-methyladenosine-3'-phosphate
  modified_base 19: mod_base = OTHER; note = 2'-O-methyluridine-3'-phosphate
  modified_base 20: mod_base = OTHER; note = 2'-O-methyluridine-3'-phosphate
  modified_base 21: mod_base = OTHER; note = 2'-O-methylguanosine-3'- phosphorothioate
  modified_base 22: mod_base = OTHER; note = 2'-O-methyladenosine-3'- phosphorothioate
  modified_base 23: mod_base = OTHER; note = 2'-O-methyladenosine-3'-phosphate
agaacgacaccctttgtattgaa

SEQ ID NO: 2346 - RNA, 21 nt, synthetic construct
  misc_feature 1..21: note = Description of Artificial Sequence: Synthetic oligonucleotide
  source 1..21: mol_type = other RNA
  modified_base 1: mod_base = OTHER; note = 2'-O-methyladenosine-3'- phosphorothioate
  modified_base 2: mod_base = OTHER; note = 2'-O-methyladenosine-3'- phosphorothioate
  modified_base 3: mod_base = OTHER; note = 2'-O-methyladenosine-3'-phosphate
  modified_base 4: mod_base = OTHER; note = 2'-O-methylguanosine-3'-phosphate
  modified_base 5: mod_base = OTHER; note = 2'-O-methylguanosine-3'-phosphate
  modified_base 6: mod_base = OTHER; note = 2'-O-methylcytidine-3'-phosphate
  modified_base 7: mod_base = OTHER; note = 2'-fluoroadenosine-3'-phosphate
  modified_base 8: mod_base = OTHER; note = 2'-O-methylcytidine-3'-phosphate
  modified_base 9: mod_base = OTHER; note = 2'-fluorouridine-3'-phosphate
  modified_base 10: mod_base = OTHER; note = 2'-fluoroguanosine-3'-phosphate
  modified_base 11: mod_base = OTHER; note = 2'-fluoroadenosine-3'-phosphate
  modified_base 12: mod_base = OTHER; note = 2'-O-methyluridine-3'-phosphate
  modified_base 13: mod_base = OTHER; note = 2'-O-methylguanosine-3'-phosphate
  modified_base 14: mod_base = OTHER; note = 2'-O-methyluridine-3'-phosphate
  modified_base 15: mod_base = OTHER; note = 2'-O-methyluridine-3'-phosphate
  modified_base 16: mod_base = OTHER; note = 2'-O-methylcytidine-3'-phosphate
  modified_base 17: mod_base = OTHER; note = 2'-O-methyluridine-3'-phosphate
  modified_base 18: mod_base = OTHER; note = 2'-O-methylguanosine-3'-phosphate
  modified_base 19: mod_base = OTHER; note = 2'-O-methyladenosine-3'-phosphate
  modified_base 20: mod_base = OTHER; note = 2'-O-methyladenosine-3'-phosphate
  modified_base 21: mod_base = OTHER; note = 2'-O-methyladenosine-3'-phosphate attached to N-[tris(N-acetylgalactosamine-alkyl)-amidodecanoyl)]-4-hydr oxyprolinol Hyp-(N-acetylgalactosamine-alkyl)3
aaaggcactgatgttctgaaa

SEQ ID NO: 2347 - RNA, 23 nt, synthetic construct
  misc_feature 1..23: note = Description of Artificial Sequence: Synthetic oligonucleotide
  source 1..23: mol_type = other RNA
  modified_base 1: mod_base = OTHER; note = 2'-O-methyluridine-3'-phosphorothioate
  modified_base 2: mod_base = OTHER; note = 2'-fluorouridine -3'-phosphorothioate
  modified_base 3: mod_base = OTHER; note = 2'-O-methyluridine-3'-phosphate
  modified_base 4: mod_base = OTHER; note = 2'-O-methylcytidine-3'-phosphate
  modified_base 5: mod_base = OTHER; note = 2'-O-methyladenosine-3'-phosphate
  modified_base 6: mod_base = OTHER; note = 2'-fluoroguanosine-3'-phosphate
  modified_base 7: mod_base = OTHER; note = 2'-O-methyladenosine-3'-phosphate
  modified_base 8: mod_base = OTHER; note = 2'-fluoroadenosine-3'-phosphate
  modified_base 9: mod_base = OTHER; note = 2'-fluorocytidine-3'-phosphate
  modified_base 10: mod_base = OTHER; note = 2'-O-methyladenosine-3'-phosphate
  modified_base 11: mod_base = OTHER; note = 2'-O-methyluridine-3'-phosphate
  modified_base 12: mod_base = OTHER; note = 2'-O-methylcytidine-3'-phosphate
  modified_base 13: mod_base = OTHER; note = 2'-O-methyladenosine-3'-phosphate
  modified_base 14: mod_base = OTHER; note = 2'-fluoroguanosine-3'-phosphate
  modified_base 15: mod_base = OTHER; note = 2'-O-methyluridine-3'-phosphate
  modified_base 16: mod_base = OTHER; note = 2'-fluoroguanosine-3'-phosphate
  modified_base 17: mod_base = OTHER; note = 2'-O-methylcytidine-3'-phosphate
  modified_base 18: mod_base = OTHER; note = 2'-O-methylcytidine-3'-phosphate
  modified_base 19: mod_base = OTHER; note = 2'-O-methyluridine-3'-phosphate
  modified_base 20: mod_base = OTHER; note = 2'-O-methyluridine-3'-phosphate
  modified_base 21: mod_base = OTHER; note = 2'-O-methyluridine-3'-phosphorothioate
  modified_base 22: mod_base = OTHER; note = 2'-O-methylcytidine-3'- phosphorothioate
  modified_base 23: mod_base = OTHER; note = 2'-O-methylcytidine-3'-phosphate
tttcagaacatcagtgcctttcc

SEQ ID NO: 2348 - RNA, 21 nt, synthetic construct
  misc_feature 1..21: note = Description of Artificial Sequence: Synthetic oligonucleotide
  source 1..21: mol_type = other RNA
  modified_base 1: mod_base = OTHER; note = 2'-O-methyladenosine-3'- phosphorothioate
  modified_base 2: mod_base = OTHER; note = 2'-O-methyladenosine-3'- phosphorothioate
  modified_base 3: mod_base = OTHER; note = 2'-O-methylguanosine-3'-phosphate
  modified_base 4: mod_base = OTHER; note = 2'-O-methylguanosine-3'-phosphate
  modified_base 5: mod_base = OTHER; note = 2'-O-methylcytidine-3'-phosphate
  modified_base 6: mod_base = OTHER; note = 2'-O-methyladenosine-3'-phosphate
  modified_base 7: mod_base = OTHER; note = 2'-fluorocytidine-3'-phosphate
  modified_base 8: mod_base = OTHER; note = 2'-O-methyluridine-3'-phosphate
  modified_base 9: mod_base = OTHER; note = 2'-fluoroguanosine-3'-phosphate
  modified_base 10: mod_base = OTHER; note = 2'-fluoroadenosine-3'-phosphate
  modified_base 11: mod_base = OTHER; note = 2'-fluorouridine-3'-phosphate
  modified_base 12: mod_base = OTHER; note = 2'-O-methylguanosine-3'-phosphate
  modified_base 13: mod_base = OTHER; note = 2'-O-methyluridine-3'-phosphate
  modified_base 14: mod_base = OTHER; note = 2'-O-methyluridine-3'-phosphate
  modified_base 15: mod_base = OTHER; note = 2'-O-methylcytidine-3'-phosphate
  modified_base 16: mod_base = OTHER; note = 2'-O-methyluridine-3'-phosphate
  modified_base 17: mod_base = OTHER; note = 2'-O-methylguanosine-3'-phosphate
  modified_base 18: mod_base = OTHER; note = 2'-O-methyladenosine-3'-phosphate
  modified_base 19: mod_base = OTHER; note = 2'-O-methyladenosine-3'-phosphate
  modified_base 20: mod_base = OTHER; note = 2'-O-methyladenosine-3'-phosphate
  modified_base 21: mod_base = OTHER; note = 2'-O-methylguanosine-3'-phosphate attached to N-[tris(N-acetylgalactosamine-alkyl)-amidodecanoyl)]-4-hydr oxyprolinol Hyp-(N-acetylgalactosamine-alkyl)3
aaggcactgatgttctgaaag

SEQ ID NO: 2349 - RNA, 23 nt, synthetic construct
  misc_feature 1..23: note = Description of Artificial Sequence: Synthetic oligonucleotide
  source 1..23: mol_type = other RNA
  modified_base 1: mod_base = OTHER; note = 2'-O-methylcytidine-3'- phosphorothioate
  modified_base 2: mod_base = OTHER; note = 2'-fluorouridine -3'-phosphorothioate
  modified_base 3: mod_base = OTHER; note = 2'-O-methyluridine-3'-phosphate
  modified_base 4: mod_base = OTHER; note = 2'-O-methyluridine-3'-phosphate
  modified_base 5: mod_base = OTHER; note = 2'-O-methylcytidine-3'-phosphate
  modified_base 6: mod_base = OTHER; note = 2'-fluoroadenosine-3'-phosphate
  modified_base 7: mod_base = OTHER; note = 2'-O-methylguanosine-3'-phosphate
  modified_base 8: mod_base = OTHER; note = 2'-fluoroadenosine-3'-phosphate
  modified_base 9: mod_base = OTHER; note = 2'-fluoroadenosine-3'-phosphate
  modified_base 10: mod_base = OTHER; note = 2'-O-methylcytidine-3'-phosphate
  modified_base 11: mod_base = OTHER; note = 2'-O-methyladenosine-3'-phosphate
  modified_base 12: mod_base = OTHER; note = 2'-O-methyluridine-3'-phosphate
  modified_base 13: mod_base = OTHER; note = 2'-O-methylcytidine-3'-phosphate
  modified_base 14: mod_base = OTHER; note = 2'-fluoroadenosine-3'-phosphate
  modified_base 15: mod_base = OTHER; note = 2'-O-methylguanosine-3'-phosphate
  modified_base 16: mod_base = OTHER; note = 2'-fluorouridine-3'-phosphate
  modified_base 17: mod_base = OTHER; note = 2'-O-methylguanosine-3'-phosphate
  modified_base 18: mod_base = OTHER; note = 2'-O-methylcytidine-3'-phosphate
  modified_base 19: mod_base = OTHER; note = 2'-O-methylcytidine-3'-phosphate
  modified_base 20: mod_base = OTHER; note = 2'-O-methyluridine-3'-phosphate
  modified_base 21: mod_base = OTHER; note = 2'-O-methyluridine-3'-phosphorothioate
  modified_base 22: mod_base = OTHER; note = 2'-O-methyluridine-3'-phosphorothioate
  modified_base 23: mod_base = OTHER; note = 2'-O-methylcytidine-3'-phosphate
ctttcagaacatcagtgcctttc

SEQ ID NO: 2350 - RNA, 21 nt, synthetic construct
  misc_feature 1..21: note = Description of Artificial Sequence: Synthetic oligonucleotide
  source 1..21: mol_type = other RNA
  modified_base 1: mod_base = OTHER; note = 2'-O-methylguanosine-3'- phosphorothioate
  modified_base 2: mod_base = OTHER; note = 2'-O-methylcytidine-3'- phosphorothioate
  modified_base 3: mod_base = OTHER; note = 2'-O-methylguanosine-3'-phosphate
  modified_base 4: mod_base = OTHER; note = 2'-O-methylguanosine-3'-phosphate
  modified_base 5: mod_base = OTHER; note = 2'-O-methyladenosine-3'-phosphate
  modified_base 6: mod_base = OTHER; note = 2'-O-methyladenosine-3'-phosphate
  modified_base 7: mod_base = OTHER; note = 2'-fluoroadenosine-3'-phosphate
  modified_base 8: mod_base = OTHER; note = 2'-O-methylguanosine-3'-phosphate
  modified_base 9: mod_base = OTHER; note = 2'-fluoroguanosine-3'-phosphate
  modified_base 10: mod_base = OTHER; note = 2'-fluorocytidine-3'-phosphate
  modified_base 11: mod_base = OTHER; note = 2'-fluoroadenosine-3'-phosphate
  modified_base 12: mod_base = OTHER; note = 2'-O-methylcytidine-3'-phosphate
  modified_base 13: mod_base = OTHER; note = 2'-O-methyluridine-3'-phosphate
  modified_base 14: mod_base = OTHER; note = 2'-O-methylguanosine-3'-phosphate
  modified_base 15: mod_base = OTHER; note = 2'-O-methyladenosine-3'-phosphate
  modified_base 16: mod_base = OTHER; note = 2'-O-methyluridine-3'-phosphate
  modified_base 17: mod_base = OTHER; note = 2'-O-methylguanosine-3'-phosphate
  modified_base 18: mod_base = OTHER; note = 2'-O-methyluridine-3'-phosphate
  modified_base 19: mod_base = OTHER; note = 2'-O-methyluridine-3'-phosphate
  modified_base 20: mod_base = OTHER; note = 2'-O-methylcytidine-3'-phosphate
  modified_base 21: mod_base = OTHER; note = 2'-O-methyluridine-3'-phosphate attached to N-[tris(N-acetylgalactosamine-alkyl)-amidodecanoyl)]-4-hydr oxyprolinol Hyp-(N-acetylgalactosamine-alkyl)3
gcggaaaggcactgatgttct

SEQ ID NO: 2351 - RNA, 23 nt, synthetic construct
  misc_feature 1..23: note = Description of Artificial Sequence: Synthetic oligonucleotide
  source 1..23: mol_type = other RNA
  modified_base 1: mod_base = OTHER; note = 2'-O-methyladenosine-3'- phosphorothioate
  modified_base 2: mod_base = OTHER; note = 2'-fluoroguanosine-3'-phosphorothioate
  modified_base 3: mod_base = OTHER; note = 2'-O-methyladenosine-3'-phosphate
  modified_base 4: mod_base = OTHER; note = 2'-O-methyladenosine-3'-phosphate
  modified_base 5: mod_base = OTHER; note = 2'-O-methylcytidine-3'-phosphate
  modified_base 6: mod_base = OTHER; note = 2'-fluoroadenosine-3'-phosphate
  modified_base 7: mod_base = OTHER; note = 2'-O-methyluridine-3'-phosphate
  modified_base 8: mod_base = OTHER; note = 2'-fluorocytidine-3'-phosphate
  modified_base 9: mod_base = OTHER; note = 2'-fluoroadenosine-3'-phosphate
  modified_base 10: mod_base = OTHER; note = 2'-O-methylguanosine-3'-phosphate
  modified_base 11: mod_base = OTHER; note = 2'-O-methyluridine-3'-phosphate
  modified_base 12: mod_base = OTHER; note = 2'-O-methylguanosine-3'-phosphate
  modified_base 13: mod_base = OTHER; note = 2'-O-methylcytidine-3'-phosphate
  modified_base 14: mod_base = OTHER; note = 2'-fluorocytidine-3'-phosphate
  modified_base 15: mod_base = OTHER; note = 2'-O-methyluridine-3'-phosphate
  modified_base 16: mod_base = OTHER; note = 2'-fluorouridine-3'-phosphate
  modified_base 17: mod_base = OTHER; note = 2'-O-methyluridine-3'-phosphate
  modified_base 18: mod_base = OTHER; note = 2'-O-methylcytidine-3'-phosphate
  modified_base 19: mod_base = OTHER; note = 2'-O-methylcytidine-3'-phosphate
  modified_base 20: mod_base = OTHER; note = 2'-O-methylguanosine-3'-phosphate
  modified_base 21: mod_base = OTHER; note = 2'-O-methylcytidine-3'- phosphorothioate
  modified_base 22: mod_base = OTHER; note = 2'-O-methyladenosine-3'- phosphorothioate
  modified_base 23: mod_base = OTHER; note = 2'-O-methylcytidine-3'-phosphate
agaacatcagtgcctttccgcac

SEQ ID NO: 2352 - RNA, 21 nt, synthetic construct
  misc_feature 1..21: note = Description of Artificial Sequence: Synthetic oligonucleotide
  source 1..21: mol_type = other RNA
  modified_base 1: mod_base = OTHER; note = 2'-O-methyluridine-3'-phosphorothioate
  modified_base 2: mod_base = OTHER; note = 2'-O-methylguanosine-3'- phosphorothioate
  modified_base 3: mod_base = OTHER; note = 2'-O-methylcytidine-3'-phosphate
  modified_base 4: mod_base = OTHER; note = 2'-O-methylguanosine-3'-phosphate
  modified_base 5: mod_base = OTHER; note = 2'-O-methylguanosine-3'-phosphate
  modified_base 6: mod_base = OTHER; note = 2'-O-methyladenosine-3'-phosphate
  modified_base 7: mod_base = OTHER; note = 2'-fluoroadenosine-3'-phosphate
  modified_base 8: mod_base = OTHER; note = 2'-O-methyladenosine-3'-phosphate
  modified_base 9: mod_base = OTHER; note = 2'-fluoroguanosine-3'-phosphate
  modified_base 10: mod_base = OTHER; note = 2'-fluoroguanosine-3'-phosphate
  modified_base 11: mod_base = OTHER; note = 2'-fluorocytidine-3'-phosphate
  modified_base 12: mod_base = OTHER; note = 2'-O-methyladenosine-3'-phosphate
  modified_base 13: mod_base = OTHER; note = 2'-O-methylcytidine-3'-phosphate
  modified_base 14: mod_base = OTHER; note = 2'-O-methyluridine-3'-phosphate
  modified_base 15: mod_base = OTHER; note = 2'-O-methylguanosine-3'-phosphate
  modified_base 16: mod_base = OTHER; note = 2'-O-methyladenosine-3'-phosphate
  modified_base 17: mod_base = OTHER; note = 2'-O-methyluridine-3'-phosphate
  modified_base 18: mod_base = OTHER; note = 2'-O-methylguanosine-3'-phosphate
  modified_base 19: mod_base = OTHER; note = 2'-O-methyluridine-3'-phosphate
  modified_base 20: mod_base = OTHER; note = 2'-O-methyluridine-3'-phosphate
  modified_base 21: mod_base = OTHER; note = 2'-O-methylcytidine-3'-phosphate attached to N-[tris(N-acetylgalactosamine-alkyl)-amidodecanoyl)]-4-hydr oxyprolinol Hyp-(N-acetylgalactosamine-alkyl)3
tgcggaaaggcactgatgttc

SEQ ID NO: 2353 - RNA, 23 nt, synthetic construct
  misc_feature 1..23: note = Description of Artificial Sequence: Synthetic oligonucleotide
  source 1..23: mol_type = other RNA
  modified_base 1: mod_base = OTHER; note = 2'-O-methylguanosine-3'- phosphorothioate
  modified_base 2: mod_base = OTHER; note = 2'-fluoroadenosine-3'-phosphorothioate
  modified_base 3: mod_base = OTHER; note = 2'-O-methyladenosine-3'-phosphate
  modified_base 4: mod_base = OTHER; note = 2'-O-methylcytidine-3'-phosphate
  modified_base 5: mod_base = OTHER; note = 2'-O-methyladenosine-3'-phosphate
  modified_base 6: mod_base = OTHER; note = 2'-fluorouridine-3'-phosphate
  modified_base 7: mod_base = OTHER; note = 2'-O-methylcytidine-3'-phosphate
  modified_base 8: mod_base = OTHER; note = 2'-fluoroadenosine-3'-phosphate
  modified_base 9: mod_base = OTHER; note = 2'-fluoroguanosine-3'-phosphate
  modified_base 10: mod_base = OTHER; note = 2'-O-methyluridine-3'-phosphate
  modified_base 11: mod_base = OTHER; note = 2'-O-methylguanosine-3'-phosphate
  modified_base 12: mod_base = OTHER; note = 2'-O-methylcytidine-3'-phosphate
  modified_base 13: mod_base = OTHER; note = 2'-O-methylcytidine-3'-phosphate
  modified_base 14: mod_base = OTHER; note = 2'-fluorouridine-3'-phosphate
  modified_base 15: mod_base = OTHER; note = 2'-O-methyluridine-3'-phosphate
  modified_base 16: mod_base = OTHER; note = 2'-fluorouridine-3'-phosphate
  modified_base 17: mod_base = OTHER; note = 2'-O-methylcytidine-3'-phosphate
  modified_base 18: mod_base = OTHER; note = 2'-O-methylcytidine-3'-phosphate
  modified_base 19: mod_base = OTHER; note = 2'-O-methylguanosine-3'-phosphate
  modified_base 20: mod_base = OTHER; note = 2'-O-methylcytidine-3'-phosphate
  modified_base 21: mod_base = OTHER; note = 2'-O-methyladenosine-3'- phosphorothioate
  modified_base 22: mod_base = OTHER; note = 2'-O-methylcytidine-3'- phosphorothioate
  modified_base 23: mod_base = OTHER; note = 2'-O-methyladenosine-3'-phosphate
gaacatcagtgcctttccgcaca

SEQ ID NO: 2354 - RNA, 21 nt, synthetic construct
  misc_feature 1..21: note = Description of Artificial Sequence: Synthetic oligonucleotide
  source 1..21: mol_type = other RNA
  modified_base 1: mod_base = OTHER; note = 2'-O-methyladenosine-3'- phosphorothioate
  modified_base 2: mod_base = OTHER; note = 2'-O-methyladenosine-3'- phosphorothioate
  modified_base 3: mod_base = OTHER; note = 2'-O-methylguanosine-3'-phosphate
  modified_base 4: mod_base = OTHER; note = 2'-O-methylguanosine-3'-phosphate
  modified_base 5: mod_base = OTHER; note = 2'-O-methyladenosine-3'-phosphate
  modified_base 6: mod_base = OTHER; note = 2'-O-methyluridine-3'-phosphate
  modified_base 7: mod_base = OTHER; note = 2'-fluoroguanosine-3'-phosphate
  modified_base 8: mod_base = OTHER; note = 2'-O-methylcytidine-3'-phosphate
  modified_base 9: mod_base = OTHER; note = 2'-fluorouridine-3'-phosphate
  modified_base 10: mod_base = OTHER; note = 2'-fluorocytidine-3'-phosphate
  modified_base 11: mod_base = OTHER; note = 2'-fluorocytidine-3'-phosphate
  modified_base 12: mod_base = OTHER; note = 2'-O-methylguanosine-3'-phosphate
  modified_base 13: mod_base = OTHER; note = 2'-O-methylguanosine-3'-phosphate
  modified_base 14: mod_base = OTHER; note = 2'-O-methyladenosine-3'-phosphate
  modified_base 15: mod_base = OTHER; note = 2'-O-methyladenosine-3'-phosphate
  modified_base 16: mod_base = OTHER; note = 2'-O-methyluridine-3'-phosphate
  modified_base 17: mod_base = OTHER; note = 2'-O-methylguanosine-3'-phosphate
  modified_base 18: mod_base = OTHER; note = 2'-O-methyluridine-3'-phosphate
  modified_base 19: mod_base = OTHER; note = 2'-O-methyluridine-3'-phosphate
  modified_base 20: mod_base = OTHER; note = 2'-O-methylguanosine-3'-phosphate
  modified_base 21: mod_base = OTHER; note = 2'-O-methylcytidine-3'-phosphate attached to N-[tris(N-acetylgalactosamine-alkyl)-amidodecanoyl)]-4-hydr oxyprolinol Hyp-(N-acetylgalactosamine-alkyl)3
aaggatgctccggaatgttgc

SEQ ID NO: 2355 - RNA, 23 nt, synthetic construct
  misc_feature 1..23: note = Description of Artificial Sequence: Synthetic oligonucleotide
  source 1..23: mol_type = other RNA
  modified_base 1: mod_base = OTHER; note = 2'-O-methylguanosine-3'- phosphorothioate
  modified_base 2: mod_base = OTHER; note = 2'-fluorocytidine-3'-phosphorothioate
  modified_base 3: mod_base = OTHER; note = 2'-O-methyladenosine-3'-phosphate
  modified_base 4: mod_base = OTHER; note = 2'-O-methyladenosine-3'-phosphate
  modified_base 5: mod_base = OTHER; note = 2'-O-methylcytidine-3'-phosphate
  modified_base 6: mod_base = OTHER; note = 2'-fluoroadenosine-3'-phosphate
  modified_base 7: mod_base = OTHER; note = 2'-O-methyluridine-3'-phosphate
  modified_base 8: mod_base = OTHER; note = 2'-fluorouridine-3'-phosphate
  modified_base 9: mod_base = OTHER; note = 2'-fluorocytidine-3'-phosphate
  modified_base 10: mod_base = OTHER; note = 2'-O-methylcytidine-3'-phosphate
  modified_base 11: mod_base = OTHER; note = 2'-O-methylguanosine-3'-phosphate
  modified_base 12: mod_base = OTHER; note = 2'-O-methylguanosine-3'-phosphate
  modified_base 13: mod_base = OTHER; note = 2'-O-methyladenosine-3'-phosphate
  modified_base 14: mod_base = OTHER; note = 2'-fluoroguanosine-3'-phosphate
  modified_base 15: mod_base = OTHER; note = 2'-O-methylcytidine-3'-phosphate
  modified_base 16: mod_base = OTHER; note = 2'-fluoroadenosine-3'-phosphate
  modified_base 17: mod_base = OTHER; note = 2'-O-methyluridine-3'-phosphate
  modified_base 18: mod_base = OTHER; note = 2'-O-methylcytidine-3'-phosphate
  modified_base 19: mod_base = OTHER; note = 2'-O-methylcytidine-3'-phosphate
  modified_base 20: mod_base = OTHER; note = 2'-O-methyluridine-3'-phosphate
  modified_base 21: mod_base = OTHER; note = 2'-O-methyluridine-3'-phosphorothioate
  modified_base 22: mod_base = OTHER; note = 2'-O-methylguanosine-3'- phosphorothioate
  modified_base 23: mod_base = OTHER; note = 2'-O-methylguanosine-3'-phosphate
gcaacattccggagcatccttgg

SEQ ID NO: 2356 - RNA, 21 nt, synthetic construct
  misc_feature 1..21: note = Description of Artificial Sequence: Synthetic oligonucleotide
  source 1..21: mol_type = other RNA
  modified_base 1: mod_base = OTHER; note = 2'-O-methyladenosine-3'- phosphorothioate
  modified_base 2: mod_base = OTHER; note = 2'-O-methylguanosine-3'- phosphorothioate
  modified_base 3: mod_base = OTHER; note = 2'-O-methylguanosine-3'-phosphate
  modified_base 4: mod_base = OTHER; note = 2'-O-methyladenosine-3'-phosphate
  modified_base 5: mod_base = OTHER; note = 2'-O-methyluridine-3'-phosphate
  modified_base 6: mod_base = OTHER; note = 2'-O-methylguanosine-3'-phosphate
  modified_base 7: mod_base = OTHER; note = 2'-fluorocytidine-3'-phosphate
  modified_base 8: mod_base = OTHER; note = 2'-O-methyluridine-3'-phosphate
  modified_base 9: mod_base = OTHER; note = 2'-fluorocytidine-3'-phosphate
  modified_base 10: mod_base = OTHER; note = 2'-fluorocytidine-3'-phosphate
  modified_base 11: mod_base = OTHER; note = 2'-fluoroguanosine-3'-phosphate
  modified_base 12: mod_base = OTHER; note = 2'-O-methylguanosine-3'-phosphate
  modified_base 13: mod_base = OTHER; note = 2'-O-methyladenosine-3'-phosphate
  modified_base 14: mod_base = OTHER; note = 2'-O-methyladenosine-3'-phosphate
  modified_base 15: mod_base = OTHER; note = 2'-O-methyluridine-3'-phosphate
  modified_base 16: mod_base = OTHER; note = 2'-O-methylguanosine-3'-phosphate
  modified_base 17: mod_base = OTHER; note = 2'-O-methyluridine-3'-phosphate
  modified_base 18: mod_base = OTHER; note = 2'-O-methyluridine-3'-phosphate
  modified_base 19: mod_base = OTHER; note = 2'-O-methylguanosine-3'-phosphate
  modified_base 20: mod_base = OTHER; note = 2'-O-methylcytidine-3'-phosphate
  modified_base 21: mod_base = OTHER; note = 2'-O-methyluridine-3'-phosphate attached to N-[tris(N-acetylgalactosamine-alkyl)-amidodecanoyl)]-4-hydr oxyprolinol Hyp-(N-acetylgalactosamine-alkyl)3
aggatgctccggaatgttgct

SEQ ID NO: 2357 - RNA, 23 nt, synthetic construct
  misc_feature 1..23: note = Description of Artificial Sequence: Synthetic oligonucleotide
  source 1..23: mol_type = other RNA
  modified_base 1: mod_base = OTHER; note = 2'-O-methyladenosine-3'- phosphorothioate
  modified_base 2: mod_base = OTHER; note = 2'-fluoroguanosine-3'-phosphorothioate
  modified_base 3: mod_base = OTHER; note = 2'-O-methylcytidine-3'-phosphate
  modified_base 4: mod_base = OTHER; note = 2'-O-methyladenosine-3'-phosphate
  modified_base 5: mod_base = OTHER; note = 2'-O-methyladenosine-3'-phosphate
  modified_base 6: mod_base = OTHER; note = 2'-fluorocytidine-3'-phosphate
  modified_base 7: mod_base = OTHER; note = 2'-O-methyladenosine-3'-phosphate
  modified_base 8: mod_base = OTHER; note = 2'-fluorouridine-3'-phosphate
  modified_base 9: mod_base = OTHER; note = 2'-fluorouridine-3'-phosphate
  modified_base 10: mod_base = OTHER; note = 2'-O-methylcytidine-3'-phosphate
  modified_base 11: mod_base = OTHER; note = 2'-O-methylcytidine-3'-phosphate
  modified_base 12: mod_base = OTHER; note = 2'-O-methylguanosine-3'-phosphate
  modified_base 13: mod_base = OTHER; note = 2'-O-methylguanosine-3'-phosphate
  modified_base 14: mod_base = OTHER; note = 2'-fluoroadenosine-3'-phosphate
  modified_base 15: mod_base = OTHER; note = 2'-O-methylguanosine-3'-phosphate
  modified_base 16: mod_base = OTHER; note = 2'-fluorocytidine-3'-phosphate
  modified_base 17: mod_base = OTHER; note = 2'-O-methyladenosine-3'-phosphate
  modified_base 18: mod_base = OTHER; note = 2'-O-methyluridine-3'-phosphate
  modified_base 19: mod_base = OTHER; note = 2'-O-methylcytidine-3'-phosphate
  modified_base 20: mod_base = OTHER; note = 2'-O-methylcytidine-3'-phosphate
  modified_base 21: mod_base = OTHER; note = 2'-O-methyluridine-3'-phosphorothioate
  modified_base 22: mod_base = OTHER; note = 2'-O-methyluridine-3'-phosphorothioate
  modified_base 23: mod_base = OTHER; note = 2'-O-methylguanosine-3'-phosphate
agcaacattccggagcatccttg

SEQ ID NO: 2358 - RNA, 21 nt, synthetic construct
  misc_feature 1..21: note = Description of Artificial Sequence: Synthetic oligonucleotide
  source 1..21: mol_type = other RNA
  modified_base 1: mod_base = OTHER; note = 2'-O-methyladenosine-3'- phosphorothioate
  modified_base 2: mod_base = OTHER; note = 2'-O-methyluridine-3'-phosphorothioate
  modified_base 3: mod_base = OTHER; note = 2'-O-methylcytidine-3'-phosphate
  modified_base 4: mod_base = OTHER; note = 2'-O-methylcytidine-3'-phosphate
  modified_base 5: mod_base = OTHER; note = 2'-O-methyladenosine-3'-phosphate
  modified_base 6: mod_base = OTHER; note = 2'-O-methyladenosine-3'-phosphate
  modified_base 7: mod_base = OTHER; note = 2'-fluoroguanosine-3'-phosphate
  modified_base 8: mod_base = OTHER; note = 2'-O-methylguanosine-3'-phosphate
  modified_base 9: mod_base = OTHER; note = 2'-fluoroadenosine-3'-phosphate
  modified_base 10: mod_base = OTHER; note = 2'-fluorouridine-3'-phosphate
  modified_base 11: mod_base = OTHER; note = 2'-fluoroguanosine-3'-phosphate
  modified_base 12: mod_base = OTHER; note = 2'-O-methylcytidine-3'-phosphate
  modified_base 13: mod_base = OTHER; note = 2'-O-methyluridine-3'-phosphate
  modified_base 14: mod_base = OTHER; note = 2'-O-methylcytidine-3'-phosphate
  modified_base 15: mod_base = OTHER; note = 2'-O-methylcytidine-3'-phosphate
  modified_base 16: mod_base = OTHER; note = 2'-O-methylguanosine-3'-phosphate
  modified_base 17: mod_base = OTHER; note = 2'-O-methylguanosine-3'-phosphate
  modified_base 18: mod_base = OTHER; note = 2'-O-methyladenosine-3'-phosphate
  modified_base 19: mod_base = OTHER; note = 2'-O-methyladenosine-3'-phosphate
  modified_base 20: mod_base = OTHER; note = 2'-O-methyluridine-3'-phosphate
  modified_base 21: mod_base = OTHER; note = 2'-O-methylguanosine-3'-phosphate attached to N-[tris(N-acetylgalactosamine-alkyl)-amidodecanoyl)]-4-hydr oxyprolinol Hyp-(N-acetylgalactosamine-alkyl)3
atccaaggatgctccggaatg

SEQ ID NO: 2359 - RNA, 23 nt, synthetic construct
  misc_feature 1..23: note = Description of Artificial Sequence: Synthetic oligonucleotide
  source 1..23: mol_type = other RNA
  modified_base 1: mod_base = OTHER; note = 2'-O-methylcytidine-3'- phosphorothioate
  modified_base 2: mod_base = OTHER; note = 2'-fluoroadenosine-3'-phosphorothioate
  modified_base 3: mod_base = OTHER; note = 2'-O-methyluridine-3'-phosphate
  modified_base 4: mod_base = OTHER; note = 2'-O-methyluridine-3'-phosphate
  modified_base 5: mod_base = OTHER; note = 2'-O-methylcytidine-3'-phosphate
  modified_base 6: mod_base = OTHER; note = 2'-fluorocytidine-3'-phosphate
  modified_base 7: mod_base = OTHER; note = 2'-O-methylguanosine-3'-phosphate
  modified_base 8: mod_base = OTHER; note = 2'-fluoroguanosine-3'-phosphate
  modified_base 9: mod_base = OTHER; note = 2'-fluoroadenosine-3'-phosphate
  modified_base 10: mod_base = OTHER; note = 2'-O-methylguanosine-3'-phosphate
  modified_base 11: mod_base = OTHER; note = 2'-O-methylcytidine-3'-phosphate
  modified_base 12: mod_base = OTHER; note = 2'-O-methyladenosine-3'-phosphate
  modified_base 13: mod_base = OTHER; note = 2'-O-methyluridine-3'-phosphate
  modified_base 14: mod_base = OTHER; note = 2'-fluorocytidine-3'-phosphate
  modified_base 15: mod_base = OTHER; note = 2'-O-methylcytidine-3'-phosphate
  modified_base 16: mod_base = OTHER; note = 2'-fluorouridine-3'-phosphate
  modified_base 17: mod_base = OTHER; note = 2'-O-methyluridine-3'-phosphate
  modified_base 18: mod_base = OTHER; note = 2'-O-methylguanosine-3'-phosphate
  modified_base 19: mod_base = OTHER; note = 2'-O-methylguanosine-3'-phosphate
  modified_base 20: mod_base = OTHER; note = 2'-O-methyladenosine-3'-phosphate
  modified_base 21: mod_base = OTHER; note = 2'-O-methyluridine-3'-phosphorothioate
  modified_base 22: mod_base = OTHER; note = 2'-O-methyladenosine-3'- phosphorothioate
  modified_base 23: mod_base = OTHER; note = 2'-O-methylcytidine-3'-phosphate
cattccggagcatccttggatac

SEQ ID NO: 2360 - RNA, 21 nt, synthetic construct
  misc_feature 1..21: note = Description of Artificial Sequence: Synthetic oligonucleotide
  source 1..21: mol_type = other RNA
  modified_base 1: mod_base = OTHER; note = 2'-O-methyluridine-3'-phosphorothioate
  modified_base 2: mod_base = OTHER; note = 2'-O-methyladenosine-3'- phosphorothioate
  modified_base 3: mod_base = OTHER; note = 2'-O-methyluridine-3'-phosphate
  modified_base 4: mod_base = OTHER; note = 2'-O-methylcytidine-3'-phosphate
  modified_base 5: mod_base = OTHER; note = 2'-O-methylcytidine-3'-phosphate
  modified_base 6: mod_base = OTHER; note = 2'-O-methyladenosine-3'-phosphate
  modified_base 7: mod_base = OTHER; note = 2'-fluoroadenosine-3'-phosphate
  modified_base 8: mod_base = OTHER; note = 2'-O-methylguanosine-3'-phosphate
  modified_base 9: mod_base = OTHER; note = 2'-fluoroguanosine-3'-phosphate
  modified_base 10: mod_base = OTHER; note = 2'-fluoroadenosine-3'-phosphate
  modified_base 11: mod_base = OTHER; note = 2'-fluorouridine-3'-phosphate
  modified_base 12: mod_base = OTHER; note = 2'-O-methylguanosine-3'-phosphate
  modified_base 13: mod_base = OTHER; note = 2'-O-methylcytidine-3'-phosphate
  modified_base 14: mod_base = OTHER; note = 2'-O-methyluridine-3'-phosphate
  modified_base 15: mod_base = OTHER; note = 2'-O-methylcytidine-3'-phosphate
  modified_base 16: mod_base = OTHER; note = 2'-O-methylcytidine-3'-phosphate
  modified_base 17: mod_base = OTHER; note = 2'-O-methylguanosine-3'-phosphate
  modified_base 18: mod_base = OTHER; note = 2'-O-methylguanosine-3'-phosphate
  modified_base 19: mod_base = OTHER; note = 2'-O-methyladenosine-3'-phosphate
  modified_base 20: mod_base = OTHER; note = 2'-O-methyladenosine-3'-phosphate
  modified_base 21: mod_base = OTHER; note = 2'-O-methyluridine-3'-phosphate attached to N-[tris(N-acetylgalactosamine-alkyl)-amidodecanoyl)]-4-hydr oxyprolinol Hyp-(N-acetylgalactosamine-alkyl)3
tatccaaggatgctccggaat

SEQ ID NO: 2361 - RNA, 23 nt, synthetic construct
  misc_feature 1..23: note = Description of Artificial Sequence: Synthetic oligonucleotide
  source 1..23: mol_type = other RNA
  modified_base 1: mod_base = OTHER; note = 2'-O-methyladenosine-3'- phosphorothioate
  modified_base 2: mod_base = OTHER; note = 2'-fluorouridine -3'-phosphorothioate
  modified_base 3: mod_base = OTHER; note = 2'-O-methyluridine-3'-phosphate
  modified_base 4: mod_base = OTHER; note = 2'-O-methylcytidine-3'-phosphate
  modified_base 5: mod_base = OTHER; note = 2'-O-methylcytidine-3'-phosphate
  modified_base 6: mod_base = OTHER; note = 2'-fluoroguanosine-3'-phosphate
  modified_base 7: mod_base = OTHER; note = 2'-O-methylguanosine-3'-phosphate
  modified_base 8: mod_base = OTHER; note = 2'-fluoroadenosine-3'-phosphate
  modified_base 9: mod_base = OTHER; note = 2'-fluoroguanosine-3'-phosphate
  modified_base 10: mod_base = OTHER; note = 2'-O-methylcytidine-3'-phosphate
  modified_base 11: mod_base = OTHER; note = 2'-O-methyladenosine-3'-phosphate
  modified_base 12: mod_base = OTHER; note = 2'-O-methyluridine-3'-phosphate
  modified_base 13: mod_base = OTHER; note = 2'-O-methylcytidine-3'-phosphate
  modified_base 14: mod_base = OTHER; note = 2'-fluorocytidine-3'-phosphate
  modified_base 15: mod_base = OTHER; note = 2'-O-methyluridine-3'-phosphate
  modified_base 16: mod_base = OTHER; note = 2'-fluorouridine-3'-phosphate
  modified_base 17: mod_base = OTHER; note = 2'-O-methylguanosine-3'-phosphate
  modified_base 18: mod_base = OTHER; note = 2'-O-methylguanosine-3'-phosphate
  modified_base 19: mod_base = OTHER; note = 2'-O-methyladenosine-3'-phosphate
  modified_base 20: mod_base = OTHER; note = 2'-O-methyluridine-3'-phosphate
  modified_base 21: mod_base = OTHER; note = 2'-O-methyladenosine-3'- phosphorothioate
  modified_base 22: mod_base = OTHER; note = 2'-O-methylcytidine-3'- phosphorothioate
  modified_base 23: mod_base = OTHER; note = 2'-O-methyladenosine-3'-phosphate
attccggagcatccttggataca

SEQ ID NO: 2362 - RNA, 21 nt, synthetic construct
  misc_feature 1..21: note = Description of Artificial Sequence: Synthetic oligonucleotide
  source 1..21: mol_type = other RNA
  modified_base 1: mod_base = OTHER; note = 2'-O-methyladenosine-3'- phosphorothioate
  modified_base 2: mod_base = OTHER; note = 2'-O-methyladenosine-3'- phosphorothioate
  modified_base 3: mod_base = OTHER; note = 2'-O-methyluridine-3'-phosphate
  modified_base 4: mod_base = OTHER; note = 2'-O-methylguanosine-3'-phosphate
  modified_base 5: mod_base = OTHER; note = 2'-O-methylguanosine-3'-phosphate
  modified_base 6: mod_base = OTHER; note = 2'-O-methylguanosine-3'-phosphate
  modified_base 7: mod_base = OTHER; note = 2'-fluorouridine-3'-phosphate
  modified_base 8: mod_base = OTHER; note = 2'-O-methylguanosine-3'-phosphate
  modified_base 9: mod_base = OTHER; note = 2'-fluoroguanosine-3'-phosphate
  modified_base 10: mod_base = OTHER; note = 2'-fluorocytidine-3'-phosphate
  modified_base 11: mod_base = OTHER; note = 2'-fluoroguanosine-3'-phosphate
  modified_base 12: mod_base = OTHER; note = 2'-O-methylguanosine-3'-phosphate
  modified_base 13: mod_base = OTHER; note = 2'-O-methyluridine-3'-phosphate
  modified_base 14: mod_base = OTHER; note = 2'-O-methyladenosine-3'-phosphate
  modified_base 15: mod_base = OTHER; note = 2'-O-methyladenosine-3'-phosphate
  modified_base 16: mod_base = OTHER; note = 2'-O-methyluridine-3'-phosphate
  modified_base 17: mod_base = OTHER; note = 2'-O-methyluridine-3'-phosphate
  modified_base 18: mod_base = OTHER; note = 2'-O-methylguanosine-3'-phosphate
  modified_base 19: mod_base = OTHER; note = 2'-O-methylguanosine-3'-phosphate
  modified_base 20: mod_base = OTHER; note = 2'-O-methyluridine-3'-phosphate
  modified_base 21: mod_base = OTHER; note = 2'-O-methylguanosine-3'-phosphate attached to N-[tris(N-acetylgalactosamine-alkyl)-amidodecanoyl)]-4-hydr oxyprolinol Hyp-(N-acetylgalactosamine-alkyl)3
aatgggtggcggtaattggtg

SEQ ID NO: 2363 - RNA, 23 nt, synthetic construct
  misc_feature 1..23: note = Description of Artificial Sequence: Synthetic oligonucleotide
  source 1..23: mol_type = other RNA
  modified_base 1: mod_base = OTHER; note = 2'-O-methylcytidine-3'- phosphorothioate
  modified_base 2: mod_base = OTHER; note = 2'-fluoroadenosine-3'-phosphorothioate
  modified_base 3: mod_base = OTHER; note = 2'-O-methylcytidine-3'-phosphate
  modified_base 4: mod_base = OTHER; note = 2'-O-methylcytidine-3'-phosphate
  modified_base 5: mod_base = OTHER; note = 2'-O-methyladenosine-3'-phosphate
  modified_base 6: mod_base = OTHER; note = 2'-fluoroadenosine-3'-phosphate
  modified_base 7: mod_base = OTHER; note = 2'-O-methyluridine-3'-phosphate
  modified_base 8: mod_base = OTHER; note = 2'-fluorouridine-3'-phosphate
  modified_base 9: mod_base = OTHER; note = 2'-fluoroadenosine-3'-phosphate
  modified_base 10: mod_base = OTHER; note = 2'-O-methylcytidine-3'-phosphate
  modified_base 11: mod_base = OTHER; note = 2'-O-methylcytidine-3'-phosphate
  modified_base 12: mod_base = OTHER; note = 2'-O-methylguanosine-3'-phosphate
  modified_base 13: mod_base = OTHER; note = 2'-O-methylcytidine-3'-phosphate
  modified_base 14: mod_base = OTHER; note = 2'-fluorocytidine-3'-phosphate
  modified_base 15: mod_base = OTHER; note = 2'-O-methyladenosine-3'-phosphate
  modified_base 16: mod_base = OTHER; note = 2'-fluorocytidine-3'-phosphate
  modified_base 17: mod_base = OTHER; note = 2'-O-methylcytidine-3'-phosphate
  modified_base 18: mod_base = OTHER; note = 2'-O-methylcytidine-3'-phosphate
  modified_base 19: mod_base = OTHER; note = 2'-O-methyladenosine-3'-phosphate
  modified_base 20: mod_base = OTHER; note = 2'-O-methyluridine-3'-phosphate
  modified_base 21: mod_base = OTHER; note = 2'-O-methyluridine-3'-phosphorothioate
  modified_base 22: mod_base = OTHER; note = 2'-O-methylcytidine-3'- phosphorothioate
  modified_base 23: mod_base = OTHER; note = 2'-O-methylcytidine-3'-phosphate
caccaattaccgccacccattcc

SEQ ID NO: 2364 - RNA, 21 nt, synthetic construct
  misc_feature 1..21: note = Description of Artificial Sequence: Synthetic oligonucleotide
  source 1..21: mol_type = other RNA
  modified_base 1: mod_base = OTHER; note = 2'-O-methyladenosine-3'- phosphorothioate
  modified_base 2: mod_base = OTHER; note = 2'-O-methyluridine-3'-phosphorothioate
  modified_base 3: mod_base = OTHER; note = 2'-O-methylguanosine-3'-phosphate
  modified_base 4: mod_base = OTHER; note = 2'-O-methylguanosine-3'-phosphate
  modified_base 5: mod_base = OTHER; note = 2'-O-methylguanosine-3'-phosphate
  modified_base 6: mod_base = OTHER; note = 2'-O-methyluridine-3'-phosphate
  modified_base 7: mod_base = OTHER; note = 2'-fluoroguanosine-3'-phosphate
  modified_base 8: mod_base = OTHER; note = 2'-O-methylguanosine-3'-phosphate
  modified_base 9: mod_base = OTHER; note = 2'-fluorocytidine-3'-phosphate
  modified_base 10: mod_base = OTHER; note = 2'-fluoroguanosine-3'-phosphate
  modified_base 11: mod_base = OTHER; note = 2'-fluoroguanosine-3'-phosphate
  modified_base 12: mod_base = OTHER; note = 2'-O-methyluridine-3'-phosphate
  modified_base 13: mod_base = OTHER; note = 2'-O-methyladenosine-3'-phosphate
  modified_base 14: mod_base = OTHER; note = 2'-O-methyladenosine-3'-phosphate
  modified_base 15: mod_base = OTHER; note = 2'-O-methyluridine-3'-phosphate
  modified_base 16: mod_base = OTHER; note = 2'-O-methyluridine-3'-phosphate
  modified_base 17: mod_base = OTHER; note = 2'-O-methylguanosine-3'-phosphate
  modified_base 18: mod_base = OTHER; note = 2'-O-methylguanosine-3'-phosphate
  modified_base 19: mod_base = OTHER; note = 2'-O-methyluridine-3'-phosphate
  modified_base 20: mod_base = OTHER; note = 2'-O-methylguanosine-3'-phosphate
  modified_base 21: mod_base = OTHER; note = 2'-O-methyladenosine-3'-phosphate attached to N-[tris(N-acetylgalactosamine-alkyl)-amidodecanoyl)]-4-hydr oxyprolinol Hyp-(N-acetylgalactosamine-alkyl)3
atgggtggcggtaattggtga

SEQ ID NO: 2365 - RNA, 23 nt, synthetic construct
  misc_feature 1..23: note = Description of Artificial Sequence: Synthetic oligonucleotide
  source 1..23: mol_type = other RNA
  modified_base 1: mod_base = OTHER; note = 2'-O-methyluridine-3'-phosphorothioate
  modified_base 2: mod_base = OTHER; note = 2'-fluorocytidine-3'-phosphorothioate
  modified_base 3: mod_base = OTHER; note = 2'-O-methyladenosine-3'-phosphate
  modified_base 4: mod_base = OTHER; note = 2'-O-methylcytidine-3'-phosphate
  modified_base 5: mod_base = OTHER; note = 2'-O-methylcytidine-3'-phosphate
  modified_base 6: mod_base = OTHER; note = 2'-fluoroadenosine-3'-phosphate
  modified_base 7: mod_base = OTHER; note = 2'-O-methyladenosine-3'-phosphate
  modified_base 8: mod_base = OTHER; note = 2'-fluorouridine-3'-phosphate
  modified_base 9: mod_base = OTHER; note = 2'-fluorouridine-3'-phosphate
  modified_base 10: mod_base = OTHER; note = 2'-O-methyladenosine-3'-phosphate
  modified_base 11: mod_base = OTHER; note = 2'-O-methylcytidine-3'-phosphate
  modified_base 12: mod_base = OTHER; note = 2'-O-methylcytidine-3'-phosphate
  modified_base 13: mod_base = OTHER; note = 2'-O-methylguanosine-3'-phosphate
  modified_base 14: mod_base = OTHER; note = 2'-fluorocytidine-3'-phosphate
  modified_base 15: mod_base = OTHER; note = 2'-O-methylcytidine-3'-phosphate
  modified_base 16: mod_base = OTHER; note = 2'-fluoroadenosine-3'-phosphate
  modified_base 17: mod_base = OTHER; note = 2'-O-methylcytidine-3'-phosphate
  modified_base 18: mod_base = OTHER; note = 2'-O-methylcytidine-3'-phosphate
  modified_base 19: mod_base = OTHER; note = 2'-O-methylcytidine-3'-phosphate
  modified_base 20: mod_base = OTHER; note = 2'-O-methyladenosine-3'-phosphate
  modified_base 21: mod_base = OTHER; note = 2'-O-methyluridine-3'-phosphorothioate
  modified_base 22: mod_base = OTHER; note = 2'-O-methyluridine-3'-phosphorothioate
  modified_base 23: mod_base = OTHER; note = 2'-O-methylcytidine-3'-phosphate
tcaccaattaccgccacccattc

SEQ ID NO: 2366 - RNA, 21 nt, synthetic construct
  misc_feature 1..21: note = Description of Artificial Sequence: Synthetic oligonucleotide
  source 1..21: mol_type = other RNA
  modified_base 1: mod_base = OTHER; note = 2'-O-methyluridine-3'-phosphorothioate
  modified_base 2: mod_base = OTHER; note = 2'-O-methyluridine-3'-phosphorothioate
  modified_base 3: mod_base = OTHER; note = 2'-O-methylguanosine-3'-phosphate
  modified_base 4: mod_base = OTHER; note = 2'-O-methylguanosine-3'-phosphate
  modified_base 5: mod_base = OTHER; note = 2'-O-methyladenosine-3'-phosphate
  modified_base 6: mod_base = OTHER; note = 2'-O-methyladenosine-3'-phosphate
  modified_base 7: mod_base = OTHER; note = 2'-fluorouridine-3'-phosphate
  modified_base 8: mod_base = OTHER; note = 2'-O-methylguanosine-3'-phosphate
  modified_base 9: mod_base = OTHER; note = 2'-fluoroguanosine-3'-phosphate
  modified_base 10: mod_base = OTHER; note = 2'-fluoroguanosine-3'-phosphate
  modified_base 11: mod_base = OTHER; note = 2'-fluorouridine-3'-phosphate
  modified_base 12: mod_base = OTHER; note = 2'-O-methylguanosine-3'-phosphate
  modified_base 13: mod_base = OTHER; note = 2'-O-methylguanosine-3'-phosphate
  modified_base 14: mod_base = OTHER; note = 2'-O-methylcytidine-3'-phosphate
  modified_base 15: mod_base = OTHER; note = 2'-O-methylguanosine-3'-phosphate
  modified_base 16: mod_base = OTHER; note = 2'-O-methylguanosine-3'-phosphate
  modified_base 17: mod_base = OTHER; note = 2'-O-methyluridine-3'-phosphate
  modified_base 18: mod_base = OTHER; note = 2'-O-methyladenosine-3'-phosphate
  modified_base 19: mod_base = OTHER; note = 2'-O-methyladenosine-3'-phosphate
  modified_base 20: mod_base = OTHER; note = 2'-O-methyluridine-3'-phosphate
  modified_base 21: mod_base = OTHER; note = 2'-O-methyluridine-3'-phosphate attached to N-[tris(N-acetylgalactosamine-alkyl)-amidodecanoyl)]-4-hydr oxyprolinol Hyp-(N-acetylgalactosamine-alkyl)3
ttggaatgggtggcggtaatt

SEQ ID NO: 2367 - RNA, 23 nt, synthetic construct
  misc_feature 1..23: note = Description of Artificial Sequence: Synthetic oligonucleotide
  source 1..23: mol_type = other RNA
  modified_base 1: mod_base = OTHER; note = 2'-O-methyladenosine-3'- phosphorothioate
  modified_base 2: mod_base = OTHER; note = 2'-fluoroadenosine-3'-phosphorothioate
  modified_base 3: mod_base = OTHER; note = 2'-O-methyluridine-3'-phosphate
  modified_base 4: mod_base = OTHER; note = 2'-O-methyluridine-3'-phosphate
  modified_base 5: mod_base = OTHER; note = 2'-O-methyladenosine-3'-phosphate
  modified_base 6: mod_base = OTHER; note = 2'-fluorocytidine-3'-phosphate
  modified_base 7: mod_base = OTHER; note = 2'-O-methylcytidine-3'-phosphate
  modified_base 8: mod_base = OTHER; note = 2'-fluoroguanosine-3'-phosphate
  modified_base 9: mod_base = OTHER; note = 2'-fluorocytidine-3'-phosphate
  modified_base 10: mod_base = OTHER; note = 2'-O-methylcytidine-3'-phosphate
  modified_base 11: mod_base = OTHER; note = 2'-O-methyladenosine-3'-phosphate
  modified_base 12: mod_base = OTHER; note = 2'-O-methylcytidine-3'-phosphate
  modified_base 13: mod_base = OTHER; note = 2'-O-methylcytidine-3'-phosphate
  modified_base 14: mod_base = OTHER; note = 2'-fluorocytidine-3'-phosphate
  modified_base 15: mod_base = OTHER; note = 2'-O-methyladenosine-3'-phosphate
  modified_base 16: mod_base = OTHER; note = 2'-fluorouridine-3'-phosphate
  modified_base 17: mod_base = OTHER; note = 2'-O-methyluridine-3'-phosphate
  modified_base 18: mod_base = OTHER; note = 2'-O-methylcytidine-3'-phosphate
  modified_base 19: mod_base = OTHER; note = 2'-O-methylcytidine-3'-phosphate
  modified_base 20: mod_base = OTHER; note = 2'-O-methyladenosine-3'-phosphate
  modified_base 21: mod_base = OTHER; note = 2'-O-methyladenosine-3'- phosphorothioate
  modified_base 22: mod_base = OTHER; note = 2'-O-methyluridine-3'-phosphorothioate
  modified_base 23: mod_base = OTHER; note = 2'-O-methyluridine-3'-phosphate
aattaccgccacccattccaatt

SEQ ID NO: 2368 - RNA, 21 nt, synthetic construct
  misc_feature 1..21: note = Description of Artificial Sequence: Synthetic oligonucleotide
  source 1..21: mol_type = other RNA
  modified_base 1: mod_base = OTHER; note = 2'-O-methyladenosine-3'- phosphorothioate
  modified_base 2: mod_base = OTHER; note = 2'-O-methyluridine-3'-phosphorothioate
  modified_base 3: mod_base = OTHER; note = 2'-O-methyluridine-3'-phosphate
  modified_base 4: mod_base = OTHER; note = 2'-O-methylguanosine-3'-phosphate
  modified_base 5: mod_base = OTHER; note = 2'-O-methylguanosine-3'-phosphate
  modified_base 6: mod_base = OTHER; note = 2'-O-methyladenosine-3'-phosphate
  modified_base 7: mod_base = OTHER; note = 2'-fluoroadenosine-3'-phosphate
  modified_base 8: mod_base = OTHER; note = 2'-O-methyluridine-3'-phosphate
  modified_base 9: mod_base = OTHER; note = 2'-fluoroguanosine-3'-phosphate
  modified_base 10: mod_base = OTHER; note = 2'-fluoroguanosine-3'-phosphate
  modified_base 11: mod_base = OTHER; note = 2'-fluoroguanosine-3'-phosphate
  modified_base 12: mod_base = OTHER; note = 2'-O-methyluridine-3'-phosphate
  modified_base 13: mod_base = OTHER; note = 2'-O-methylguanosine-3'-phosphate
  modified_base 14: mod_base = OTHER; note = 2'-O-methylguanosine-3'-phosphate
  modified_base 15: mod_base = OTHER; note = 2'-O-methylcytidine-3'-phosphate
  modified_base 16: mod_base = OTHER; note = 2'-O-methylguanosine-3'-phosphate
  modified_base 17: mod_base = OTHER; note = 2'-O-methylguanosine-3'-phosphate
  modified_base 18: mod_base = OTHER; note = 2'-O-methyluridine-3'-phosphate
  modified_base 19: mod_base = OTHER; note = 2'-O-methyladenosine-3'-phosphate
  modified_base 20: mod_base = OTHER; note = 2'-O-methyladenosine-3'-phosphate
  modified_base 21: mod_base = OTHER; note = 2'-O-methyluridine-3'-phosphate attached to N-[tris(N-acetylgalactosamine-alkyl)-amidodecanoyl)]-4-hydr oxyprolinol Hyp-(N-acetylgalactosamine-alkyl)3
attggaatgggtggcggtaat

SEQ ID NO: 2369 - RNA, 23 nt, synthetic construct
  misc_feature 1..23: note = Description of Artificial Sequence: Synthetic oligonucleotide
  source 1..23: mol_type = other RNA
  modified_base 1: mod_base = OTHER; note = 2'-O-methyladenosine-3'- phosphorothioate
  modified_base 2: mod_base = OTHER; note = 2'-fluorouridine -3'-phosphorothioate
  modified_base 3: mod_base = OTHER; note = 2'-O-methyluridine-3'-phosphate
  modified_base 4: mod_base = OTHER; note = 2'-O-methyladenosine-3'-phosphate
  modified_base 5: mod_base = OTHER; note = 2'-O-methylcytidine-3'-phosphate
  modified_base 6: mod_base = OTHER; note = 2'-fluorocytidine-3'-phosphate
  modified_base 7: mod_base = OTHER; note = 2'-O-methylguanosine-3'-phosphate
  modified_base 8: mod_base = OTHER; note = 2'-fluorocytidine-3'-phosphate
  modified_base 9: mod_base = OTHER; note = 2'-fluorocytidine-3'-phosphate
  modified_base 10: mod_base = OTHER; note = 2'-O-methyladenosine-3'-phosphate
  modified_base 11: mod_base = OTHER; note = 2'-O-methylcytidine-3'-phosphate
  modified_base 12: mod_base = OTHER; note = 2'-O-methylcytidine-3'-phosphate
  modified_base 13: mod_base = OTHER; note = 2'-O-methylcytidine-3'-phosphate
  modified_base 14: mod_base = OTHER; note = 2'-fluoroadenosine-3'-phosphate
  modified_base 15: mod_base = OTHER; note = 2'-O-methyluridine-3'-phosphate
  modified_base 16: mod_base = OTHER; note = 2'-fluorouridine-3'-phosphate
  modified_base 17: mod_base = OTHER; note = 2'-O-methylcytidine-3'-phosphate
  modified_base 18: mod_base = OTHER; note = 2'-O-methylcytidine-3'-phosphate
  modified_base 19: mod_base = OTHER; note = 2'-O-methyladenosine-3'-phosphate
  modified_base 20: mod_base = OTHER; note = 2'-O-methyladenosine-3'-phosphate
  modified_base 21: mod_base = OTHER; note = 2'-O-methyluridine-3'-phosphorothioate
  modified_base 22: mod_base = OTHER; note = 2'-O-methyluridine-3'-phosphorothioate
  modified_base 23: mod_base = OTHER; note = 2'-O-methylcytidine-3'-phosphate
attaccgccacccattccaattc

SEQ ID NO: 2370 - RNA, 21 nt, synthetic construct
  misc_feature 1..21: note = Description of Artificial Sequence: Synthetic oligonucleotide
  source 1..21: mol_type = other RNA
  modified_base 1: mod_base = OTHER; note = 2'-O-methylguanosine-3'- phosphorothioate
  modified_base 2: mod_base = OTHER; note = 2'-O-methylguanosine-3'- phosphorothioate
  modified_base 3: mod_base = OTHER; note = 2'-O-methyladenosine-3'-phosphate
  modified_base 4: mod_base = OTHER; note = 2'-O-methyladenosine-3'-phosphate
  modified_base 5: mod_base = OTHER; note = 2'-O-methyladenosine-3'-phosphate
  modified_base 6: mod_base = OTHER; note = 2'-O-methylguanosine-3'-phosphate
  modified_base 7: mod_base = OTHER; note = 2'-fluoroguanosine-3'-phosphate
  modified_base 8: mod_base = OTHER; note = 2'-O-methylcytidine-3'-phosphate
  modified_base 9: mod_base = OTHER; note = 2'-fluoroadenosine-3'-phosphate
  modified_base 10: mod_base = OTHER; note = 2'-fluorocytidine-3'-phosphate
  modified_base 11: mod_base = OTHER; note = 2'-fluorouridine-3'-phosphate
  modified_base 12: mod_base = OTHER; note = 2'-O-methylguanosine-3'-phosphate
  modified_base 13: mod_base = OTHER; note = 2'-O-methyladenosine-3'-phosphate
  modified_base 14: mod_base = OTHER; note = 2'-O-methyluridine-3'-phosphate
  modified_base 15: mod_base = OTHER; note = 2'-O-methylguanosine-3'-phosphate
  modified_base 16: mod_base = OTHER; note = 2'-O-methyluridine-3'-phosphate
  modified_base 17: mod_base = OTHER; note = 2'-O-methyluridine-3'-phosphate
  modified_base 18: mod_base = OTHER; note = 2'-O-methylcytidine-3'-phosphate
  modified_base 19: mod_base = OTHER; note = 2'-O-methyluridine-3'-phosphate
  modified_base 20: mod_base = OTHER; note = 2'-O-methylguanosine-3'-phosphate
  modified_base 21: mod_base = OTHER; note = 2'-O-methyladenosine-3'-phosphate attached to N-[tris(N-acetylgalactosamine-alkyl)-amidodecanoyl)]-4-hydr oxyprolinol Hyp-(N-acetylgalactosamine-alkyl)3
ggaaaggcactgatgttctga

SEQ ID NO: 2371 - RNA, 23 nt, synthetic construct
  misc_feature 1..23: note = Description of Artificial Sequence: Synthetic oligonucleotide
  source 1..23: mol_type = other RNA
  modified_base 1: mod_base = OTHER; note = 2'-O-methyluridine-3'-phosphorothioate
  modified_base 2: mod_base = OTHER; note = 2'-fluorocytidine-3'-phosphorothioate
  modified_base 3: mod_base = OTHER; note = 2'-O-methyladenosine-3'-phosphate
  modified_base 4: mod_base = OTHER; note = 2'-O-methylguanosine-3'-phosphate
  modified_base 5: mod_base = OTHER; note = 2'-O-methyladenosine-3'-phosphate
  modified_base 6: mod_base = OTHER; note = 2'-fluoroadenosine-3'-phosphate
  modified_base 7: mod_base = OTHER; note = 2'-O-methylcytidine-3'-phosphate
  modified_base 8: mod_base = OTHER; note = 2'-fluoroadenosine-3'-phosphate
  modified_base 9: mod_base = OTHER; note = 2'-fluorouridine-3'-phosphate
  modified_base 10: mod_base = OTHER; note = 2'-O-methylcytidine-3'-phosphate
  modified_base 11: mod_base = OTHER; note = 2'-O-methyladenosine-3'-phosphate
  modified_base 12: mod_base = OTHER; note = 2'-O-methylguanosine-3'-phosphate
  modified_base 13: mod_base = OTHER; note = 2'-O-methyluridine-3'-phosphate
  modified_base 14: mod_base = OTHER; note = 2'-fluoroguanosine-3'-phosphate
  modified_base 15: mod_base = OTHER; note = 2'-O-methylcytidine-3'-phosphate
  modified_base 16: mod_base = OTHER; note = 2'-fluorocytidine-3'-phosphate
  modified_base 17: mod_base = OTHER; note = 2'-O-methyluridine-3'-phosphate
  modified_base 18: mod_base = OTHER; note = 2'-O-methyluridine-3'-phosphate
  modified_base 19: mod_base = OTHER; note = 2'-O-methyluridine-3'-phosphate
  modified_base 20: mod_base = OTHER; note = 2'-O-methylcytidine-3'-phosphate
  modified_base 21: mod_base = OTHER; note = 2'-O-methylcytidine-3'- phosphorothioate
  modified_base 22: mod_base = OTHER; note = 2'-O-methylguanosine-3'- phosphorothioate
  modified_base 23: mod_base = OTHER; note = 2'-O-methylcytidine-3'-phosphate
tcagaacatcagtgcctttccgc

SEQ ID NO: 2372 - RNA, 21 nt, synthetic construct
  misc_feature 1..21: note = Description of Artificial Sequence: Synthetic oligonucleotide
  source 1..21: mol_type = other RNA
  modified_base 1: mod_base = OTHER; note = 2'-O-methylguanosine-3'- phosphorothioate
  modified_base 2: mod_base = OTHER; note = 2'-O-methyladenosine-3'- phosphorothioate
  modified_base 3: mod_base = OTHER; note = 2'-O-methyladenosine-3'-phosphate
  modified_base 4: mod_base = OTHER; note = 2'-O-methyladenosine-3'-phosphate
  modified_base 5: mod_base = OTHER; note = 2'-O-methylguanosine-3'-phosphate
  modified_base 6: mod_base = OTHER; note = 2'-O-methylguanosine-3'-phosphate
  modified_base 7: mod_base = OTHER; note = 2'-fluorocytidine-3'-phosphate
  modified_base 8: mod_base = OTHER; note = 2'-O-methyladenosine-3'-phosphate
  modified_base 9: mod_base = OTHER; note = 2'-fluorocytidine-3'-phosphate
  modified_base 10: mod_base = OTHER; note = 2'-fluorouridine-3'-phosphate
  modified_base 11: mod_base = OTHER; note = 2'-fluoroguanosine-3'-phosphate
  modified_base 12: mod_base = OTHER; note = 2'-O-methyladenosine-3'-phosphate
  modified_base 13: mod_base = OTHER; note = 2'-O-methyluridine-3'-phosphate
  modified_base 14: mod_base = OTHER; note = 2'-O-methylguanosine-3'-phosphate
  modified_base 15: mod_base = OTHER; note = 2'-O-methyluridine-3'-phosphate
  modified_base 16: mod_base = OTHER; note = 2'-O-methyluridine-3'-phosphate
  modified_base 17: mod_base = OTHER; note = 2'-O-methylcytidine-3'-phosphate
  modified_base 18: mod_base = OTHER; note = 2'-O-methyluridine-3'-phosphate
  modified_base 19: mod_base = OTHER; note = 2'-O-methylguanosine-3'-phosphate
  modified_base 20: mod_base = OTHER; note = 2'-O-methyladenosine-3'-phosphate
  modified_base 21: mod_base = OTHER; note = 2'-O-methyladenosine-3'-phosphate attached to N-[tris(N-acetylgalactosamine-alkyl)-amidodecanoyl)]-4-hydr oxyprolinol Hyp-(N-acetylgalactosamine-alkyl)3
gaaaggcactgatgttctgaa

SEQ ID NO: 2373 - RNA, 23 nt, synthetic construct
  misc_feature 1..23: note = Description of Artificial Sequence: Synthetic oligonucleotide
  source 1..23: mol_type = other RNA
  modified_base 1: mod_base = OTHER; note = 2'-O-methyluridine-3'-phosphorothioate
  modified_base 2: mod_base = OTHER; note = 2'-fluorouridine -3'-phosphorothioate
  modified_base 3: mod_base = OTHER; note = 2'-O-methylcytidine-3'-phosphate
  modified_base 4: mod_base = OTHER; note = 2'-O-methyladenosine-3'-phosphate
  modified_base 5: mod_base = OTHER; note = 2'-O-methylguanosine-3'-phosphate
  modified_base 6: mod_base = OTHER; note = 2'-fluoroadenosine-3'-phosphate
  modified_base 7: mod_base = OTHER; note = 2'-O-methyladenosine-3'-phosphate
  modified_base 8: mod_base = OTHER; note = 2'-fluorocytidine-3'-phosphate
  modified_base 9: mod_base = OTHER; note = 2'-fluoroadenosine-3'-phosphate
  modified_base 10: mod_base = OTHER; note = 2'-O-methyluridine-3'-phosphate
  modified_base 11: mod_base = OTHER; note = 2'-O-methylcytidine-3'-phosphate
  modified_base 12: mod_base = OTHER; note = 2'-O-methyladenosine-3'-phosphate
  modified_base 13: mod_base = OTHER; note = 2'-O-methylguanosine-3'-phosphate
  modified_base 14: mod_base = OTHER; note = 2'-fluorouridine-3'-phosphate
  modified_base 15: mod_base = OTHER; note = 2'-O-methylguanosine-3'-phosphate
  modified_base 16: mod_base = OTHER; note = 2'-fluorocytidine-3'-phosphate
  modified_base 17: mod_base = OTHER; note = 2'-O-methylcytidine-3'-phosphate
  modified_base 18: mod_base = OTHER; note = 2'-O-methyluridine-3'-phosphate
  modified_base 19: mod_base = OTHER; note = 2'-O-methyluridine-3'-phosphate
  modified_base 20: mod_base = OTHER; note = 2'-O-methyluridine-3'-phosphate
  modified_base 21: mod_base = OTHER; note = 2'-O-methylcytidine-3'- phosphorothioate
  modified_base 22: mod_base = OTHER; note = 2'-O-methylcytidine-3'- phosphorothioate
  modified_base 23: mod_base = OTHER; note = 2'-O-methylguanosine-3'-phosphate
ttcagaacatcagtgcctttccg

SEQ ID NO: 2374 - RNA, 21 nt, synthetic construct
  misc_feature 1..21: note = Description of Artificial Sequence: Synthetic oligonucleotide
  source 1..21: mol_type = other RNA
  modified_base 1: mod_base = OTHER; note = 2'-O-methylguanosine-3'- phosphorothioate
  modified_base 2: mod_base = OTHER; note = 2'-O-methyluridine-3'-phosphorothioate
  modified_base 3: mod_base = OTHER; note = 2'-O-methylguanosine-3'-phosphate
  modified_base 4: mod_base = OTHER; note = 2'-O-methylcytidine-3'-phosphate
  modified_base 5: mod_base = OTHER; note = 2'-O-methylguanosine-3'-phosphate
  modified_base 6: mod_base = OTHER; note = 2'-O-methylguanosine-3'-phosphate
  modified_base 7: mod_base = OTHER; note = 2'-fluoroadenosine-3'-phosphate
  modified_base 8: mod_base = OTHER; note = 2'-O-methyladenosine-3'-phosphate
  modified_base 9: mod_base = OTHER; note = 2'-fluoroadenosine-3'-phosphate
  modified_base 10: mod_base = OTHER; note = 2'-fluoroguanosine-3'-phosphate
  modified_base 11: mod_base = OTHER; note = 2'-fluoroguanosine-3'-phosphate
  modified_base 12: mod_base = OTHER; note = 2'-O-methylcytidine-3'-phosphate
  modified_base 13: mod_base = OTHER; note = 2'-O-methyladenosine-3'-phosphate
  modified_base 14: mod_base = OTHER; note = 2'-O-methylcytidine-3'-phosphate
  modified_base 15: mod_base = OTHER; note = 2'-O-methyluridine-3'-phosphate
  modified_base 16: mod_base = OTHER; note = 2'-O-methylguanosine-3'-phosphate
  modified_base 17: mod_base = OTHER; note = 2'-O-methyladenosine-3'-phosphate
  modified_base 18: mod_base = OTHER; note = 2'-O-methyluridine-3'-phosphate
  modified_base 19: mod_base = OTHER; note = 2'-O-methylguanosine-3'-phosphate
  modified_base 20: mod_base = OTHER; note = 2'-O-methyluridine-3'-phosphate
  modified_base 21: mod_base = OTHER; note = 2'-O-methyluridine-3'-phosphate attached to N-[tris(N-acetylgalactosamine-alkyl)-amidodecanoyl)]-4-hydr oxyprolinol Hyp-(N-acetylgalactosamine-alkyl)3
gtgcggaaaggcactgatgtt

SEQ ID NO: 2375 - RNA, 23 nt, synthetic construct
  misc_feature 1..23: note = Description of Artificial Sequence: Synthetic oligonucleotide
  source 1..23: mol_type = other RNA
  modified_base 1: mod_base = OTHER; note = 2'-O-methyladenosine-3'- phosphorothioate
  modified_base 2: mod_base = OTHER; note = 2'-fluoroadenosine-3'-phosphorothioate
  modified_base 3: mod_base = OTHER; note = 2'-O-methylcytidine-3'-phosphate
  modified_base 4: mod_base = OTHER; note = 2'-O-methyladenosine-3'-phosphate
  modified_base 5: mod_base = OTHER; note = 2'-O-methyluridine-3'-phosphate
  modified_base 6: mod_base = OTHER; note = 2'-fluorocytidine-3'-phosphate
  modified_base 7: mod_base = OTHER; note = 2'-O-methyladenosine-3'-phosphate
  modified_base 8: mod_base = OTHER; note = 2'-fluoroguanosine-3'-phosphate
  modified_base 9: mod_base = OTHER; note = 2'-fluorouridine-3'-phosphate
  modified_base 10: mod_base = OTHER; note = 2'-O-methylguanosine-3'-phosphate
  modified_base 11: mod_base = OTHER; note = 2'-O-methylcytidine-3'-phosphate
  modified_base 12: mod_base = OTHER; note = 2'-O-methylcytidine-3'-phosphate
  modified_base 13: mod_base = OTHER; note = 2'-O-methyluridine-3'-phosphate
  modified_base 14: mod_base = OTHER; note = 2'-fluorouridine-3'-phosphate
  modified_base 15: mod_base = OTHER; note = 2'-O-methyluridine-3'-phosphate
  modified_base 16: mod_base = OTHER; note = 2'-fluorocytidine-3'-phosphate
  modified_base 17: mod_base = OTHER; note = 2'-O-methylcytidine-3'-phosphate
  modified_base 18: mod_base = OTHER; note = 2'-O-methylguanosine-3'-phosphate
  modified_base 19: mod_base = OTHER; note = 2'-O-methylcytidine-3'-phosphate
  modified_base 20: mod_base = OTHER; note = 2'-O-methyladenosine-3'-phosphate
  modified_base 21: mod_base = OTHER; note = 2'-O-methylcytidine-3'- phosphorothioate
  modified_base 22: mod_base = OTHER; note = 2'-O-methyladenosine-3'- phosphorothioate
  modified_base 23: mod_base = OTHER; note = 2'-O-methylcytidine-3'-phosphate
aacatcagtgcctttccgcacac

SEQ ID NO: 2376 - RNA, 21 nt, synthetic construct
  misc_feature 1..21: note = Description of Artificial Sequence: Synthetic oligonucleotide
  source 1..21: mol_type = other RNA
  modified_base 1: mod_base = OTHER; note = 2'-O-methyluridine-3'-phosphorothioate
  modified_base 2: mod_base = OTHER; note = 2'-O-methylguanosine-3'- phosphorothioate
  modified_base 3: mod_base = OTHER; note = 2'-O-methyluridine-3'-phosphate
  modified_base 4: mod_base = OTHER; note = 2'-O-methylguanosine-3'-phosphate
  modified_base 5: mod_base = OTHER; note = 2'-O-methylcytidine-3'-phosphate
  modified_base 6: mod_base = OTHER; note = 2'-O-methylguanosine-3'-phosphate
  modified_base 7: mod_base = OTHER; note = 2'-fluoroguanosine-3'-phosphate
  modified_base 8: mod_base = OTHER; note = 2'-O-methyladenosine-3'-phosphate
  modified_base 9: mod_base = OTHER; note = 2'-fluoroadenosine-3'-phosphate
  modified_base 10: mod_base = OTHER; note = 2'-fluoroadenosine-3'-phosphate
  modified_base 11: mod_base = OTHER; note = 2'-fluoroguanosine-3'-phosphate
  modified_base 12: mod_base = OTHER; note = 2'-O-methylguanosine-3'-phosphate
  modified_base 13: mod_base = OTHER; note = 2'-O-methylcytidine-3'-phosphate
  modified_base 14: mod_base = OTHER; note = 2'-O-methyladenosine-3'-phosphate
  modified_base 15: mod_base = OTHER; note = 2'-O-methylcytidine-3'-phosphate
  modified_base 16: mod_base = OTHER; note = 2'-O-methyluridine-3'-phosphate
  modified_base 17: mod_base = OTHER; note = 2'-O-methylguanosine-3'-phosphate
  modified_base 18: mod_base = OTHER; note = 2'-O-methyladenosine-3'-phosphate
  modified_base 19: mod_base = OTHER; note = 2'-O-methyluridine-3'-phosphate
  modified_base 20: mod_base = OTHER; note = 2'-O-methylguanosine-3'-phosphate
  modified_base 21: mod_base = OTHER; note = 2'-O-methyluridine-3'-phosphate attached to N-[tris(N-acetylgalactosamine-alkyl)-amidodecanoyl)]-4-hydr oxyprolinol Hyp-(N-acetylgalactosamine-alkyl)3
tgtgcggaaaggcactgatgt

SEQ ID NO: 2377 - RNA, 23 nt, synthetic construct
  misc_feature 1..23: note = Description of Artificial Sequence: Synthetic oligonucleotide
  source 1..23: mol_type = other RNA
  modified_base 1: mod_base = OTHER; note = 2'-O-methyladenosine-3'- phosphorothioate
  modified_base 2: mod_base = OTHER; note = 2'-fluorocytidine-3'-phosphorothioate
  modified_base 3: mod_base = OTHER; note = 2'-O-methyladenosine-3'-phosphate
  modified_base 4: mod_base = OTHER; note = 2'-O-methyluridine-3'-phosphate
  modified_base 5: mod_base = OTHER; note = 2'-O-methylcytidine-3'-phosphate
  modified_base 6: mod_base = OTHER; note = 2'-fluoroadenosine-3'-phosphate
  modified_base 7: mod_base = OTHER; note = 2'-O-methylguanosine-3'-phosphate
  modified_base 8: mod_base = OTHER; note = 2'-fluorouridine-3'-phosphate
  modified_base 9: mod_base = OTHER; note = 2'-fluoroguanosine-3'-phosphate
  modified_base 10: mod_base = OTHER; note = 2'-O-methylcytidine-3'-phosphate
  modified_base 11: mod_base = OTHER; note = 2'-O-methylcytidine-3'-phosphate
  modified_base 12: mod_base = OTHER; note = 2'-O-methyluridine-3'-phosphate
  modified_base 13: mod_base = OTHER; note = 2'-O-methyluridine-3'-phosphate
  modified_base 14: mod_base = OTHER; note = 2'-fluorouridine-3'-phosphate
  modified_base 15: mod_base = OTHER; note = 2'-O-methylcytidine-3'-phosphate
  modified_base 16: mod_base = OTHER; note = 2'-fluorocytidine-3'-phosphate
  modified_base 17: mod_base = OTHER; note = 2'-O-methylguanosine-3'-phosphate
  modified_base 18: mod_base = OTHER; note = 2'-O-methylcytidine-3'-phosphate
  modified_base 19: mod_base = OTHER; note = 2'-O-methyladenosine-3'-phosphate
  modified_base 20: mod_base = OTHER; note = 2'-O-methylcytidine-3'-phosphate
  modified_base 21: mod_base = OTHER; note = 2'-O-methyladenosine-3'- phosphorothioate
  modified_base 22: mod_base = OTHER; note = 2'-O-methylcytidine-3'- phosphorothioate
  modified_base 23: mod_base = OTHER; note = 2'-O-methylcytidine-3'-phosphate
acatcagtgcctttccgcacacc

SEQ ID NO: 2378 - RNA, 21 nt, synthetic construct
  misc_feature 1..21: note = Description of Artificial Sequence: Synthetic oligonucleotide
  source 1..21: mol_type = other RNA
  modified_base 1: mod_base = OTHER; note = 2'-O-methyladenosine-3'- phosphorothioate
  modified_base 2: mod_base = OTHER; note = 2'-O-methyladenosine-3'- phosphorothioate
  modified_base 3: mod_base = OTHER; note = 2'-O-methyluridine-3'-phosphate
  modified_base 4: mod_base = OTHER; note = 2'-O-methyluridine-3'-phosphate
  modified_base 5: mod_base = OTHER; note = 2'-O-methylguanosine-3'-phosphate
  modified_base 6: mod_base = OTHER; note = 2'-O-methyluridine-3'-phosphate
  modified_base 7: mod_base = OTHER; note = 2'-fluoroadenosine-3'-phosphate
  modified_base 8: mod_base = OTHER; note = 2'-O-methyladenosine-3'-phosphate
  modified_base 9: mod_base = OTHER; note = 2'-fluoroguanosine-3'-phosphate
  modified_base 10: mod_base = OTHER; note = 2'-fluorocytidine-3'-phosphate
  modified_base 11: mod_base = OTHER; note = 2'-fluorouridine-3'-phosphate
  modified_base 12: mod_base = OTHER; note = 2'-O-methylcytidine-3'-phosphate
  modified_base 13: mod_base = OTHER; note = 2'-O-methyladenosine-3'-phosphate
  modified_base 14: mod_base = OTHER; note = 2'-O-methylguanosine-3'-phosphate
  modified_base 15: mod_base = OTHER; note = 2'-O-methylguanosine-3'-phosphate
  modified_base 16: mod_base = OTHER; note = 2'-O-methyluridine-3'-phosphate
  modified_base 17: mod_base = OTHER; note = 2'-O-methyluridine-3'-phosphate
  modified_base 18: mod_base = OTHER; note = 2'-O-methylcytidine-3'-phosphate
  modified_base 19: mod_base = OTHER; note = 2'-O-methyladenosine-3'-phosphate
  modified_base 20: mod_base = OTHER; note = 2'-O-methyladenosine-3'-phosphate
  modified_base 21: mod_base = OTHER; note = 2'-O-methyladenosine-3'-phosphate attached to N-[tris(N-acetylgalactosamine-alkyl)-amidodecanoyl)]-4-hydr oxyprolinol Hyp-(N-acetylgalactosamine-alkyl)3
aattgtaagctcaggttcaaa

SEQ ID NO: 2379 - RNA, 23 nt, synthetic construct
  misc_feature 1..23: note = Description of Artificial Sequence: Synthetic oligonucleotide
  source 1..23: mol_type = other RNA
  modified_base 1: mod_base = OTHER; note = 2'-O-methyluridine-3'-phosphorothioate
  modified_base 2: mod_base = OTHER; note = 2'-fluorouridine -3'-phosphorothioate
  modified_base 3: mod_base = OTHER; note = 2'-O-methyluridine-3'-phosphate
  modified_base 4: mod_base = OTHER; note = 2'-O-methylguanosine-3'-phosphate
  modified_base 5: mod_base = OTHER; note = 2'-O-methyladenosine-3'-phosphate
  modified_base 6: mod_base = OTHER; note = 2'-fluoroadenosine-3'-phosphate
  modified_base 7: mod_base = OTHER; note = 2'-O-methylcytidine-3'-phosphate
  modified_base 8: mod_base = OTHER; note = 2'-fluorocytidine-3'-phosphate
  modified_base 9: mod_base = OTHER; note = 2'-fluorouridine-3'-phosphate
  modified_base 10: mod_base = OTHER; note = 2'-O-methylguanosine-3'-phosphate
  modified_base 11: mod_base = OTHER; note = 2'-O-methyladenosine-3'-phosphate
  modified_base 12: mod_base = OTHER; note = 2'-O-methylguanosine-3'-phosphate
  modified_base 13: mod_base = OTHER; note = 2'-O-methylcytidine-3'-phosphate
  modified_base 14: mod_base = OTHER; note = 2'-fluorouridine-3'-phosphate
  modified_base 15: mod_base = OTHER; note = 2'-O-methyluridine-3'-phosphate
  modified_base 16: mod_base = OTHER; note = 2'-fluoroadenosine-3'-phosphate
  modified_base 17: mod_base = OTHER; note = 2'-O-methylcytidine-3'-phosphate
  modified_base 18: mod_base = OTHER; note = 2'-O-methyladenosine-3'-phosphate
  modified_base 19: mod_base = OTHER; note = 2'-O-methyladenosine-3'-phosphate
  modified_base 20: mod_base = OTHER; note = 2'-O-methyluridine-3'-phosphate
  modified_base 21: mod_base = OTHER; note = 2'-O-methyluridine-3'-phosphorothioate
  modified_base 22: mod_base = OTHER; note = 2'-O-methyluridine-3'-phosphorothioate
  modified_base 23: mod_base = OTHER; note = 2'-O-methyladenosine-3'-phosphate
tttgaacctgagcttacaattta

SEQ ID NO: 2380 - RNA, 21 nt, synthetic construct
  misc_feature 1..21: note = Description of Artificial Sequence: Synthetic oligonucleotide
  source 1..21: mol_type = other RNA
  modified_base 1: mod_base = OTHER; note = 2'-O-methyladenosine-3'- phosphorothioate
  modified_base 2: mod_base = OTHER; note = 2'-O-methyluridine-3'-phosphorothioate
  modified_base 3: mod_base = OTHER; note = 2'-O-methyluridine-3'-phosphate
  modified_base 4: mod_base = OTHER; note = 2'-O-methylguanosine-3'-phosphate
  modified_base 5: mod_base = OTHER; note = 2'-O-methyluridine-3'-phosphate
  modified_base 6: mod_base = OTHER; note = 2'-O-methyladenosine-3'-phosphate
  modified_base 7: mod_base = OTHER; note = 2'-fluoroadenosine-3'-phosphate
  modified_base 8: mod_base = OTHER; note = 2'-O-methylguanosine-3'-phosphate
  modified_base 9: mod_base = OTHER; note = 2'-fluorocytidine-3'-phosphate
  modified_base 10: mod_base = OTHER; note = 2'-fluorouridine-3'-phosphate
  modified_base 11: mod_base = OTHER; note = 2'-fluorocytidine-3'-phosphate
  modified_base 12: mod_base = OTHER; note = 2'-O-methyladenosine-3'-phosphate
  modified_base 13: mod_base = OTHER; note = 2'-O-methylguanosine-3'-phosphate
  modified_base 14: mod_base = OTHER; note = 2'-O-methylguanosine-3'-phosphate
  modified_base 15: mod_base = OTHER; note = 2'-O-methyluridine-3'-phosphate
  modified_base 16: mod_base = OTHER; note = 2'-O-methyluridine-3'-phosphate
  modified_base 17: mod_base = OTHER; note = 2'-O-methylcytidine-3'-phosphate
  modified_base 18: mod_base = OTHER; note = 2'-O-methyladenosine-3'-phosphate
  modified_base 19: mod_base = OTHER; note = 2'-O-methyladenosine-3'-phosphate
  modified_base 20: mod_base = OTHER; note = 2'-O-methyladenosine-3'-phosphate
  modified_base 21: mod_base = OTHER; note = 2'-O-methylguanosine-3'-phosphate attached to N-[tris(N-acetylgalactosamine-alkyl)-amidodecanoyl)]-4-hydr oxyprolinol Hyp-(N-acetylgalactosamine-alkyl)3
attgtaagctcaggttcaaag

SEQ ID NO: 2381 - RNA, 23 nt, synthetic construct
  misc_feature 1..23: note = Description of Artificial Sequence: Synthetic oligonucleotide
  source 1..23: mol_type = other RNA
  modified_base 1: mod_base = OTHER; note = 2'-O-methylcytidine-3'- phosphorothioate
  modified_base 2: mod_base = OTHER; note = 2'-fluorouridine -3'-phosphorothioate
  modified_base 3: mod_base = OTHER; note = 2'-O-methyluridine-3'-phosphate
  modified_base 4: mod_base = OTHER; note = 2'-O-methyluridine-3'-phosphate
  modified_base 5: mod_base = OTHER; note = 2'-O-methylguanosine-3'-phosphate
  modified_base 6: mod_base = OTHER; note = 2'-fluoroadenosine-3'-phosphate
  modified_base 7: mod_base = OTHER; note = 2'-O-methyladenosine-3'-phosphate
  modified_base 8: mod_base = OTHER; note = 2'-fluorocytidine-3'-phosphate
  modified_base 9: mod_base = OTHER; note = 2'-fluorocytidine-3'-phosphate
  modified_base 10: mod_base = OTHER; note = 2'-O-methyluridine-3'-phosphate
  modified_base 11: mod_base = OTHER; note = 2'-O-methylguanosine-3'-phosphate
  modified_base 12: mod_base = OTHER; note = 2'-O-methyladenosine-3'-phosphate
  modified_base 13: mod_base = OTHER; note = 2'-O-methylguanosine-3'-phosphate
  modified_base 14: mod_base = OTHER; note = 2'-fluorocytidine-3'-phosphate
  modified_base 15: mod_base = OTHER; note = 2'-O-methyluridine-3'-phosphate
  modified_base 16: mod_base = OTHER; note = 2'-fluorouridine-3'-phosphate
  modified_base 17: mod_base = OTHER; note = 2'-O-methyladenosine-3'-phosphate
  modified_base 18: mod_base = OTHER; note = 2'-O-methylcytidine-3'-phosphate
  modified_base 19: mod_base = OTHER; note = 2'-O-methyladenosine-3'-phosphate
  modified_base 20: mod_base = OTHER; note = 2'-O-methyladenosine-3'-phosphate
  modified_base 21: mod_base = OTHER; note = 2'-O-methyluridine-3'-phosphorothioate
  modified_base 22: mod_base = OTHER; note = 2'-O-methyluridine-3'-phosphorothioate
  modified_base 23: mod_base = OTHER; note = 2'-O-methyluridine-3'-phosphate
ctttgaacctgagcttacaattt

SEQ ID NO: 2382 - RNA, 21 nt, synthetic construct
  misc_feature 1..21: note = Description of Artificial Sequence: Synthetic oligonucleotide
  source 1..21: mol_type = other RNA
  modified_base 1: mod_base = OTHER; note = 2'-O-methylcytidine-3'- phosphorothioate
  modified_base 2: mod_base = OTHER; note = 2'-O-methyluridine-3'-phosphorothioate
  modified_base 3: mod_base = OTHER; note = 2'-O-methyluridine-3'-phosphate
  modified_base 4: mod_base = OTHER; note = 2'-O-methyladenosine-3'-phosphate
  modified_base 5: mod_base = OTHER; note = 2'-O-methyladenosine-3'-phosphate
  modified_base 6: mod_base = OTHER; note = 2'-O-methyladenosine-3'-phosphate
  modified_base 7: mod_base = OTHER; note = 2'-fluorouridine-3'-phosphate
  modified_base 8: mod_base = OTHER; note = 2'-O-methyluridine-3'-phosphate
  modified_base 9: mod_base = OTHER; note = 2'-fluoroguanosine-3'-phosphate
  modified_base 10: mod_base = OTHER; note = 2'-fluorouridine-3'-phosphate
  modified_base 11: mod_base = OTHER; note = 2'-fluoroadenosine-3'-phosphate
  modified_base 12: mod_base = OTHER; note = 2'-O-methyladenosine-3'-phosphate
  modified_base 13: mod_base = OTHER; note = 2'-O-methylguanosine-3'-phosphate
  modified_base 14: mod_base = OTHER; note = 2'-O-methylcytidine-3'-phosphate
  modified_base 15: mod_base = OTHER; note = 2'-O-methyluridine-3'-phosphate
  modified_base 16: mod_base = OTHER; note = 2'-O-methylcytidine-3'-phosphate
  modified_base 17: mod_base = OTHER; note = 2'-O-methyladenosine-3'-phosphate
  modified_base 18: mod_base = OTHER; note = 2'-O-methylguanosine-3'-phosphate
  modified_base 19: mod_base = OTHER; note = 2'-O-methylguanosine-3'-phosphate
  modified_base 20: mod_base = OTHER; note = 2'-O-methyluridine-3'-phosphate
  modified_base 21: mod_base = OTHER; note = 2'-O-methyluridine-3'-phosphate attached to N-[tris(N-acetylgalactosamine-alkyl)-amidodecanoyl)]-4-hydr oxyprolinol Hyp-(N-acetylgalactosamine-alkyl)3
cttaaattgtaagctcaggtt

SEQ ID NO: 2383 - RNA, 23 nt, synthetic construct
  misc_feature 1..23: note = Description of Artificial Sequence: Synthetic oligonucleotide
  source 1..23: mol_type = other RNA
  modified_base 1: mod_base = OTHER; note = 2'-O-methyladenosine-3'- phosphorothioate
  modified_base 2: mod_base = OTHER; note = 2'-fluoroadenosine-3'-phosphorothioate
  modified_base 3: mod_base = OTHER; note = 2'-O-methylcytidine-3'-phosphate
  modified_base 4: mod_base = OTHER; note = 2'-O-methylcytidine-3'-phosphate
  modified_base 5: mod_base = OTHER; note = 2'-O-methyluridine-3'-phosphate
  modified_base 6: mod_base = OTHER; note = 2'-fluoroguanosine-3'-phosphate
  modified_base 7: mod_base = OTHER; note = 2'-O-methyladenosine-3'-phosphate
  modified_base 8: mod_base = OTHER; note = 2'-fluoroguanosine-3'-phosphate
  modified_base 9: mod_base = OTHER; note = 2'-fluorocytidine-3'-phosphate
  modified_base 10: mod_base = OTHER; note = 2'-O-methyluridine-3'-phosphate
  modified_base 11: mod_base = OTHER; note = 2'-O-methyluridine-3'-phosphate
  modified_base 12: mod_base = OTHER; note = 2'-O-methyladenosine-3'-phosphate
  modified_base 13: mod_base = OTHER; note = 2'-O-methylcytidine-3'-phosphate
  modified_base 14: mod_base = OTHER; note = 2'-fluoroadenosine-3'-phosphate
  modified_base 15: mod_base = OTHER; note = 2'-O-methyladenosine-3'-phosphate
  modified_base 16: mod_base = OTHER; note = 2'-fluorouridine-3'-phosphate
  modified_base 17: mod_base = OTHER; note = 2'-O-methyluridine-3'-phosphate
  modified_base 18: mod_base = OTHER; note = 2'-O-methyluridine-3'-phosphate
  modified_base 19: mod_base = OTHER; note = 2'-O-methyladenosine-3'-phosphate
  modified_base 20: mod_base = OTHER; note = 2'-O-methyladenosine-3'-phosphate
  modified_base 21: mod_base = OTHER; note = 2'-O-methylguanosine-3'- phosphorothioate
  modified_base 22: mod_base = OTHER; note = 2'-O-methyladenosine-3'- phosphorothioate
  modified_base 23: mod_base = OTHER; note = 2'-O-methyladenosine-3'-phosphate
aacctgagcttacaatttaagaa

SEQ ID NO: 2384 - RNA, 21 nt, synthetic construct
  misc_feature 1..21: note = Description of Artificial Sequence: Synthetic oligonucleotide
  source 1..21: mol_type = other RNA
  modified_base 1: mod_base = OTHER; note = 2'-O-methyluridine-3'-phosphorothioate
  modified_base 2: mod_base = OTHER; note = 2'-O-methylcytidine-3'- phosphorothioate
  modified_base 3: mod_base = OTHER; note = 2'-O-methyluridine-3'-phosphate
  modified_base 4: mod_base = OTHER; note = 2'-O-methyluridine-3'-phosphate
  modified_base 5: mod_base = OTHER; note = 2'-O-methyladenosine-3'-phosphate
  modified_base 6: mod_base = OTHER; note = 2'-O-methyladenosine-3'-phosphate
  modified_base 7: mod_base = OTHER; note = 2'-fluoroadenosine-3'-phosphate
  modified_base 8: mod_base = OTHER; note = 2'-O-methyluridine-3'-phosphate
  modified_base 9: mod_base = OTHER; note = 2'-fluorouridine-3'-phosphate
  modified_base 10: mod_base = OTHER; note = 2'-fluoroguanosine-3'-phosphate
  modified_base 11: mod_base = OTHER; note = 2'-fluorouridine-3'-phosphate
  modified_base 12: mod_base = OTHER; note = 2'-O-methyladenosine-3'-phosphate
  modified_base 13: mod_base = OTHER; note = 2'-O-methyladenosine-3'-phosphate
  modified_base 14: mod_base = OTHER; note = 2'-O-methylguanosine-3'-phosphate
  modified_base 15: mod_base = OTHER; note = 2'-O-methylcytidine-3'-phosphate
  modified_base 16: mod_base = OTHER; note = 2'-O-methyluridine-3'-phosphate
  modified_base 17: mod_base = OTHER; note = 2'-O-methylcytidine-3'-phosphate
  modified_base 18: mod_base = OTHER; note = 2'-O-methyladenosine-3'-phosphate
  modified_base 19: mod_base = OTHER; note = 2'-O-methylguanosine-3'-phosphate
  modified_base 20: mod_base = OTHER; note = 2'-O-methylguanosine-3'-phosphate
  modified_base 21: mod_base = OTHER; note = 2'-O-methyluridine-3'-phosphate attached to N-[tris(N-acetylgalactosamine-alkyl)-amidodecanoyl)]-4-hydr oxyprolinol Hyp-(N-acetylgalactosamine-alkyl)3
tcttaaattgtaagctcaggt

SEQ ID NO: 2385 - RNA, 23 nt, synthetic construct
  misc_feature 1..23: note = Description of Artificial Sequence: Synthetic oligonucleotide
  source 1..23: mol_type = other RNA
  modified_base 1: mod_base = OTHER; note = 2'-O-methyladenosine-3'- phosphorothioate
  modified_base 2: mod_base = OTHER; note = 2'-fluorocytidine-3'-phosphorothioate
  modified_base 3: mod_base = OTHER; note = 2'-O-methylcytidine-3'-phosphate
  modified_base 4: mod_base = OTHER; note = 2'-O-methyluridine-3'-phosphate
  modified_base 5: mod_base = OTHER; note = 2'-O-methylguanosine-3'-phosphate
  modified_base 6: mod_base = OTHER; note = 2'-fluoroadenosine-3'-phosphate
  modified_base 7: mod_base = OTHER; note = 2'-O-methylguanosine-3'-phosphate
  modified_base 8: mod_base = OTHER; note = 2'-fluorocytidine-3'-phosphate
  modified_base 9: mod_base = OTHER; note = 2'-fluorouridine-3'-phosphate
  modified_base 10: mod_base = OTHER; note = 2'-O-methyluridine-3'-phosphate
  modified_base 11: mod_base = OTHER; note = 2'-O-methyladenosine-3'-phosphate
  modified_base 12: mod_base = OTHER; note = 2'-O-methylcytidine-3'-phosphate
  modified_base 13: mod_base = OTHER; note = 2'-O-methyladenosine-3'-phosphate
  modified_base 14: mod_base = OTHER; note = 2'-fluoroadenosine-3'-phosphate
  modified_base 15: mod_base = OTHER; note = 2'-O-methyluridine-3'-phosphate
  modified_base 16: mod_base = OTHER; note = 2'-fluorouridine-3'-phosphate
  modified_base 17: mod_base = OTHER; note = 2'-O-methyluridine-3'-phosphate
  modified_base 18: mod_base = OTHER; note = 2'-O-methyladenosine-3'-phosphate
  modified_base 19: mod_base = OTHER; note = 2'-O-methyladenosine-3'-phosphate
  modified_base 20: mod_base = OTHER; note = 2'-O-methylguanosine-3'-phosphate
  modified_base 21: mod_base = OTHER; note = 2'-O-methyladenosine-3'- phosphorothioate
  modified_base 22: mod_base = OTHER; note = 2'-O-methyladenosine-3'- phosphorothioate
  modified_base 23: mod_base = OTHER; note = 2'-O-methylcytidine-3'-phosphate
acctgagcttacaatttaagaac

SEQ ID NO: 2386 - RNA, 21 nt, synthetic construct
  misc_feature 1..21: note = Description of Artificial Sequence: Synthetic oligonucleotide
  source 1..21: mol_type = other RNA
  modified_base 1: mod_base = OTHER; note = 2'-O-methylguanosine-3'- phosphorothioate
  modified_base 2: mod_base = OTHER; note = 2'-O-methylcytidine-3'- phosphorothioate
  modified_base 3: mod_base = OTHER; note = 2'-O-methyladenosine-3'-phosphate
  modified_base 4: mod_base = OTHER; note = 2'-O-methyladenosine-3'-phosphate
  modified_base 5: mod_base = OTHER; note = 2'-O-methyladenosine-3'-phosphate
  modified_base 6: mod_base = OTHER; note = 2'-O-methylcytidine-3'-phosphate
  modified_base 7: mod_base = OTHER; note = 2'-fluoroadenosine-3'-phosphate
  modified_base 8: mod_base = OTHER; note = 2'-O-methylcytidine-3'-phosphate
  modified_base 9: mod_base = OTHER; note = 2'-fluorouridine-3'-phosphate
  modified_base 10: mod_base = OTHER; note = 2'-fluoroadenosine-3'-phosphate
  modified_base 11: mod_base = OTHER; note = 2'-fluoroadenosine-3'-phosphate
  modified_base 12: mod_base = OTHER; note = 2'-O-methylguanosine-3'-phosphate
  modified_base 13: mod_base = OTHER; note = 2'-O-methylguanosine-3'-phosphate
  modified_base 14: mod_base = OTHER; note = 2'-O-methyluridine-3'-phosphate
  modified_base 15: mod_base = OTHER; note = 2'-O-methylguanosine-3'-phosphate
  modified_base 16: mod_base = OTHER; note = 2'-O-methyladenosine-3'-phosphate
  modified_base 17: mod_base = OTHER; note = 2'-O-methyladenosine-3'-phosphate
  modified_base 18: mod_base = OTHER; note = 2'-O-methyladenosine-3'-phosphate
  modified_base 19: mod_base = OTHER; note = 2'-O-methyladenosine-3'-phosphate
  modified_base 20: mod_base = OTHER; note = 2'-O-methylguanosine-3'-phosphate
  modified_base 21: mod_base = OTHER; note = 2'-O-methyladenosine-3'-phosphate attached to N-[tris(N-acetylgalactosamine-alkyl)-amidodecanoyl)]-4-hydr oxyprolinol Hyp-(N-acetylgalactosamine-alkyl)3
gcaaacactaaggtgaaaaga

SEQ ID NO: 2387 - RNA, 23 nt, synthetic construct
  misc_feature 1..23: note = Description of Artificial Sequence: Synthetic oligonucleotide
  source 1..23: mol_type = other RNA
  modified_base 1: mod_base = OTHER; note = 2'-O-methyluridine-3'-phosphorothioate
  modified_base 2: mod_base = OTHER; note = 2'-fluorocytidine-3'-phosphorothioate
  modified_base 3: mod_base = OTHER; note = 2'-O-methyluridine-3'-phosphate
  modified_base 4: mod_base = OTHER; note = 2'-O-methyluridine-3'-phosphate
  modified_base 5: mod_base = OTHER; note = 2'-O-methyluridine-3'-phosphate
  modified_base 6: mod_base = OTHER; note = 2'-fluorouridine-3'-phosphate
  modified_base 7: mod_base = OTHER; note = 2'-O-methylcytidine-3'-phosphate
  modified_base 8: mod_base = OTHER; note = 2'-fluoroadenosine-3'-phosphate
  modified_base 9: mod_base = OTHER; note = 2'-fluorocytidine-3'-phosphate
  modified_base 10: mod_base = OTHER; note = 2'-O-methylcytidine-3'-phosphate
  modified_base 11: mod_base = OTHER; note = 2'-O-methyluridine-3'-phosphate
  modified_base 12: mod_base = OTHER; note = 2'-O-methyluridine-3'-phosphate
  modified_base 13: mod_base = OTHER; note = 2'-O-methyladenosine-3'-phosphate
  modified_base 14: mod_base = OTHER; note = 2'-fluoroguanosine-3'-phosphate
  modified_base 15: mod_base = OTHER; note = 2'-O-methyluridine-3'-phosphate
  modified_base 16: mod_base = OTHER; note = 2'-fluoroguanosine-3'-phosphate
  modified_base 17: mod_base = OTHER; note = 2'-O-methyluridine-3'-phosphate
  modified_base 18: mod_base = OTHER; note = 2'-O-methyluridine-3'-phosphate
  modified_base 19: mod_base = OTHER; note = 2'-O-methyluridine-3'-phosphate
  modified_base 20: mod_base = OTHER; note = 2'-O-methylguanosine-3'-phosphate
  modified_base 21: mod_base = OTHER; note = 2'-O-methylcytidine-3'- phosphorothioate
  modified_base 22: mod_base = OTHER; note = 2'-O-methyluridine-3'-phosphorothioate
  modified_base 23: mod_base = OTHER; note = 2'-O-methyladenosine-3'-phosphate
tcttttcaccttagtgtttgcta

SEQ ID NO: 2388 - RNA, 21 nt, synthetic construct
  misc_feature 1..21: note = Description of Artificial Sequence: Synthetic oligonucleotide
  source 1..21: mol_type = other RNA
  modified_base 1: mod_base = OTHER; note = 2'-O-methylcytidine-3'- phosphorothioate
  modified_base 2: mod_base = OTHER; note = 2'-O-methyladenosine-3'- phosphorothioate
  modified_base 3: mod_base = OTHER; note = 2'-O-methyladenosine-3'-phosphate
  modified_base 4: mod_base = OTHER; note = 2'-O-methyladenosine-3'-phosphate
  modified_base 5: mod_base = OTHER; note = 2'-O-methylcytidine-3'-phosphate
  modified_base 6: mod_base = OTHER; note = 2'-O-methyladenosine-3'-phosphate
  modified_base 7: mod_base = OTHER; note = 2'-fluorocytidine-3'-phosphate
  modified_base 8: mod_base = OTHER; note = 2'-O-methyluridine-3'-phosphate
  modified_base 9: mod_base = OTHER; note = 2'-fluoroadenosine-3'-phosphate
  modified_base 10: mod_base = OTHER; note = 2'-fluoroadenosine-3'-phosphate
  modified_base 11: mod_base = OTHER; note = 2'-fluoroguanosine-3'-phosphate
  modified_base 12: mod_base = OTHER; note = 2'-O-methylguanosine-3'-phosphate
  modified_base 13: mod_base = OTHER; note = 2'-O-methyluridine-3'-phosphate
  modified_base 14: mod_base = OTHER; note = 2'-O-methylguanosine-3'-phosphate
  modified_base 15: mod_base = OTHER; note = 2'-O-methyladenosine-3'-phosphate
  modified_base 16: mod_base = OTHER; note = 2'-O-methyladenosine-3'-phosphate
  modified_base 17: mod_base = OTHER; note = 2'-O-methyladenosine-3'-phosphate
  modified_base 18: mod_base = OTHER; note = 2'-O-methyladenosine-3'-phosphate
  modified_base 19: mod_base = OTHER; note = 2'-O-methylguanosine-3'-phosphate
  modified_base 20: mod_base = OTHER; note = 2'-O-methyladenosine-3'-phosphate
  modified_base 21: mod_base = OTHER; note = 2'-O-methyluridine-3'-phosphate attached to N-[tris(N-acetylgalactosamine-alkyl)-amidodecanoyl)]-4-hydr oxyprolinol Hyp-(N-acetylgalactosamine-alkyl)3
caaacactaaggtgaaaagat

SEQ ID NO: 2389 - RNA, 23 nt, synthetic construct
  misc_feature 1..23: note = Description of Artificial Sequence: Synthetic oligonucleotide
  source 1..23: mol_type = other RNA
  modified_base 1: mod_base = OTHER; note = 2'-O-methyladenosine-3'- phosphorothioate
  modified_base 2: mod_base = OTHER; note = 2'-fluorouridine -3'-phosphorothioate
  modified_base 3: mod_base = OTHER; note = 2'-O-methylcytidine-3'-phosphate
  modified_base 4: mod_base = OTHER; note = 2'-O-methyluridine-3'-phosphate
  modified_base 5: mod_base = OTHER; note = 2'-O-methyluridine-3'-phosphate
  modified_base 6: mod_base = OTHER; note = 2'-fluorouridine-3'-phosphate
  modified_base 7: mod_base = OTHER; note = 2'-O-methyluridine-3'-phosphate
  modified_base 8: mod_base = OTHER; note = 2'-fluorocytidine-3'-phosphate
  modified_base 9: mod_base = OTHER; note = 2'-fluoroadenosine-3'-phosphate
  modified_base 10: mod_base = OTHER; note = 2'-O-methylcytidine-3'-phosphate
  modified_base 11: mod_base = OTHER; note = 2'-O-methylcytidine-3'-phosphate
  modified_base 12: mod_base = OTHER; note = 2'-O-methyluridine-3'-phosphate
  modified_base 13: mod_base = OTHER; note = 2'-O-methyluridine-3'-phosphate
  modified_base 14: mod_base = OTHER; note = 2'-fluoroadenosine-3'-phosphate
  modified_base 15: mod_base = OTHER; note = 2'-O-methylguanosine-3'-phosphate
  modified_base 16: mod_base = OTHER; note = 2'-fluorouridine-3'-phosphate
  modified_base 17: mod_base = OTHER; note = 2'-O-methylguanosine-3'-phosphate
  modified_base 18: mod_base = OTHER; note = 2'-O-methyluridine-3'-phosphate
  modified_base 19: mod_base = OTHER; note = 2'-O-methyluridine-3'-phosphate
  modified_base 20: mod_base = OTHER; note = 2'-O-methyluridine-3'-phosphate
  modified_base 21: mod_base = OTHER; note = 2'-O-methylguanosine-3'- phosphorothioate
  modified_base 22: mod_base = OTHER; note = 2'-O-methylcytidine-3'- phosphorothioate
  modified_base 23: mod_base = OTHER; note = 2'-O-methyluridine-3'-phosphate
atcttttcaccttagtgtttgct

SEQ ID NO: 2390 - RNA, 21 nt, synthetic construct
  misc_feature 1..21: note = Description of Artificial Sequence: Synthetic oligonucleotide
  source 1..21: mol_type = other RNA
  modified_base 1: mod_base = OTHER; note = 2'-O-methylguanosine-3'- phosphorothioate
  modified_base 2: mod_base = OTHER; note = 2'-O-methylguanosine-3'- phosphorothioate
  modified_base 3: mod_base = OTHER; note = 2'-O-methyluridine-3'-phosphate
  modified_base 4: mod_base = OTHER; note = 2'-O-methyladenosine-3'-phosphate
  modified_base 5: mod_base = OTHER; note = 2'-O-methylguanosine-3'-phosphate
  modified_base 6: mod_base = OTHER; note = 2'-O-methylcytidine-3'-phosphate
  modified_base 7: mod_base = OTHER; note = 2'-fluoroadenosine-3'-phosphate
  modified_base 8: mod_base = OTHER; note = 2'-O-methyladenosine-3'-phosphate
  modified_base 9: mod_base = OTHER; note = 2'-fluoroadenosine-3'-phosphate
  modified_base 10: mod_base = OTHER; note = 2'-fluorocytidine-3'-phosphate
  modified_base 11: mod_base = OTHER; note = 2'-fluoroadenosine-3'-phosphate
  modified_base 12: mod_base = OTHER; note = 2'-O-methylcytidine-3'-phosphate
  modified_base 13: mod_base = OTHER; note = 2'-O-methyluridine-3'-phosphate
  modified_base 14: mod_base = OTHER; note = 2'-O-methyladenosine-3'-phosphate
  modified_base 15: mod_base = OTHER; note = 2'-O-methyladenosine-3'-phosphate
  modified_base 16: mod_base = OTHER; note = 2'-O-methylguanosine-3'-phosphate
  modified_base 17: mod_base = OTHER; note = 2'-O-methylguanosine-3'-phosphate
  modified_base 18: mod_base = OTHER; note = 2'-O-methyluridine-3'-phosphate
  modified_base 19: mod_base = OTHER; note = 2'-O-methylguanosine-3'-phosphate
  modified_base 20: mod_base = OTHER; note = 2'-O-methyladenosine-3'-phosphate
  modified_base 21: mod_base = OTHER; note = 2'-O-methyladenosine-3'-phosphate attached to N-[tris(N-acetylgalactosamine-alkyl)-amidodecanoyl)]-4-hydr oxyprolinol Hyp-(N-acetylgalactosamine-alkyl)3
ggtagcaaacactaaggtgaa

SEQ ID NO: 2391 - RNA, 23 nt, synthetic construct
  misc_feature 1..23: note = Description of Artificial Sequence: Synthetic oligonucleotide
  source 1..23: mol_type = other RNA
  modified_base 1: mod_base = OTHER; note = 2'-O-methyluridine-3'-phosphorothioate
  modified_base 2: mod_base = OTHER; note = 2'-fluorouridine -3'-phosphorothioate
  modified_base 3: mod_base = OTHER; note = 2'-O-methylcytidine-3'-phosphate
  modified_base 4: mod_base = OTHER; note = 2'-O-methyladenosine-3'-phosphate
  modified_base 5: mod_base = OTHER; note = 2'-O-methylcytidine-3'-phosphate
  modified_base 6: mod_base = OTHER; note = 2'-fluorocytidine-3'-phosphate
  modified_base 7: mod_base = OTHER; note = 2'-O-methyluridine-3'-phosphate
  modified_base 8: mod_base = OTHER; note = 2'-fluorouridine-3'-phosphate
  modified_base 9: mod_base = OTHER; note = 2'-fluoroadenosine-3'-phosphate
  modified_base 10: mod_base = OTHER; note = 2'-O-methylguanosine-3'-phosphate
  modified_base 11: mod_base = OTHER; note = 2'-O-methyluridine-3'-phosphate
  modified_base 12: mod_base = OTHER; note = 2'-O-methylguanosine-3'-phosphate
  modified_base 13: mod_base = OTHER; note = 2'-O-methyluridine-3'-phosphate
  modified_base 14: mod_base = OTHER; note = 2'-fluorouridine-3'-phosphate
  modified_base 15: mod_base = OTHER; note = 2'-O-methyluridine-3'-phosphate
  modified_base 16: mod_base = OTHER; note = 2'-fluoroguanosine-3'-phosphate
  modified_base 17: mod_base = OTHER; note = 2'-O-methylcytidine-3'-phosphate
  modified_base 18: mod_base = OTHER; note = 2'-O-methyluridine-3'-phosphate
  modified_base 19: mod_base = OTHER; note = 2'-O-methyladenosine-3'-phosphate
  modified_base 20: mod_base = OTHER; note = 2'-O-methylcytidine-3'-phosphate
  modified_base 21: mod_base = OTHER; note = 2'-O-methylcytidine-3'- phosphorothioate
  modified_base 22: mod_base = OTHER; note = 2'-O-methyluridine-3'-phosphorothioate
  modified_base 23: mod_base = OTHER; note = 2'-O-methylcytidine-3'-phosphate
ttcaccttagtgtttgctacctc

SEQ ID NO: 2392 - RNA, 21 nt, synthetic construct
  misc_feature 1..21: note = Description of Artificial Sequence: Synthetic oligonucleotide
  source 1..21: mol_type = other RNA
  modified_base 1: mod_base = OTHER; note = 2'-O-methyladenosine-3'- phosphorothioate
  modified_base 2: mod_base = OTHER; note = 2'-O-methylguanosine-3'- phosphorothioate
  modified_base 3: mod_base = OTHER; note = 2'-O-methylguanosine-3'-phosphate
  modified_base 4: mod_base = OTHER; note = 2'-O-methyluridine-3'-phosphate
  modified_base 5: mod_base = OTHER; note = 2'-O-methyladenosine-3'-phosphate
  modified_base 6: mod_base = OTHER; note = 2'-O-methylguanosine-3'-phosphate
  modified_base 7: mod_base = OTHER; note = 2'-fluorocytidine-3'-phosphate
  modified_base 8: mod_base = OTHER; note = 2'-O-methyladenosine-3'-phosphate
  modified_base 9: mod_base = OTHER; note = 2'-fluoroadenosine-3'-phosphate
  modified_base 10: mod_base = OTHER; note = 2'-fluoroadenosine-3'-phosphate
  modified_base 11: mod_base = OTHER; note = 2'-fluorocytidine-3'-phosphate
  modified_base 12: mod_base = OTHER; note = 2'-O-methyladenosine-3'-phosphate
  modified_base 13: mod_base = OTHER; note = 2'-O-methylcytidine-3'-phosphate
  modified_base 14: mod_base = OTHER; note = 2'-O-methyluridine-3'-phosphate
  modified_base 15: mod_base = OTHER; note = 2'-O-methyladenosine-3'-phosphate
  modified_base 16: mod_base = OTHER; note = 2'-O-methyladenosine-3'-phosphate
  modified_base 17: mod_base = OTHER; note = 2'-O-methylguanosine-3'-phosphate
  modified_base 18: mod_base = OTHER; note = 2'-O-methylguanosine-3'-phosphate
  modified_base 19: mod_base = OTHER; note = 2'-O-methyluridine-3'-phosphate
  modified_base 20: mod_base = OTHER; note = 2'-O-methylguanosine-3'-phosphate
  modified_base 21: mod_base = OTHER; note = 2'-O-methyladenosine-3'-phosphate attached to N-[tris(N-acetylgalactosamine-alkyl)-amidodecanoyl)]-4-hydr oxyprolinol Hyp-(N-acetylgalactosamine-alkyl)3
aggtagcaaacactaaggtga

SEQ ID NO: 2393 - RNA, 23 nt, synthetic construct
  misc_feature 1..23: note = Description of Artificial Sequence: Synthetic oligonucleotide
  source 1..23: mol_type = other RNA
  modified_base 1: mod_base = OTHER; note = 2'-O-methyluridine-3'-phosphorothioate
  modified_base 2: mod_base = OTHER; note = 2'-fluorocytidine-3'-phosphorothioate
  modified_base 3: mod_base = OTHER; note = 2'-O-methyladenosine-3'-phosphate
  modified_base 4: mod_base = OTHER; note = 2'-O-methylcytidine-3'-phosphate
  modified_base 5: mod_base = OTHER; note = 2'-O-methylcytidine-3'-phosphate
  modified_base 6: mod_base = OTHER; note = 2'-fluorouridine-3'-phosphate
  modified_base 7: mod_base = OTHER; note = 2'-O-methyluridine-3'-phosphate
  modified_base 8: mod_base = OTHER; note = 2'-fluoroadenosine-3'-phosphate
  modified_base 9: mod_base = OTHER; note = 2'-fluoroguanosine-3'-phosphate
  modified_base 10: mod_base = OTHER; note = 2'-O-methyluridine-3'-phosphate
  modified_base 11: mod_base = OTHER; note = 2'-O-methylguanosine-3'-phosphate
  modified_base 12: mod_base = OTHER; note = 2'-O-methyluridine-3'-phosphate
  modified_base 13: mod_base = OTHER; note = 2'-O-methyluridine-3'-phosphate
  modified_base 14: mod_base = OTHER; note = 2'-fluorouridine-3'-phosphate
  modified_base 15: mod_base = OTHER; note = 2'-O-methylguanosine-3'-phosphate
  modified_base 16: mod_base = OTHER; note = 2'-fluorocytidine-3'-phosphate
  modified_base 17: mod_base = OTHER; note = 2'-O-methyluridine-3'-phosphate
  modified_base 18: mod_base = OTHER; note = 2'-O-methyladenosine-3'-phosphate
  modified_base 19: mod_base = OTHER; note = 2'-O-methylcytidine-3'-phosphate
  modified_base 20: mod_base = OTHER; note = 2'-O-methylcytidine-3'-phosphate
  modified_base 21: mod_base = OTHER; note = 2'-O-methyluridine-3'-phosphorothioate
  modified_base 22: mod_base = OTHER; note = 2'-O-methylcytidine-3'- phosphorothioate
  modified_base 23: mod_base = OTHER; note = 2'-O-methylcytidine-3'-phosphate
tcaccttagtgtttgctacctcc

SEQ ID NO: 2394 - RNA, 21 nt, synthetic construct
  misc_feature 1..21: note = Description of Artificial Sequence: Synthetic oligonucleotide
  source 1..21: mol_type = other RNA
  modified_base 1: mod_base = OTHER; note = 2'-O-methyladenosine-3'- phosphorothioate
  modified_base 2: mod_base = OTHER; note = 2'-O-methylguanosine-3'- phosphorothioate
  modified_base 3: mod_base = OTHER; note = 2'-O-methylguanosine-3'-phosphate
  modified_base 4: mod_base = OTHER; note = 2'-O-methyluridine-3'-phosphate
  modified_base 5: mod_base = OTHER; note = 2'-O-methyladenosine-3'-phosphate
  modified_base 6: mod_base = OTHER; note = 2'-O-methylguanosine-3'-phosphate
  modified_base 7: mod_base = OTHER; note = 2'-fluorocytidine-3'-phosphate
  modified_base 8: mod_base = OTHER; note = 2'-O-methyladenosine-3'-phosphate
  modified_base 9: mod_base = OTHER; note = 2'-fluoroadenosine-3'-phosphate
  modified_base 10: mod_base = OTHER; note = 2'-fluoroadenosine-3'-phosphate
  modified_base 11: mod_base = OTHER; note = 2'-fluorocytidine-3'-phosphate
  modified_base 12: mod_base = OTHER; note = 2'-O-methyladenosine-3'-phosphate
  modified_base 13: mod_base = OTHER; note = 2'-O-methylcytidine-3'-phosphate
  modified_base 14: mod_base = OTHER; note = 2'-O-methyluridine-3'-phosphate
  modified_base 15: mod_base = OTHER; note = 2'-O-methyladenosine-3'-phosphate
  modified_base 16: mod_base = OTHER; note = 2'-O-methyladenosine-3'-phosphate
  modified_base 17: mod_base = OTHER; note = 2'-O-methylguanosine-3'-phosphate
  modified_base 18: mod_base = OTHER; note = 2'-O-methylguanosine-3'-phosphate
  modified_base 19: mod_base = OTHER; note = 2'-O-methyluridine-3'-phosphate
  modified_base 20: mod_base = OTHER; note = 2'-O-methylguanosine-3'-phosphate
  modified_base 21: mod_base = OTHER; note = 2'-O-methyladenosine-3'-phosphate attached to N-[tris(N-acetylgalactosamine-alkyl)-amidodecanoyl)]-4-hydr oxyprolinol Hyp-(N-acetylgalactosamine-alkyl)3
aggtagcaaacactaaggtga

SEQ ID NO: 2395 - RNA, 23 nt, synthetic construct
  misc_feature 1..23: note = Description of Artificial Sequence: Synthetic oligonucleotide
  source 1..23: mol_type = other RNA
  modified_base 1: mod_base = OTHER; note = 2'-O-methyluridine-3'-phosphorothioate
  modified_base 2: mod_base = OTHER; note = 2'-fluorocytidine-3'-phosphorothioate
  modified_base 3: mod_base = OTHER; note = 2'-O-methyladenosine-3'-phosphate
  modified_base 4: mod_base = OTHER; note = 2'-O-methylcytidine-3'-phosphate
  modified_base 5: mod_base = OTHER; note = 2'-O-methylcytidine-3'-phosphate
  modified_base 6: mod_base = OTHER; note = 2'-fluorouridine-3'-phosphate
  modified_base 7: mod_base = OTHER; note = 2'-O-methyluridine-3'-phosphate
  modified_base 8: mod_base = OTHER; note = 2'-fluoroadenosine-3'-phosphate
  modified_base 9: mod_base = OTHER; note = 2'-fluoroguanosine-3'-phosphate
  modified_base 10: mod_base = OTHER; note = 2'-O-methyluridine-3'-phosphate
  modified_base 11: mod_base = OTHER; note = 2'-O-methylguanosine-3'-phosphate
  modified_base 12: mod_base = OTHER; note = 2'-O-methyluridine-3'-phosphate
  modified_base 13: mod_base = OTHER; note = 2'-O-methyluridine-3'-phosphate
  modified_base 14: mod_base = OTHER; note = 2'-fluorouridine-3'-phosphate
  modified_base 15: mod_base = OTHER; note = 2'-O-methylguanosine-3'-phosphate
  modified_base 16: mod_base = OTHER; note = 2'-fluorocytidine-3'-phosphate
  modified_base 17: mod_base = OTHER; note = 2'-O-methyluridine-3'-phosphate
  modified_base 18: mod_base = OTHER; note = 2'-O-methyladenosine-3'-phosphate
  modified_base 19: mod_base = OTHER; note = 2'-O-methylcytidine-3'-phosphate
  modified_base 20: mod_base = OTHER; note = 2'-O-methylcytidine-3'-phosphate
  modified_base 21: mod_base = OTHER; note = 2'-O-methyluridine-3'-phosphorothioate
  modified_base 22: mod_base = OTHER; note = 2'-O-methylcytidine-3'- phosphorothioate
  modified_base 23: mod_base = OTHER; note = 2'-O-methylcytidine-3'-phosphate
tcaccttagtgtttgctacctcc

SEQ ID NO: 2396 - RNA, 21 nt, synthetic construct
  misc_feature 1..21: note = Description of Artificial Sequence: Synthetic oligonucleotide
  source 1..21: mol_type = other RNA
  modified_base 1: mod_base = OTHER; note = 2'-O-methylguanosine-3'- phosphorothioate
  modified_base 2: mod_base = OTHER; note = 2'-O-methylguanosine-3'- phosphorothioate
  modified_base 3: mod_base = OTHER; note = 2'-O-methyluridine-3'-phosphate
  modified_base 4: mod_base = OTHER; note = 2'-O-methyladenosine-3'-phosphate
  modified_base 5: mod_base = OTHER; note = 2'-O-methylguanosine-3'-phosphate
  modified_base 6: mod_base = OTHER; note = 2'-O-methylcytidine-3'-phosphate
  modified_base 7: mod_base = OTHER; note = 2'-fluoroadenosine-3'-phosphate
  modified_base 8: mod_base = OTHER; note = 2'-O-methyladenosine-3'-phosphate
  modified_base 9: mod_base = OTHER; note = 2'-fluoroadenosine-3'-phosphate
  modified_base 10: mod_base = OTHER; note = 2'-fluorocytidine-3'-phosphate
  modified_base 11: mod_base = OTHER; note = 2'-fluoroadenosine-3'-phosphate
  modified_base 12: mod_base = OTHER; note = 2'-O-methylcytidine-3'-phosphate
  modified_base 13: mod_base = OTHER; note = 2'-O-methyluridine-3'-phosphate
  modified_base 14: mod_base = OTHER; note = 2'-O-methyladenosine-3'-phosphate
  modified_base 15: mod_base = OTHER; note = 2'-O-methyladenosine-3'-phosphate
  modified_base 16: mod_base = OTHER; note = 2'-O-methylguanosine-3'-phosphate
  modified_base 17: mod_base = OTHER; note = 2'-O-methylguanosine-3'-phosphate
  modified_base 18: mod_base = OTHER; note = 2'-O-methyluridine-3'-phosphate
  modified_base 19: mod_base = OTHER; note = 2'-O-methylguanosine-3'-phosphate
  modified_base 20: mod_base = OTHER; note = 2'-O-methyladenosine-3'-phosphate
  modified_base 21: mod_base = OTHER; note = 2'-O-methyladenosine-3'-phosphate attached to N-[tris(N-acetylgalactosamine-alkyl)-amidodecanoyl)]-4-hydr oxyprolinol Hyp-(N-acetylgalactosamine-alkyl)3
ggtagcaaacactaaggtgaa

SEQ ID NO: 2397 - RNA, 23 nt, synthetic construct
  misc_feature 1..23: note = Description of Artificial Sequence: Synthetic oligonucleotide
  source 1..23: mol_type = other RNA
  modified_base 1: mod_base = OTHER; note = 2'-O-methyluridine-3'-phosphorothioate
  modified_base 2: mod_base = OTHER; note = 2'-fluorouridine -3'-phosphorothioate
  modified_base 3: mod_base = OTHER; note = 2'-O-methylcytidine-3'-phosphate
  modified_base 4: mod_base = OTHER; note = 2'-O-methyladenosine-3'-phosphate
  modified_base 5: mod_base = OTHER; note = 2'-O-methylcytidine-3'-phosphate
  modified_base 6: mod_base = OTHER; note = 2'-fluorocytidine-3'-phosphate
  modified_base 7: mod_base = OTHER; note = 2'-O-methyluridine-3'-phosphate
  modified_base 8: mod_base = OTHER; note = 2'-fluorouridine-3'-phosphate
  modified_base 9: mod_base = OTHER; note = 2'-fluoroadenosine-3'-phosphate
  modified_base 10: mod_base = OTHER; note = 2'-O-methylguanosine-3'-phosphate
  modified_base 11: mod_base = OTHER; note = 2'-O-methyluridine-3'-phosphate
  modified_base 12: mod_base = OTHER; note = 2'-O-methylguanosine-3'-phosphate
  modified_base 13: mod_base = OTHER; note = 2'-O-methyluridine-3'-phosphate
  modified_base 14: mod_base = OTHER; note = 2'-fluorouridine-3'-phosphate
  modified_base 15: mod_base = OTHER; note = 2'-O-methyluridine-3'-phosphate
  modified_base 16: mod_base = OTHER; note = 2'-fluoroguanosine-3'-phosphate
  modified_base 17: mod_base = OTHER; note = 2'-O-methylcytidine-3'-phosphate
  modified_base 18: mod_base = OTHER; note = 2'-O-methyluridine-3'-phosphate
  modified_base 19: mod_base = OTHER; note = 2'-O-methyladenosine-3'-phosphate
  modified_base 20: mod_base = OTHER; note = 2'-O-methylcytidine-3'-phosphate
  modified_base 21: mod_base = OTHER; note = 2'-O-methylcytidine-3'- phosphorothioate
  modified_base 22: mod_base = OTHER; note = 2'-O-methyluridine-3'-phosphorothioate
  modified_base 23: mod_base = OTHER; note = 2'-O-methylcytidine-3'-phosphate
ttcaccttagtgtttgctacctc

SEQ ID NO: 2398 - RNA, 21 nt, synthetic construct
  misc_feature 1..21: note = Description of Artificial Sequence: Synthetic oligonucleotide
  source 1..21: mol_type = other RNA
  modified_base 1: mod_base = OTHER; note = 2'-O-methyluridine-3'-phosphorothioate
  modified_base 2: mod_base = OTHER; note = 2'-O-methyluridine-3'-phosphorothioate
  modified_base 3: mod_base = OTHER; note = 2'-O-methylguanosine-3'-phosphate
  modified_base 4: mod_base = OTHER; note = 2'-O-methylguanosine-3'-phosphate
  modified_base 5: mod_base = OTHER; note = 2'-O-methyladenosine-3'-phosphate
  modified_base 6: mod_base = OTHER; note = 2'-O-methylguanosine-3'-phosphate
  modified_base 7: mod_base = OTHER; note = 2'-fluoroguanosine-3'-phosphate
  modified_base 8: mod_base = OTHER; note = 2'-O-methyluridine-3'-phosphate
  modified_base 9: mod_base = OTHER; note = 2'-fluoroadenosine-3'-phosphate
  modified_base 10: mod_base = OTHER; note = 2'-fluoroguanosine-3'-phosphate
  modified_base 11: mod_base = OTHER; note = 2'-fluorocytidine-3'-phosphate
  modified_base 12: mod_base = OTHER; note = 2'-O-methyladenosine-3'-phosphate
  modified_base 13: mod_base = OTHER; note = 2'-O-methyladenosine-3'-phosphate
  modified_base 14: mod_base = OTHER; note = 2'-O-methyladenosine-3'-phosphate
  modified_base 15: mod_base = OTHER; note = 2'-O-methylcytidine-3'-phosphate
  modified_base 16: mod_base = OTHER; note = 2'-O-methyladenosine-3'-phosphate
  modified_base 17: mod_base = OTHER; note = 2'-O-methylcytidine-3'-phosphate
  modified_base 18: mod_base = OTHER; note = 2'-O-methyluridine-3'-phosphate
  modified_base 19: mod_base = OTHER; note = 2'-O-methyladenosine-3'-phosphate
  modified_base 20: mod_base = OTHER; note = 2'-O-methyladenosine-3'-phosphate
  modified_base 21: mod_base = OTHER; note = 2'-O-methylguanosine-3'-phosphate attached to N-[tris(N-acetylgalactosamine-alkyl)-amidodecanoyl)]-4-hydr oxyprolinol Hyp-(N-acetylgalactosamine-alkyl)3
ttggaggtagcaaacactaag

SEQ ID NO: 2399 - RNA, 23 nt, synthetic construct
  misc_feature 1..23: note = Description of Artificial Sequence: Synthetic oligonucleotide
  source 1..23: mol_type = other RNA
  modified_base 1: mod_base = OTHER; note = 2'-O-methylcytidine-3'- phosphorothioate
  modified_base 2: mod_base = OTHER; note = 2'-fluorouridine -3'-phosphorothioate
  modified_base 3: mod_base = OTHER; note = 2'-O-methyluridine-3'-phosphate
  modified_base 4: mod_base = OTHER; note = 2'-O-methyladenosine-3'-phosphate
  modified_base 5: mod_base = OTHER; note = 2'-O-methylguanosine-3'-phosphate
  modified_base 6: mod_base = OTHER; note = 2'-fluorouridine-3'-phosphate
  modified_base 7: mod_base = OTHER; note = 2'-O-methylguanosine-3'-phosphate
  modified_base 8: mod_base = OTHER; note = 2'-fluorouridine-3'-phosphate
  modified_base 9: mod_base = OTHER; note = 2'-fluorouridine-3'-phosphate
  modified_base 10: mod_base = OTHER; note = 2'-O-methyluridine-3'-phosphate
  modified_base 11: mod_base = OTHER; note = 2'-O-methylguanosine-3'-phosphate
  modified_base 12: mod_base = OTHER; note = 2'-O-methylcytidine-3'-phosphate
  modified_base 13: mod_base = OTHER; note = 2'-O-methyluridine-3'-phosphate
  modified_base 14: mod_base = OTHER; note = 2'-fluoroadenosine-3'-phosphate
  modified_base 15: mod_base = OTHER; note = 2'-O-methylcytidine-3'-phosphate
  modified_base 16: mod_base = OTHER; note = 2'-fluorocytidine-3'-phosphate
  modified_base 17: mod_base = OTHER; note = 2'-O-methyluridine-3'-phosphate
  modified_base 18: mod_base = OTHER; note = 2'-O-methylcytidine-3'-phosphate
  modified_base 19: mod_base = OTHER; note = 2'-O-methylcytidine-3'-phosphate
  modified_base 20: mod_base = OTHER; note = 2'-O-methyladenosine-3'-phosphate
  modified_base 21: mod_base = OTHER; note = 2'-O-methyladenosine-3'- phosphorothioate
  modified_base 22: mod_base = OTHER; note = 2'-O-methyluridine-3'-phosphorothioate
  modified_base 23: mod_base = OTHER; note = 2'-O-methyluridine-3'-phosphate
cttagtgtttgctacctccaatt

SEQ ID NO: 2400 - RNA, 21 nt, synthetic construct
  misc_feature 1..21: note = Description of Artificial Sequence: Synthetic oligonucleotide
  source 1..21: mol_type = other RNA
  modified_base 1: mod_base = OTHER; note = 2'-O-methyladenosine-3'- phosphorothioate
  modified_base 2: mod_base = OTHER; note = 2'-O-methyluridine-3'-phosphorothioate
  modified_base 3: mod_base = OTHER; note = 2'-O-methyluridine-3'-phosphate
  modified_base 4: mod_base = OTHER; note = 2'-O-methylguanosine-3'-phosphate
  modified_base 5: mod_base = OTHER; note = 2'-O-methylguanosine-3'-phosphate
  modified_base 6: mod_base = OTHER; note = 2'-O-methyladenosine-3'-phosphate
  modified_base 7: mod_base = OTHER; note = 2'-fluoroguanosine-3'-phosphate
  modified_base 8: mod_base = OTHER; note = 2'-O-methylguanosine-3'-phosphate
  modified_base 9: mod_base = OTHER; note = 2'-fluorouridine-3'-phosphate
  modified_base 10: mod_base = OTHER; note = 2'-fluoroadenosine-3'-phosphate
  modified_base 11: mod_base = OTHER; note = 2'-fluoroguanosine-3'-phosphate
  modified_base 12: mod_base = OTHER; note = 2'-O-methylcytidine-3'-phosphate
  modified_base 13: mod_base = OTHER; note = 2'-O-methyladenosine-3'-phosphate
  modified_base 14: mod_base = OTHER; note = 2'-O-methyladenosine-3'-phosphate
  modified_base 15: mod_base = OTHER; note = 2'-O-methyladenosine-3'-phosphate
  modified_base 16: mod_base = OTHER; note = 2'-O-methylcytidine-3'-phosphate
  modified_base 17: mod_base = OTHER; note = 2'-O-methyladenosine-3'-phosphate
  modified_base 18: mod_base = OTHER; note = 2'-O-methylcytidine-3'-phosphate
  modified_base 19: mod_base = OTHER; note = 2'-O-methyluridine-3'-phosphate
  modified_base 20: mod_base = OTHER; note = 2'-O-methyladenosine-3'-phosphate
  modified_base 21: mod_base = OTHER; note = 2'-O-methyladenosine-3'-phosphate attached to N-[tris(N-acetylgalactosamine-alkyl)-amidodecanoyl)]-4-hydr oxyprolinol Hyp-(N-acetylgalactosamine-alkyl)3
attggaggtagcaaacactaa

SEQ ID NO: 2401 - RNA, 23 nt, synthetic construct
  misc_feature 1..23: note = Description of Artificial Sequence: Synthetic oligonucleotide
  source 1..23: mol_type = other RNA
  modified_base 1: mod_base = OTHER; note = 2'-O-methyluridine-3'-phosphorothioate
  modified_base 2: mod_base = OTHER; note = 2'-fluorouridine -3'-phosphorothioate
  modified_base 3: mod_base = OTHER; note = 2'-O-methyladenosine-3'-phosphate
  modified_base 4: mod_base = OTHER; note = 2'-O-methylguanosine-3'-phosphate
  modified_base 5: mod_base = OTHER; note = 2'-O-methyluridine-3'-phosphate
  modified_base 6: mod_base = OTHER; note = 2'-fluoroguanosine-3'-phosphate
  modified_base 7: mod_base = OTHER; note = 2'-O-methyluridine-3'-phosphate
  modified_base 8: mod_base = OTHER; note = 2'-fluorouridine-3'-phosphate
  modified_base 9: mod_base = OTHER; note = 2'-fluorouridine-3'-phosphate
  modified_base 10: mod_base = OTHER; note = 2'-O-methylguanosine-3'-phosphate
  modified_base 11: mod_base = OTHER; note = 2'-O-methylcytidine-3'-phosphate
  modified_base 12: mod_base = OTHER; note = 2'-O-methyluridine-3'-phosphate
  modified_base 13: mod_base = OTHER; note = 2'-O-methyladenosine-3'-phosphate
  modified_base 14: mod_base = OTHER; note = 2'-fluorocytidine-3'-phosphate
  modified_base 15: mod_base = OTHER; note = 2'-O-methylcytidine-3'-phosphate
  modified_base 16: mod_base = OTHER; note = 2'-fluorouridine-3'-phosphate
  modified_base 17: mod_base = OTHER; note = 2'-O-methylcytidine-3'-phosphate
  modified_base 18: mod_base = OTHER; note = 2'-O-methylcytidine-3'-phosphate
  modified_base 19: mod_base = OTHER; note = 2'-O-methyladenosine-3'-phosphate
  modified_base 20: mod_base = OTHER; note = 2'-O-methyladenosine-3'-phosphate
  modified_base 21: mod_base = OTHER; note = 2'-O-methyluridine-3'-phosphorothioate
  modified_base 22: mod_base = OTHER; note = 2'-O-methyluridine-3'-phosphorothioate
  modified_base 23: mod_base = OTHER; note = 2'-O-methyluridine-3'-phosphate
ttagtgtttgctacctccaattt

SEQ ID NO: 2402 - RNA, 21 nt, synthetic construct
  misc_feature 1..21: note = Description of Artificial Sequence: Synthetic oligonucleotide
  source 1..21: mol_type = other RNA
  modified_base 1: mod_base = OTHER; note = 2'-O-methyluridine-3'-phosphorothioate
  modified_base 2: mod_base = OTHER; note = 2'-O-methyladenosine-3'- phosphorothioate
  modified_base 3: mod_base = OTHER; note = 2'-O-methyladenosine-3'-phosphate
  modified_base 4: mod_base = OTHER; note = 2'-O-methyladenosine-3'-phosphate
  modified_base 5: mod_base = OTHER; note = 2'-O-methylguanosine-3'-phosphate
  modified_base 6: mod_base = OTHER; note = 2'-O-methyluridine-3'-phosphate
  modified_base 7: mod_base = OTHER; note = 2'-fluoroguanosine-3'-phosphate
  modified_base 8: mod_base = OTHER; note = 2'-O-methylcytidine-3'-phosphate
  modified_base 9: mod_base = OTHER; note = 2'-fluorouridine-3'-phosphate
  modified_base 10: mod_base = OTHER; note = 2'-fluoroguanosine-3'-phosphate
  modified_base 11: mod_base = OTHER; note = 2'-fluorouridine-3'-phosphate
  modified_base 12: mod_base = OTHER; note = 2'-O-methyladenosine-3'-phosphate
  modified_base 13: mod_base = OTHER; note = 2'-O-methyluridine-3'-phosphate
  modified_base 14: mod_base = OTHER; note = 2'-O-methylcytidine-3'-phosphate
  modified_base 15: mod_base = OTHER; note = 2'-O-methylcytidine-3'-phosphate
  modified_base 16: mod_base = OTHER; note = 2'-O-methyluridine-3'-phosphate
  modified_base 17: mod_base = OTHER; note = 2'-O-methyluridine-3'-phosphate
  modified_base 18: mod_base = OTHER; note = 2'-O-methyluridine-3'-phosphate
  modified_base 19: mod_base = OTHER; note = 2'-O-methyladenosine-3'-phosphate
  modified_base 20: mod_base = OTHER; note = 2'-O-methylguanosine-3'-phosphate
  modified_base 21: mod_base = OTHER; note = 2'-O-methyluridine-3'-phosphate attached to N-[tris(N-acetylgalactosamine-alkyl)-amidodecanoyl)]-4-hydr oxyprolinol Hyp-(N-acetylgalactosamine-alkyl)3
taaagtgctgtatcctttagt

SEQ ID NO: 2403 - RNA, 23 nt, synthetic construct
  misc_feature 1..23: note = Description of Artificial Sequence: Synthetic oligonucleotide
  source 1..23: mol_type = other RNA
  modified_base 1: mod_base = OTHER; note = 2'-O-methyladenosine-3'- phosphorothioate
  modified_base 2: mod_base = OTHER; note = 2'-fluorocytidine-3'-phosphorothioate
  modified_base 3: mod_base = OTHER; note = 2'-O-methyluridine-3'-phosphate
  modified_base 4: mod_base = OTHER; note = 2'-O-methyladenosine-3'-phosphate
  modified_base 5: mod_base = OTHER; note = 2'-O-methyladenosine-3'-phosphate
  modified_base 6: mod_base = OTHER; note = 2'-fluoroadenosine-3'-phosphate
  modified_base 7: mod_base = OTHER; note = 2'-O-methylguanosine-3'-phosphate
  modified_base 8: mod_base = OTHER; note = 2'-fluoroguanosine-3'-phosphate
  modified_base 9: mod_base = OTHER; note = 2'-fluoroadenosine-3'-phosphate
  modified_base 10: mod_base = OTHER; note = 2'-O-methyluridine-3'-phosphate
  modified_base 11: mod_base = OTHER; note = 2'-O-methyladenosine-3'-phosphate
  modified_base 12: mod_base = OTHER; note = 2'-O-methylcytidine-3'-phosphate
  modified_base 13: mod_base = OTHER; note = 2'-O-methyladenosine-3'-phosphate
  modified_base 14: mod_base = OTHER; note = 2'-fluoroguanosine-3'-phosphate
  modified_base 15: mod_base = OTHER; note = 2'-O-methylcytidine-3'-phosphate
  modified_base 16: mod_base = OTHER; note = 2'-fluoroadenosine-3'-phosphate
  modified_base 17: mod_base = OTHER; note = 2'-O-methylcytidine-3'-phosphate
  modified_base 18: mod_base = OTHER; note = 2'-O-methyluridine-3'-phosphate
  modified_base 19: mod_base = OTHER; note = 2'-O-methyluridine-3'-phosphate
  modified_base 20: mod_base = OTHER; note = 2'-O-methyluridine-3'-phosphate
  modified_base 21: mod_base = OTHER; note = 2'-O-methyladenosine-3'- phosphorothioate
  modified_base 22: mod_base = OTHER; note = 2'-O-methylguanosine-3'- phosphorothioate
  modified_base 23: mod_base = OTHER; note = 2'-O-methylcytidine-3'-phosphate
actaaaggatacagcactttagc

SEQ ID NO: 2404 - RNA, 21 nt, synthetic construct
  misc_feature 1..21: note = Description of Artificial Sequence: Synthetic oligonucleotide
  source 1..21: mol_type = other RNA
  modified_base 1: mod_base = OTHER; note = 2'-O-methyladenosine-3'- phosphorothioate
  modified_base 2: mod_base = OTHER; note = 2'-O-methyladenosine-3'- phosphorothioate
  modified_base 3: mod_base = OTHER; note = 2'-O-methyladenosine-3'-phosphate
  modified_base 4: mod_base = OTHER; note = 2'-O-methylguanosine-3'-phosphate
  modified_base 5: mod_base = OTHER; note = 2'-O-methyluridine-3'-phosphate
  modified_base 6: mod_base = OTHER; note = 2'-O-methylguanosine-3'-phosphate
  modified_base 7: mod_base = OTHER; note = 2'-fluorocytidine-3'-phosphate
  modified_base 8: mod_base = OTHER; note = 2'-O-methyluridine-3'-phosphate
  modified_base 9: mod_base = OTHER; note = 2'-fluoroguanosine-3'-phosphate
  modified_base 10: mod_base = OTHER; note = 2'-fluorouridine-3'-phosphate
  modified_base 11: mod_base = OTHER; note = 2'-fluoroadenosine-3'-phosphate
  modified_base 12: mod_base = OTHER; note = 2'-O-methyluridine-3'-phosphate
  modified_base 13: mod_base = OTHER; note = 2'-O-methylcytidine-3'-phosphate
  modified_base 14: mod_base = OTHER; note = 2'-O-methylcytidine-3'-phosphate
  modified_base 15: mod_base = OTHER; note = 2'-O-methyluridine-3'-phosphate
  modified_base 16: mod_base = OTHER; note = 2'-O-methyluridine-3'-phosphate
  modified_base 17: mod_base = OTHER; note = 2'-O-methyluridine-3'-phosphate
  modified_base 18: mod_base = OTHER; note = 2'-O-methyladenosine-3'-phosphate
  modified_base 19: mod_base = OTHER; note = 2'-O-methylguanosine-3'-phosphate
  modified_base 20: mod_base = OTHER; note = 2'-O-methyluridine-3'-phosphate
  modified_base 21: mod_base = OTHER; note = 2'-O-methyladenosine-3'-phosphate attached to N-[tris(N-acetylgalactosamine-alkyl)-amidodecanoyl)]-4-hydr oxyprolinol Hyp-(N-acetylgalactosamine-alkyl)3
aaagtgctgtatcctttagta

SEQ ID NO: 2405 - RNA, 23 nt, synthetic construct
  misc_feature 1..23: note = Description of Artificial Sequence: Synthetic oligonucleotide
  source 1..23: mol_type = other RNA
  modified_base 1: mod_base = OTHER; note = 2'-O-methyluridine-3'-phosphorothioate
  modified_base 2: mod_base = OTHER; note = 2'-fluoroadenosine-3'-phosphorothioate
  modified_base 3: mod_base = OTHER; note = 2'-O-methylcytidine-3'-phosphate
  modified_base 4: mod_base = OTHER; note = 2'-O-methyluridine-3'-phosphate
  modified_base 5: mod_base = OTHER; note = 2'-O-methyladenosine-3'-phosphate
  modified_base 6: mod_base = OTHER; note = 2'-fluoroadenosine-3'-phosphate
  modified_base 7: mod_base = OTHER; note = 2'-O-methyladenosine-3'-phosphate
  modified_base 8: mod_base = OTHER; note = 2'-fluoroguanosine-3'-phosphate
  modified_base 9: mod_base = OTHER; note = 2'-fluoroguanosine-3'-phosphate
  modified_base 10: mod_base = OTHER; note = 2'-O-methyladenosine-3'-phosphate
  modified_base 11: mod_base = OTHER; note = 2'-O-methyluridine-3'-phosphate
  modified_base 12: mod_base = OTHER; note = 2'-O-methyladenosine-3'-phosphate
  modified_base 13: mod_base = OTHER; note = 2'-O-methylcytidine-3'-phosphate
  modified_base 14: mod_base = OTHER; note = 2'-fluoroadenosine-3'-phosphate
  modified_base 15: mod_base = OTHER; note = 2'-O-methylguanosine-3'-phosphate
  modified_base 16: mod_base = OTHER; note = 2'-fluorocytidine-3'-phosphate
  modified_base 17: mod_base = OTHER; note = 2'-O-methyladenosine-3'-phosphate
  modified_base 18: mod_base = OTHER; note = 2'-O-methylcytidine-3'-phosphate
  modified_base 19: mod_base = OTHER; note = 2'-O-methyluridine-3'-phosphate
  modified_base 20: mod_base = OTHER; note = 2'-O-methyluridine-3'-phosphate
  modified_base 21: mod_base = OTHER; note = 2'-O-methyluridine-3'-phosphorothioate
  modified_base 22: mod_base = OTHER; note = 2'-O-methyladenosine-3'- phosphorothioate
  modified_base 23: mod_base = OTHER; note = 2'-O-methylguanosine-3'-phosphate
tactaaaggatacagcactttag

SEQ ID NO: 2406 - RNA, 21 nt, synthetic construct
  misc_feature 1..21: note = Description of Artificial Sequence: Synthetic oligonucleotide
  source 1..21: mol_type = other RNA
  modified_base 1: mod_base = OTHER; note = 2'-O-methyladenosine-3'- phosphorothioate
  modified_base 2: mod_base = OTHER; note = 2'-O-methylguanosine-3'- phosphorothioate
  modified_base 3: mod_base = OTHER; note = 2'-O-methylguanosine-3'-phosphate
  modified_base 4: mod_base = OTHER; note = 2'-O-methylcytidine-3'-phosphate
  modified_base 5: mod_base = OTHER; note = 2'-O-methyluridine-3'-phosphate
  modified_base 6: mod_base = OTHER; note = 2'-O-methyladenosine-3'-phosphate
  modified_base 7: mod_base = OTHER; note = 2'-fluoroadenosine-3'-phosphate
  modified_base 8: mod_base = OTHER; note = 2'-O-methyladenosine-3'-phosphate
  modified_base 9: mod_base = OTHER; note = 2'-fluoroguanosine-3'-phosphate
  modified_base 10: mod_base = OTHER; note = 2'-fluorouridine-3'-phosphate
  modified_base 11: mod_base = OTHER; note = 2'-fluoroguanosine-3'-phosphate
  modified_base 12: mod_base = OTHER; note = 2'-O-methylcytidine-3'-phosphate
  modified_base 13: mod_base = OTHER; note = 2'-O-methyluridine-3'-phosphate
  modified_base 14: mod_base = OTHER; note = 2'-O-methylguanosine-3'-phosphate
  modified_base 15: mod_base = OTHER; note = 2'-O-methyluridine-3'-phosphate
  modified_base 16: mod_base = OTHER; note = 2'-O-methyladenosine-3'-phosphate
  modified_base 17: mod_base = OTHER; note = 2'-O-methyluridine-3'-phosphate
  modified_base 18: mod_base = OTHER; note = 2'-O-methylcytidine-3'-phosphate
  modified_base 19: mod_base = OTHER; note = 2'-O-methylcytidine-3'-phosphate
  modified_base 20: mod_base = OTHER; note = 2'-O-methyluridine-3'-phosphate
  modified_base 21: mod_base = OTHER; note = 2'-O-methyluridine-3'-phosphate attached to N-[tris(N-acetylgalactosamine-alkyl)-amidodecanoyl)]-4-hydr oxyprolinol Hyp-(N-acetylgalactosamine-alkyl)3
aggctaaagtgctgtatcctt

SEQ ID NO: 2407 - RNA, 23 nt, synthetic construct
  misc_feature 1..23: note = Description of Artificial Sequence: Synthetic oligonucleotide
  source 1..23: mol_type = other RNA
  modified_base 1: mod_base = OTHER; note = 2'-O-methyladenosine-3'- phosphorothioate
  modified_base 2: mod_base = OTHER; note = 2'-fluoroadenosine-3'-phosphorothioate
  modified_base 3: mod_base = OTHER; note = 2'-O-methylguanosine-3'-phosphate
  modified_base 4: mod_base = OTHER; note = 2'-O-methylguanosine-3'-phosphate
  modified_base 5: mod_base = OTHER; note = 2'-O-methyladenosine-3'-phosphate
  modified_base 6: mod_base = OTHER; note = 2'-fluorouridine-3'-phosphate
  modified_base 7: mod_base = OTHER; note = 2'-O-methyladenosine-3'-phosphate
  modified_base 8: mod_base = OTHER; note = 2'-fluorocytidine-3'-phosphate
  modified_base 9: mod_base = OTHER; note = 2'-fluoroadenosine-3'-phosphate
  modified_base 10: mod_base = OTHER; note = 2'-O-methylguanosine-3'-phosphate
  modified_base 11: mod_base = OTHER; note = 2'-O-methylcytidine-3'-phosphate
  modified_base 12: mod_base = OTHER; note = 2'-O-methyladenosine-3'-phosphate
  modified_base 13: mod_base = OTHER; note = 2'-O-methylcytidine-3'-phosphate
  modified_base 14: mod_base = OTHER; note = 2'-fluorouridine-3'-phosphate
  modified_base 15: mod_base = OTHER; note = 2'-O-methyluridine-3'-phosphate
  modified_base 16: mod_base = OTHER; note = 2'-fluorouridine-3'-phosphate
  modified_base 17: mod_base = OTHER; note = 2'-O-methyladenosine-3'-phosphate
  modified_base 18: mod_base = OTHER; note = 2'-O-methylguanosine-3'-phosphate
  modified_base 19: mod_base = OTHER; note = 2'-O-methylcytidine-3'-phosphate
  modified_base 20: mod_base = OTHER; note = 2'-O-methylcytidine-3'-phosphate
  modified_base 21: mod_base = OTHER; note = 2'-O-methyluridine-3'-phosphorothioate
  modified_base 22: mod_base = OTHER; note = 2'-O-methylguanosine-3'- phosphorothioate
  modified_base 23: mod_base = OTHER; note = 2'-O-methylcytidine-3'-phosphate
aaggatacagcactttagcctgc

SEQ ID NO: 2408 - RNA, 21 nt, synthetic construct
  misc_feature 1..21: note = Description of Artificial Sequence: Synthetic oligonucleotide
  source 1..21: mol_type = other RNA
  modified_base 1: mod_base = OTHER; note = 2'-O-methylcytidine-3'- phosphorothioate
  modified_base 2: mod_base = OTHER; note = 2'-O-methyladenosine-3'- phosphorothioate
  modified_base 3: mod_base = OTHER; note = 2'-O-methylguanosine-3'-phosphate
  modified_base 4: mod_base = OTHER; note = 2'-O-methylguanosine-3'-phosphate
  modified_base 5: mod_base = OTHER; note = 2'-O-methylcytidine-3'-phosphate
  modified_base 6: mod_base = OTHER; note = 2'-O-methyluridine-3'-phosphate
  modified_base 7: mod_base = OTHER; note = 2'-fluoroadenosine-3'-phosphate
  modified_base 8: mod_base = OTHER; note = 2'-O-methyladenosine-3'-phosphate
  modified_base 9: mod_base = OTHER; note = 2'-fluoroadenosine-3'-phosphate
  modified_base 10: mod_base = OTHER; note = 2'-fluoroguanosine-3'-phosphate
  modified_base 11: mod_base = OTHER; note = 2'-fluorouridine-3'-phosphate
  modified_base 12: mod_base = OTHER; note = 2'-O-methylguanosine-3'-phosphate
  modified_base 13: mod_base = OTHER; note = 2'-O-methylcytidine-3'-phosphate
  modified_base 14: mod_base = OTHER; note = 2'-O-methyluridine-3'-phosphate
  modified_base 15: mod_base = OTHER; note = 2'-O-methylguanosine-3'-phosphate
  modified_base 16: mod_base = OTHER; note = 2'-O-methyluridine-3'-phosphate
  modified_base 17: mod_base = OTHER; note = 2'-O-methyladenosine-3'-phosphate
  modified_base 18: mod_base = OTHER; note = 2'-O-methyluridine-3'-phosphate
  modified_base 19: mod_base = OTHER; note = 2'-O-methylcytidine-3'-phosphate
  modified_base 20: mod_base = OTHER; note = 2'-O-methylcytidine-3'-phosphate
  modified_base 21: mod_base = OTHER; note = 2'-O-methyluridine-3'-phosphate attached to N-[tris(N-acetylgalactosamine-alkyl)-amidodecanoyl)]-4-hydr oxyprolinol Hyp-(N-acetylgalactosamine-alkyl)3
caggctaaagtgctgtatcct

SEQ ID NO: 2409 - RNA, 23 nt, synthetic construct
  misc_feature 1..23: note = Description of Artificial Sequence: Synthetic oligonucleotide
  source 1..23: mol_type = other RNA
  modified_base 1: mod_base = OTHER; note = 2'-O-methyladenosine-3'- phosphorothioate
  modified_base 2: mod_base = OTHER; note = 2'-fluoroguanosine-3'-phosphorothioate
  modified_base 3: mod_base = OTHER; note = 2'-O-methylguanosine-3'-phosphate
  modified_base 4: mod_base = OTHER; note = 2'-O-methyladenosine-3'-phosphate
  modified_base 5: mod_base = OTHER; note = 2'-O-methyluridine-3'-phosphate
  modified_base 6: mod_base = OTHER; note = 2'-fluoroadenosine-3'-phosphate
  modified_base 7: mod_base = OTHER; note = 2'-O-methylcytidine-3'-phosphate
  modified_base 8: mod_base = OTHER; note = 2'-fluoroadenosine-3'-phosphate
  modified_base 9: mod_base = OTHER; note = 2'-fluoroguanosine-3'-phosphate
  modified_base 10: mod_base = OTHER; note = 2'-O-methylcytidine-3'-phosphate
  modified_base 11: mod_base = OTHER; note = 2'-O-methyladenosine-3'-phosphate
  modified_base 12: mod_base = OTHER; note = 2'-O-methylcytidine-3'-phosphate
  modified_base 13: mod_base = OTHER; note = 2'-O-methyluridine-3'-phosphate
  modified_base 14: mod_base = OTHER; note = 2'-fluorouridine-3'-phosphate
  modified_base 15: mod_base = OTHER; note = 2'-O-methyluridine-3'-phosphate
  modified_base 16: mod_base = OTHER; note = 2'-fluoroadenosine-3'-phosphate
  modified_base 17: mod_base = OTHER; note = 2'-O-methylguanosine-3'-phosphate
  modified_base 18: mod_base = OTHER; note = 2'-O-methylcytidine-3'-phosphate
  modified_base 19: mod_base = OTHER; note = 2'-O-methylcytidine-3'-phosphate
  modified_base 20: mod_base = OTHER; note = 2'-O-methyluridine-3'-phosphate
  modified_base 21: mod_base = OTHER; note = 2'-O-methylguanosine-3'- phosphorothioate
  modified_base 22: mod_base = OTHER; note = 2'-O-methylcytidine-3'- phosphorothioate
  modified_base 23: mod_base = OTHER; note = 2'-O-methylcytidine-3'-phosphate
aggatacagcactttagcctgcc

SEQ ID NO: 2410 - RNA, 21 nt, synthetic construct
  misc_feature 1..21: note = Description of Artificial Sequence: Synthetic oligonucleotide
  source 1..21: mol_type = other RNA
  modified_base 1: mod_base = OTHER; note = 2'-O-methyladenosine-3'- phosphorothioate
  modified_base 2: mod_base = OTHER; note = 2'-O-methyladenosine-3'- phosphorothioate
  modified_base 3: mod_base = OTHER; note = 2'-O-methylguanosine-3'-phosphate
  modified_base 4: mod_base = OTHER; note = 2'-O-methyladenosine-3'-phosphate
  modified_base 5: mod_base = OTHER; note = 2'-O-methylcytidine-3'-phosphate
  modified_base 6: mod_base = OTHER; note = 2'-O-methyladenosine-3'-phosphate
  modified_base 7: mod_base = OTHER; note = 2'-fluorouridine-3'-phosphate
  modified_base 8: mod_base = OTHER; note = 2'-O-methyluridine-3'-phosphate
  modified_base 9: mod_base = OTHER; note = 2'-fluoroguanosine-3'-phosphate
  modified_base 10: mod_base = OTHER; note = 2'-fluoroguanosine-3'-phosphate
  modified_base 11: mod_base = OTHER; note = 2'-fluorouridine-3'-phosphate
  modified_base 12: mod_base = OTHER; note = 2'-O-methylguanosine-3'-phosphate
  modified_base 13: mod_base = OTHER; note = 2'-O-methyladenosine-3'-phosphate
  modified_base 14: mod_base = OTHER; note = 2'-O-methylguanosine-3'-phosphate
  modified_base 15: mod_base = OTHER; note = 2'-O-methylguanosine-3'-phosphate
  modified_base 16: mod_base = OTHER; note = 2'-O-methyladenosine-3'-phosphate
  modified_base 17: mod_base = OTHER; note = 2'-O-methyladenosine-3'-phosphate
  modified_base 18: mod_base = OTHER; note = 2'-O-methyladenosine-3'-phosphate
  modified_base 19: mod_base = OTHER; note = 2'-O-methyladenosine-3'-phosphate
  modified_base 20: mod_base = OTHER; note = 2'-O-methyladenosine-3'-phosphate
  modified_base 21: mod_base = OTHER; note = 2'-O-methyluridine-3'-phosphate attached to N-[tris(N-acetylgalactosamine-alkyl)-amidodecanoyl)]-4-hydr oxyprolinol Hyp-(N-acetylgalactosamine-alkyl)3
aagacattggtgaggaaaaat

SEQ ID NO: 2411 - RNA, 23 nt, synthetic construct
  misc_feature 1..23: note = Description of Artificial Sequence: Synthetic oligonucleotide
  source 1..23: mol_type = other RNA
  modified_base 1: mod_base = OTHER; note = 2'-O-methyladenosine-3'- phosphorothioate
  modified_base 2: mod_base = OTHER; note = 2'-fluorouridine -3'-phosphorothioate
  modified_base 3: mod_base = OTHER; note = 2'-O-methyluridine-3'-phosphate
  modified_base 4: mod_base = OTHER; note = 2'-O-methyluridine-3'-phosphate
  modified_base 5: mod_base = OTHER; note = 2'-O-methyluridine-3'-phosphate
  modified_base 6: mod_base = OTHER; note = 2'-fluorouridine-3'-phosphate
  modified_base 7: mod_base = OTHER; note = 2'-O-methylcytidine-3'-phosphate
  modified_base 8: mod_base = OTHER; note = 2'-fluorocytidine-3'-phosphate
  modified_base 9: mod_base = OTHER; note = 2'-fluorouridine-3'-phosphate
  modified_base 10: mod_base = OTHER; note = 2'-O-methylcytidine-3'-phosphate
  modified_base 11: mod_base = OTHER; note = 2'-O-methyladenosine-3'-phosphate
  modified_base 12: mod_base = OTHER; note = 2'-O-methylcytidine-3'-phosphate
  modified_base 13: mod_base = OTHER; note = 2'-O-methylcytidine-3'-phosphate
  modified_base 14: mod_base = OTHER; note = 2'-fluoroadenosine-3'-phosphate
  modified_base 15: mod_base = OTHER; note = 2'-O-methyladenosine-3'-phosphate
  modified_base 16: mod_base = OTHER; note = 2'-fluorouridine-3'-phosphate
  modified_base 17: mod_base = OTHER; note = 2'-O-methylguanosine-3'-phosphate
  modified_base 18: mod_base = OTHER; note = 2'-O-methyluridine-3'-phosphate
  modified_base 19: mod_base = OTHER; note = 2'-O-methylcytidine-3'-phosphate
  modified_base 20: mod_base = OTHER; note = 2'-O-methyluridine-3'-phosphate
  modified_base 21: mod_base = OTHER; note = 2'-O-methyluridine-3'-phosphorothioate
  modified_base 22: mod_base = OTHER; note = 2'-O-methylguanosine-3'- phosphorothioate
  modified_base 23: mod_base = OTHER; note = 2'-O-methyluridine-3'-phosphate
atttttcctcaccaatgtcttgt

SEQ ID NO: 2412 - RNA, 21 nt, synthetic construct
  misc_feature 1..21: note = Description of Artificial Sequence: Synthetic oligonucleotide
  source 1..21: mol_type = other RNA
  modified_base 1: mod_base = OTHER; note = 2'-O-methyladenosine-3'- phosphorothioate
  modified_base 2: mod_base = OTHER; note = 2'-O-methylguanosine-3'- phosphorothioate
  modified_base 3: mod_base = OTHER; note = 2'-O-methyladenosine-3'-phosphate
  modified_base 4: mod_base = OTHER; note = 2'-O-methylcytidine-3'-phosphate
  modified_base 5: mod_base = OTHER; note = 2'-O-methyladenosine-3'-phosphate
  modified_base 6: mod_base = OTHER; note = 2'-O-methyluridine-3'-phosphate
  modified_base 7: mod_base = OTHER; note = 2'-fluorouridine-3'-phosphate
  modified_base 8: mod_base = OTHER; note = 2'-O-methylguanosine-3'-phosphate
  modified_base 9: mod_base = OTHER; note = 2'-fluoroguanosine-3'-phosphate
  modified_base 10: mod_base = OTHER; note = 2'-fluorouridine-3'-phosphate
  modified_base 11: mod_base = OTHER; note = 2'-fluoroguanosine-3'-phosphate
  modified_base 12: mod_base = OTHER; note = 2'-O-methyladenosine-3'-phosphate
  modified_base 13: mod_base = OTHER; note = 2'-O-methylguanosine-3'-phosphate
  modified_base 14: mod_base = OTHER; note = 2'-O-methylguanosine-3'-phosphate
  modified_base 15: mod_base = OTHER; note = 2'-O-methyladenosine-3'-phosphate
  modified_base 16: mod_base = OTHER; note = 2'-O-methyladenosine-3'-phosphate
  modified_base 17: mod_base = OTHER; note = 2'-O-methyladenosine-3'-phosphate
  modified_base 18: mod_base = OTHER; note = 2'-O-methyladenosine-3'-phosphate
  modified_base 19: mod_base = OTHER; note = 2'-O-methyladenosine-3'-phosphate
  modified_base 20: mod_base = OTHER; note = 2'-O-methyluridine-3'-phosphate
  modified_base 21: mod_base = OTHER; note = 2'-O-methylcytidine-3'-phosphate attached to N-[tris(N-acetylgalactosamine-alkyl)-amidodecanoyl)]-4-hydr oxyprolinol Hyp-(N-acetylgalactosamine-alkyl)3
agacattggtgaggaaaaatc

SEQ ID NO: 2413 - RNA, 23 nt, synthetic construct
  misc_feature 1..23: note = Description of Artificial Sequence: Synthetic oligonucleotide
  source 1..23: mol_type = other RNA
  modified_base 1: mod_base = OTHER; note = 2'-O-methylguanosine-3'- phosphorothioate
  modified_base 2: mod_base = OTHER; note = 2'-fluoroadenosine-3'-phosphorothioate
  modified_base 3: mod_base = OTHER; note = 2'-O-methyluridine-3'-phosphate
  modified_base 4: mod_base = OTHER; note = 2'-O-methyluridine-3'-phosphate
  modified_base 5: mod_base = OTHER; note = 2'-O-methyluridine-3'-phosphate
  modified_base 6: mod_base = OTHER; note = 2'-fluorouridine-3'-phosphate
  modified_base 7: mod_base = OTHER; note = 2'-O-methyluridine-3'-phosphate
  modified_base 8: mod_base = OTHER; note = 2'-fluorocytidine-3'-phosphate
  modified_base 9: mod_base = OTHER; note = 2'-fluorocytidine-3'-phosphate
  modified_base 10: mod_base = OTHER; note = 2'-O-methyluridine-3'-phosphate
  modified_base 11: mod_base = OTHER; note = 2'-O-methylcytidine-3'-phosphate
  modified_base 12: mod_base = OTHER; note = 2'-O-methyladenosine-3'-phosphate
  modified_base 13: mod_base = OTHER; note = 2'-O-methylcytidine-3'-phosphate
  modified_base 14: mod_base = OTHER; note = 2'-fluorocytidine-3'-phosphate
  modified_base 15: mod_base = OTHER; note = 2'-O-methyladenosine-3'-phosphate
  modified_base 16: mod_base = OTHER; note = 2'-fluoroadenosine-3'-phosphate
  modified_base 17: mod_base = OTHER; note = 2'-O-methyluridine-3'-phosphate
  modified_base 18: mod_base = OTHER; note = 2'-O-methylguanosine-3'-phosphate
  modified_base 19: mod_base = OTHER; note = 2'-O-methyluridine-3'-phosphate
  modified_base 20: mod_base = OTHER; note = 2'-O-methylcytidine-3'-phosphate
  modified_base 21: mod_base = OTHER; note = 2'-O-methyluridine-3'-phosphorothioate
  modified_base 22: mod_base = OTHER; note = 2'-O-methyluridine-3'-phosphorothioate
  modified_base 23: mod_base = OTHER; note = 2'-O-methylguanosine-3'-phosphate
gatttttcctcaccaatgtcttg

SEQ ID NO: 2414 - RNA, 21 nt, synthetic construct
  misc_feature 1..21: note = Description of Artificial Sequence: Synthetic oligonucleotide
  source 1..21: mol_type = other RNA
  modified_base 1: mod_base = OTHER; note = 2'-O-methylcytidine-3'- phosphorothioate
  modified_base 2: mod_base = OTHER; note = 2'-O-methylguanosine-3'- phosphorothioate
  modified_base 3: mod_base = OTHER; note = 2'-O-methyladenosine-3'-phosphate
  modified_base 4: mod_base = OTHER; note = 2'-O-methylcytidine-3'-phosphate
  modified_base 5: mod_base = OTHER; note = 2'-O-methyladenosine-3'-phosphate
  modified_base 6: mod_base = OTHER; note = 2'-O-methyladenosine-3'-phosphate
  modified_base 7: mod_base = OTHER; note = 2'-fluoroguanosine-3'-phosphate
  modified_base 8: mod_base = OTHER; note = 2'-O-methyladenosine-3'-phosphate
  modified_base 9: mod_base = OTHER; note = 2'-fluorocytidine-3'-phosphate
  modified_base 10: mod_base = OTHER; note = 2'-fluoroadenosine-3'-phosphate
  modified_base 11: mod_base = OTHER; note = 2'-fluorouridine-3'-phosphate
  modified_base 12: mod_base = OTHER; note = 2'-O-methyluridine-3'-phosphate
  modified_base 13: mod_base = OTHER; note = 2'-O-methylguanosine-3'-phosphate
  modified_base 14: mod_base = OTHER; note = 2'-O-methylguanosine-3'-phosphate
  modified_base 15: mod_base = OTHER; note = 2'-O-methyluridine-3'-phosphate
  modified_base 16: mod_base = OTHER; note = 2'-O-methylguanosine-3'-phosphate
  modified_base 17: mod_base = OTHER; note = 2'-O-methyladenosine-3'-phosphate
  modified_base 18: mod_base = OTHER; note = 2'-O-methylguanosine-3'-phosphate
  modified_base 19: mod_base = OTHER; note = 2'-O-methylguanosine-3'-phosphate
  modified_base 20: mod_base = OTHER; note = 2'-O-methyladenosine-3'-phosphate
  modified_base 21: mod_base = OTHER; note = 2'-O-methyladenosine-3'-phosphate attached to N-[tris(N-acetylgalactosamine-alkyl)-amidodecanoyl)]-4-hydr oxyprolinol Hyp-(N-acetylgalactosamine-alkyl)3
cgacaagacattggtgaggaa

SEQ ID NO: 2415 - RNA, 23 nt, synthetic construct
  misc_feature 1..23: note = Description of Artificial Sequence: Synthetic oligonucleotide
  source 1..23: mol_type = other RNA
  modified_base 1: mod_base = OTHER; note = 2'-O-methyluridine-3'-phosphorothioate
  modified_base 2: mod_base = OTHER; note = 2'-fluorouridine -3'-phosphorothioate
  modified_base 3: mod_base = OTHER; note = 2'-O-methylcytidine-3'-phosphate
  modified_base 4: mod_base = OTHER; note = 2'-O-methylcytidine-3'-phosphate
  modified_base 5: mod_base = OTHER; note = 2'-O-methyluridine-3'-phosphate
  modified_base 6: mod_base = OTHER; note = 2'-fluorocytidine-3'-phosphate
  modified_base 7: mod_base = OTHER; note = 2'-O-methyladenosine-3'-phosphate
  modified_base 8: mod_base = OTHER; note = 2'-fluorocytidine-3'-phosphate
  modified_base 9: mod_base = OTHER; note = 2'-fluorocytidine-3'-phosphate
  modified_base 10: mod_base = OTHER; note = 2'-O-methyladenosine-3'-phosphate
  modified_base 11: mod_base = OTHER; note = 2'-O-methyladenosine-3'-phosphate
  modified_base 12: mod_base = OTHER; note = 2'-O-methyluridine-3'-phosphate
  modified_base 13: mod_base = OTHER; note = 2'-O-methylguanosine-3'-phosphate
  modified_base 14: mod_base = OTHER; note = 2'-fluorouridine-3'-phosphate
  modified_base 15: mod_base = OTHER; note = 2'-O-methylcytidine-3'-phosphate
  modified_base 16: mod_base = OTHER; note = 2'-fluorouridine-3'-phosphate
  modified_base 17: mod_base = OTHER; note = 2'-O-methyluridine-3'-phosphate
  modified_base 18: mod_base = OTHER; note = 2'-O-methylguanosine-3'-phosphate
  modified_base 19: mod_base = OTHER; note = 2'-O-methyluridine-3'-phosphate
  modified_base 20: mod_base = OTHER; note = 2'-O-methylcytidine-3'-phosphate
  modified_base 21: mod_base = OTHER; note = 2'-O-methylguanosine-3'- phosphorothioate
  modified_base 22: mod_base = OTHER; note = 2'-O-methyladenosine-3'- phosphorothioate
  modified_base 23: mod_base = OTHER; note = 2'-O-methyluridine-3'-phosphate
ttcctcaccaatgtcttgtcgat

SEQ ID NO: 2416 - RNA, 21 nt, synthetic construct
  misc_feature 1..21: note = Description of Artificial Sequence: Synthetic oligonucleotide
  source 1..21: mol_type = other RNA
  modified_base 1: mod_base = OTHER; note = 2'-O-methyluridine-3'-phosphorothioate
  modified_base 2: mod_base = OTHER; note = 2'-O-methylcytidine-3'- phosphorothioate
  modified_base 3: mod_base = OTHER; note = 2'-O-methylguanosine-3'-phosphate
  modified_base 4: mod_base = OTHER; note = 2'-O-methyladenosine-3'-phosphate
  modified_base 5: mod_base = OTHER; note = 2'-O-methylcytidine-3'-phosphate
  modified_base 6: mod_base = OTHER; note = 2'-O-methyladenosine-3'-phosphate
  modified_base 7: mod_base = OTHER; note = 2'-fluoroadenosine-3'-phosphate
  modified_base 8: mod_base = OTHER; note = 2'-O-methylguanosine-3'-phosphate
  modified_base 9: mod_base = OTHER; note = 2'-fluoroadenosine-3'-phosphate
  modified_base 10: mod_base = OTHER; note = 2'-fluorocytidine-3'-phosphate
  modified_base 11: mod_base = OTHER; note = 2'-fluoroadenosine-3'-phosphate
  modified_base 12: mod_base = OTHER; note = 2'-O-methyluridine-3'-phosphate
  modified_base 13: mod_base = OTHER; note = 2'-O-methyluridine-3'-phosphate
  modified_base 14: mod_base = OTHER; note = 2'-O-methylguanosine-3'-phosphate
  modified_base 15: mod_base = OTHER; note = 2'-O-methylguanosine-3'-phosphate
  modified_base 16: mod_base = OTHER; note = 2'-O-methyluridine-3'-phosphate
  modified_base 17: mod_base = OTHER; note = 2'-O-methylguanosine-3'-phosphate
  modified_base 18: mod_base = OTHER; note = 2'-O-methyladenosine-3'-phosphate
  modified_base 19: mod_base = OTHER; note = 2'-O-methylguanosine-3'-phosphate
  modified_base 20: mod_base = OTHER; note = 2'-O-methylguanosine-3'-phosphate
  modified_base 21: mod_base = OTHER; note = 2'-O-methyladenosine-3'-phosphate attached to N-[tris(N-acetylgalactosamine-alkyl)-amidodecanoyl)]-4-hydr oxyprolinol Hyp-(N-acetylgalactosamine-alkyl)3
tcgacaagacattggtgagga

SEQ ID NO: 2417 - RNA, 23 nt, synthetic construct
  misc_feature 1..23: note = Description of Artificial Sequence: Synthetic oligonucleotide
  source 1..23: mol_type = other RNA
  modified_base 1: mod_base = OTHER; note = 2'-O-methyluridine-3'-phosphorothioate
  modified_base 2: mod_base = OTHER; note = 2'-fluorocytidine-3'-phosphorothioate
  modified_base 3: mod_base = OTHER; note = 2'-O-methylcytidine-3'-phosphate
  modified_base 4: mod_base = OTHER; note = 2'-O-methyluridine-3'-phosphate
  modified_base 5: mod_base = OTHER; note = 2'-O-methylcytidine-3'-phosphate
  modified_base 6: mod_base = OTHER; note = 2'-fluoroadenosine-3'-phosphate
  modified_base 7: mod_base = OTHER; note = 2'-O-methylcytidine-3'-phosphate
  modified_base 8: mod_base = OTHER; note = 2'-fluorocytidine-3'-phosphate
  modified_base 9: mod_base = OTHER; note = 2'-fluoroadenosine-3'-phosphate
  modified_base 10: mod_base = OTHER; note = 2'-O-methyladenosine-3'-phosphate
  modified_base 11: mod_base = OTHER; note = 2'-O-methyluridine-3'-phosphate
  modified_base 12: mod_base = OTHER; note = 2'-O-methylguanosine-3'-phosphate
  modified_base 13: mod_base = OTHER; note = 2'-O-methyluridine-3'-phosphate
  modified_base 14: mod_base = OTHER; note = 2'-fluorocytidine-3'-phosphate
  modified_base 15: mod_base = OTHER; note = 2'-O-methyluridine-3'-phosphate
  modified_base 16: mod_base = OTHER; note = 2'-fluorouridine-3'-phosphate
  modified_base 17: mod_base = OTHER; note = 2'-O-methylguanosine-3'-phosphate
  modified_base 18: mod_base = OTHER; note = 2'-O-methyluridine-3'-phosphate
  modified_base 19: mod_base = OTHER; note = 2'-O-methylcytidine-3'-phosphate
  modified_base 20: mod_base = OTHER; note = 2'-O-methylguanosine-3'-phosphate
  modified_base 21: mod_base = OTHER; note = 2'-O-methyladenosine-3'- phosphorothioate
  modified_base 22: mod_base = OTHER; note = 2'-O-methyluridine-3'-phosphorothioate
  modified_base 23: mod_base = OTHER; note = 2'-O-methylguanosine-3'-phosphate
tcctcaccaatgtcttgtcgatg

SEQ ID NO: 2418 - RNA, 21 nt, synthetic construct
  misc_feature 1..21: note = Description of Artificial Sequence: Synthetic oligonucleotide
  source 1..21: mol_type = other RNA
  modified_base 1: mod_base = OTHER; note = 2'-O-methyladenosine-3'- phosphorothioate
  modified_base 2: mod_base = OTHER; note = 2'-O-methyladenosine-3'- phosphorothioate
  modified_base 3: mod_base = OTHER; note = 2'-O-methylguanosine-3'-phosphate
  modified_base 4: mod_base = OTHER; note = 2'-O-methyladenosine-3'-phosphate
  modified_base 5: mod_base = OTHER; note = 2'-O-methyluridine-3'-phosphate
  modified_base 6: mod_base = OTHER; note = 2'-O-methylguanosine-3'-phosphate
  modified_base 7: mod_base = OTHER; note = 2'-fluorouridine-3'-phosphate
  modified_base 8: mod_base = OTHER; note = 2'-O-methylcytidine-3'-phosphate
  modified_base 9: mod_base = OTHER; note = 2'-fluorocytidine-3'-phosphate
  modified_base 10: mod_base = OTHER; note = 2'-fluorouridine-3'-phosphate
  modified_base 11: mod_base = OTHER; note = 2'-fluorocytidine-3'-phosphate
  modified_base 12: mod_base = OTHER; note = 2'-O-methylguanosine-3'-phosphate
  modified_base 13: mod_base = OTHER; note = 2'-O-methyladenosine-3'-phosphate
  modified_base 14: mod_base = OTHER; note = 2'-O-methylguanosine-3'-phosphate
  modified_base 15: mod_base = OTHER; note = 2'-O-methyladenosine-3'-phosphate
  modified_base 16: mod_base = OTHER; note = 2'-O-methyluridine-3'-phosphate
  modified_base 17: mod_base = OTHER; note = 2'-O-methyladenosine-3'-phosphate
  modified_base 18: mod_base = OTHER; note = 2'-O-methylcytidine-3'-phosphate
  modified_base 19: mod_base = OTHER; note = 2'-O-methyluridine-3'-phosphate
  modified_base 20: mod_base = OTHER; note = 2'-O-methyladenosine-3'-phosphate
  modified_base 21: mod_base = OTHER; note = 2'-O-methyladenosine-3'-phosphate attached to N-[tris(N-acetylgalactosamine-alkyl)-amidodecanoyl)]-4-hydr oxyprolinol Hyp-(N-acetylgalactosamine-alkyl)3
aagatgtcctcgagatactaa

SEQ ID NO: 2419 - RNA, 23 nt, synthetic construct
  misc_feature 1..23: note = Description of Artificial Sequence: Synthetic oligonucleotide
  source 1..23: mol_type = other RNA
  modified_base 1: mod_base = OTHER; note = 2'-O-methyluridine-3'-phosphorothioate
  modified_base 2: mod_base = OTHER; note = 2'-fluorouridine -3'-phosphorothioate
  modified_base 3: mod_base = OTHER; note = 2'-O-methyladenosine-3'-phosphate
  modified_base 4: mod_base = OTHER; note = 2'-O-methylguanosine-3'-phosphate
  modified_base 5: mod_base = OTHER; note = 2'-O-methyluridine-3'-phosphate
  modified_base 6: mod_base = OTHER; note = 2'-fluoroadenosine-3'-phosphate
  modified_base 7: mod_base = OTHER; note = 2'-O-methyluridine-3'-phosphate
  modified_base 8: mod_base = OTHER; note = 2'-fluorocytidine-3'-phosphate
  modified_base 9: mod_base = OTHER; note = 2'-fluorouridine-3'-phosphate
  modified_base 10: mod_base = OTHER; note = 2'-O-methylcytidine-3'-phosphate
  modified_base 11: mod_base = OTHER; note = 2'-O-methylguanosine-3'-phosphate
  modified_base 12: mod_base = OTHER; note = 2'-O-methyladenosine-3'-phosphate
  modified_base 13: mod_base = OTHER; note = 2'-O-methylguanosine-3'-phosphate
  modified_base 14: mod_base = OTHER; note = 2'-fluoroguanosine-3'-phosphate
  modified_base 15: mod_base = OTHER; note = 2'-O-methyladenosine-3'-phosphate
  modified_base 16: mod_base = OTHER; note = 2'-fluorocytidine-3'-phosphate
  modified_base 17: mod_base = OTHER; note = 2'-O-methyladenosine-3'-phosphate
  modified_base 18: mod_base = OTHER; note = 2'-O-methyluridine-3'-phosphate
  modified_base 19: mod_base = OTHER; note = 2'-O-methylcytidine-3'-phosphate
  modified_base 20: mod_base = OTHER; note = 2'-O-methyluridine-3'-phosphate
  modified_base 21: mod_base = OTHER; note = 2'-O-methyluridine-3'-phosphorothioate
  modified_base 22: mod_base = OTHER; note = 2'-O-methylguanosine-3'- phosphorothioate
  modified_base 23: mod_base = OTHER; note = 2'-O-methyladenosine-3'-phosphate
ttagtatctcgaggacatcttga

SEQ ID NO: 2420 - RNA, 21 nt, synthetic construct
  misc_feature 1..21: note = Description of Artificial Sequence: Synthetic oligonucleotide
  source 1..21: mol_type = other RNA
  modified_base 1: mod_base = OTHER; note = 2'-O-methyladenosine-3'- phosphorothioate
  modified_base 2: mod_base = OTHER; note = 2'-O-methylguanosine-3'- phosphorothioate
  modified_base 3: mod_base = OTHER; note = 2'-O-methyladenosine-3'-phosphate
  modified_base 4: mod_base = OTHER; note = 2'-O-methyluridine-3'-phosphate
  modified_base 5: mod_base = OTHER; note = 2'-O-methylguanosine-3'-phosphate
  modified_base 6: mod_base = OTHER; note = 2'-O-methyluridine-3'-phosphate
  modified_base 7: mod_base = OTHER; note = 2'-fluorocytidine-3'-phosphate
  modified_base 8: mod_base = OTHER; note = 2'-O-methylcytidine-3'-phosphate
  modified_base 9: mod_base = OTHER; note = 2'-fluorouridine-3'-phosphate
  modified_base 10: mod_base = OTHER; note = 2'-fluorocytidine-3'-phosphate
  modified_base 11: mod_base = OTHER; note = 2'-fluoroguanosine-3'-phosphate
  modified_base 12: mod_base = OTHER; note = 2'-O-methyladenosine-3'-phosphate
  modified_base 13: mod_base = OTHER; note = 2'-O-methylguanosine-3'-phosphate
  modified_base 14: mod_base = OTHER; note = 2'-O-methyladenosine-3'-phosphate
  modified_base 15: mod_base = OTHER; note = 2'-O-methyluridine-3'-phosphate
  modified_base 16: mod_base = OTHER; note = 2'-O-methyladenosine-3'-phosphate
  modified_base 17: mod_base = OTHER; note = 2'-O-methylcytidine-3'-phosphate
  modified_base 18: mod_base = OTHER; note = 2'-O-methyluridine-3'-phosphate
  modified_base 19: mod_base = OTHER; note = 2'-O-methyladenosine-3'-phosphate
  modified_base 20: mod_base = OTHER; note = 2'-O-methyladenosine-3'-phosphate
  modified_base 21: mod_base = OTHER; note = 2'-O-methyladenosine-3'-phosphate attached to N-[tris(N-acetylgalactosamine-alkyl)-amidodecanoyl)]-4-hydr oxyprolinol Hyp-(N-acetylgalactosamine-alkyl)3
agatgtcctcgagatactaaa

SEQ ID NO: 2421 - RNA, 23 nt, synthetic construct
  misc_feature 1..23: note = Description of Artificial Sequence: Synthetic oligonucleotide
  source 1..23: mol_type = other RNA
  modified_base 1: mod_base = OTHER; note = 2'-O-methyluridine-3'-phosphorothioate
  modified_base 2: mod_base = OTHER; note = 2'-fluorouridine -3'-phosphorothioate
  modified_base 3: mod_base = OTHER; note = 2'-O-methyluridine-3'-phosphate
  modified_base 4: mod_base = OTHER; note = 2'-O-methyladenosine-3'-phosphate
  modified_base 5: mod_base = OTHER; note = 2'-O-methylguanosine-3'-phosphate
  modified_base 6: mod_base = OTHER; note = 2'-fluorouridine-3'-phosphate
  modified_base 7: mod_base = OTHER; note = 2'-O-methyladenosine-3'-phosphate
  modified_base 8: mod_base = OTHER; note = 2'-fluorouridine-3'-phosphate
  modified_base 9: mod_base = OTHER; note = 2'-fluorocytidine-3'-phosphate
  modified_base 10: mod_base = OTHER; note = 2'-O-methyluridine-3'-phosphate
  modified_base 11: mod_base = OTHER; note = 2'-O-methylcytidine-3'-phosphate
  modified_base 12: mod_base = OTHER; note = 2'-O-methylguanosine-3'-phosphate
  modified_base 13: mod_base = OTHER; note = 2'-O-methyladenosine-3'-phosphate
  modified_base 14: mod_base = OTHER; note = 2'-fluoroguanosine-3'-phosphate
  modified_base 15: mod_base = OTHER; note = 2'-O-methylguanosine-3'-phosphate
  modified_base 16: mod_base = OTHER; note = 2'-fluoroadenosine-3'-phosphate
  modified_base 17: mod_base = OTHER; note = 2'-O-methylcytidine-3'-phosphate
  modified_base 18: mod_base = OTHER; note = 2'-O-methyladenosine-3'-phosphate
  modified_base 19: mod_base = OTHER; note = 2'-O-methyluridine-3'-phosphate
  modified_base 20: mod_base = OTHER; note = 2'-O-methylcytidine-3'-phosphate
  modified_base 21: mod_base = OTHER; note = 2'-O-methyluridine-3'-phosphorothioate
  modified_base 22: mod_base = OTHER; note = 2'-O-methyluridine-3'-phosphorothioate
  modified_base 23: mod_base = OTHER; note = 2'-O-methylguanosine-3'-phosphate
tttagtatctcgaggacatcttg

SEQ ID NO: 2422 - RNA, 21 nt, synthetic construct
  misc_feature 1..21: note = Description of Artificial Sequence: Synthetic oligonucleotide
  source 1..21: mol_type = other RNA
  modified_base 1: mod_base = OTHER; note = 2'-O-methylguanosine-3'- phosphorothioate
  modified_base 2: mod_base = OTHER; note = 2'-O-methyluridine-3'-phosphorothioate
  modified_base 3: mod_base = OTHER; note = 2'-O-methyluridine-3'-phosphate
  modified_base 4: mod_base = OTHER; note = 2'-O-methylcytidine-3'-phosphate
  modified_base 5: mod_base = OTHER; note = 2'-O-methyladenosine-3'-phosphate
  modified_base 6: mod_base = OTHER; note = 2'-O-methyladenosine-3'-phosphate
  modified_base 7: mod_base = OTHER; note = 2'-fluoroguanosine-3'-phosphate
  modified_base 8: mod_base = OTHER; note = 2'-O-methyladenosine-3'-phosphate
  modified_base 9: mod_base = OTHER; note = 2'-fluorouridine-3'-phosphate
  modified_base 10: mod_base = OTHER; note = 2'-fluoroguanosine-3'-phosphate
  modified_base 11: mod_base = OTHER; note = 2'-fluorouridine-3'-phosphate
  modified_base 12: mod_base = OTHER; note = 2'-O-methylcytidine-3'-phosphate
  modified_base 13: mod_base = OTHER; note = 2'-O-methylcytidine-3'-phosphate
  modified_base 14: mod_base = OTHER; note = 2'-O-methyluridine-3'-phosphate
  modified_base 15: mod_base = OTHER; note = 2'-O-methylcytidine-3'-phosphate
  modified_base 16: mod_base = OTHER; note = 2'-O-methylguanosine-3'-phosphate
  modified_base 17: mod_base = OTHER; note = 2'-O-methyladenosine-3'-phosphate
  modified_base 18: mod_base = OTHER; note = 2'-O-methylguanosine-3'-phosphate
  modified_base 19: mod_base = OTHER; note = 2'-O-methyladenosine-3'-phosphate
  modified_base 20: mod_base = OTHER; note = 2'-O-methyluridine-3'-phosphate
  modified_base 21: mod_base = OTHER; note = 2'-O-methyladenosine-3'-phosphate attached to N-[tris(N-acetylgalactosamine-alkyl)-amidodecanoyl)]-4-hydr oxyprolinol Hyp-(N-acetylgalactosamine-alkyl)3
gttcaagatgtcctcgagata

SEQ ID NO: 2423 - RNA, 23 nt, synthetic construct
  misc_feature 1..23: note = Description of Artificial Sequence: Synthetic oligonucleotide
  source 1..23: mol_type = other RNA
  modified_base 1: mod_base = OTHER; note = 2'-O-methyluridine-3'-phosphorothioate
  modified_base 2: mod_base = OTHER; note = 2'-fluoroadenosine-3'-phosphorothioate
  modified_base 3: mod_base = OTHER; note = 2'-O-methyluridine-3'-phosphate
  modified_base 4: mod_base = OTHER; note = 2'-O-methylcytidine-3'-phosphate
  modified_base 5: mod_base = OTHER; note = 2'-O-methyluridine-3'-phosphate
  modified_base 6: mod_base = OTHER; note = 2'-fluorocytidine-3'-phosphate
  modified_base 7: mod_base = OTHER; note = 2'-O-methylguanosine-3'-phosphate
  modified_base 8: mod_base = OTHER; note = 2'-fluoroadenosine-3'-phosphate
  modified_base 9: mod_base = OTHER; note = 2'-fluoroguanosine-3'-phosphate
  modified_base 10: mod_base = OTHER; note = 2'-O-methylguanosine-3'-phosphate
  modified_base 11: mod_base = OTHER; note = 2'-O-methyladenosine-3'-phosphate
  modified_base 12: mod_base = OTHER; note = 2'-O-methylcytidine-3'-phosphate
  modified_base 13: mod_base = OTHER; note = 2'-O-methyladenosine-3'-phosphate
  modified_base 14: mod_base = OTHER; note = 2'-fluorouridine-3'-phosphate
  modified_base 15: mod_base = OTHER; note = 2'-O-methylcytidine-3'-phosphate
  modified_base 16: mod_base = OTHER; note = 2'-fluorouridine-3'-phosphate
  modified_base 17: mod_base = OTHER; note = 2'-O-methyluridine-3'-phosphate
  modified_base 18: mod_base = OTHER; note = 2'-O-methylguanosine-3'-phosphate
  modified_base 19: mod_base = OTHER; note = 2'-O-methyladenosine-3'-phosphate
  modified_base 20: mod_base = OTHER; note = 2'-O-methyladenosine-3'-phosphate
  modified_base 21: mod_base = OTHER; note = 2'-O-methylcytidine-3'- phosphorothioate
  modified_base 22: mod_base = OTHER; note = 2'-O-methyladenosine-3'- phosphorothioate
  modified_base 23: mod_base = OTHER; note = 2'-O-methylcytidine-3'-phosphate
tatctcgaggacatcttgaacac

SEQ ID NO: 2424 - RNA, 21 nt, synthetic construct
  misc_feature 1..21: note = Description of Artificial Sequence: Synthetic oligonucleotide
  source 1..21: mol_type = other RNA
  modified_base 1: mod_base = OTHER; note = 2'-O-methyluridine-3'-phosphorothioate
  modified_base 2: mod_base = OTHER; note = 2'-O-methylguanosine-3'- phosphorothioate
  modified_base 3: mod_base = OTHER; note = 2'-O-methyluridine-3'-phosphate
  modified_base 4: mod_base = OTHER; note = 2'-O-methyluridine-3'-phosphate
  modified_base 5: mod_base = OTHER; note = 2'-O-methylcytidine-3'-phosphate
  modified_base 6: mod_base = OTHER; note = 2'-O-methyladenosine-3'-phosphate
  modified_base 7: mod_base = OTHER; note = 2'-fluoroadenosine-3'-phosphate
  modified_base 8: mod_base = OTHER; note = 2'-O-methylguanosine-3'-phosphate
  modified_base 9: mod_base = OTHER; note = 2'-fluoroadenosine-3'-phosphate
  modified_base 10: mod_base = OTHER; note = 2'-fluorouridine-3'-phosphate
  modified_base 11: mod_base = OTHER; note = 2'-fluoroguanosine-3'-phosphate
  modified_base 12: mod_base = OTHER; note = 2'-O-methyluridine-3'-phosphate
  modified_base 13: mod_base = OTHER; note = 2'-O-methylcytidine-3'-phosphate
  modified_base 14: mod_base = OTHER; note = 2'-O-methylcytidine-3'-phosphate
  modified_base 15: mod_base = OTHER; note = 2'-O-methyluridine-3'-phosphate
  modified_base 16: mod_base = OTHER; note = 2'-O-methylcytidine-3'-phosphate
  modified_base 17: mod_base = OTHER; note = 2'-O-methylguanosine-3'-phosphate
  modified_base 18: mod_base = OTHER; note = 2'-O-methyladenosine-3'-phosphate
  modified_base 19: mod_base = OTHER; note = 2'-O-methylguanosine-3'-phosphate
  modified_base 20: mod_base = OTHER; note = 2'-O-methyladenosine-3'-phosphate
  modified_base 21: mod_base = OTHER; note = 2'-O-methyluridine-3'-phosphate attached to N-[tris(N-acetylgalactosamine-alkyl)-amidodecanoyl)]-4-hydr oxyprolinol Hyp-(N-acetylgalactosamine-alkyl)3
tgttcaagatgtcctcgagat

SEQ ID NO: 2425 - RNA, 23 nt, synthetic construct
  misc_feature 1..23: note = Description of Artificial Sequence: Synthetic oligonucleotide
  source 1..23: mol_type = other RNA
  modified_base 1: mod_base = OTHER; note = 2'-O-methyladenosine-3'- phosphorothioate
  modified_base 2: mod_base = OTHER; note = 2'-fluorouridine -3'-phosphorothioate
  modified_base 3: mod_base = OTHER; note = 2'-O-methylcytidine-3'-phosphate
  modified_base 4: mod_base = OTHER; note = 2'-O-methyluridine-3'-phosphate
  modified_base 5: mod_base = OTHER; note = 2'-O-methylcytidine-3'-phosphate
  modified_base 6: mod_base = OTHER; note = 2'-fluoroguanosine-3'-phosphate
  modified_base 7: mod_base = OTHER; note = 2'-O-methyladenosine-3'-phosphate
  modified_base 8: mod_base = OTHER; note = 2'-fluoroguanosine-3'-phosphate
  modified_base 9: mod_base = OTHER; note = 2'-fluoroguanosine-3'-phosphate
  modified_base 10: mod_base = OTHER; note = 2'-O-methyladenosine-3'-phosphate
  modified_base 11: mod_base = OTHER; note = 2'-O-methylcytidine-3'-phosphate
  modified_base 12: mod_base = OTHER; note = 2'-O-methyladenosine-3'-phosphate
  modified_base 13: mod_base = OTHER; note = 2'-O-methyluridine-3'-phosphate
  modified_base 14: mod_base = OTHER; note = 2'-fluorocytidine-3'-phosphate
  modified_base 15: mod_base = OTHER; note = 2'-O-methyluridine-3'-phosphate
  modified_base 16: mod_base = OTHER; note = 2'-fluorouridine-3'-phosphate
  modified_base 17: mod_base = OTHER; note = 2'-O-methylguanosine-3'-phosphate
  modified_base 18: mod_base = OTHER; note = 2'-O-methyladenosine-3'-phosphate
  modified_base 19: mod_base = OTHER; note = 2'-O-methyladenosine-3'-phosphate
  modified_base 20: mod_base = OTHER; note = 2'-O-methylcytidine-3'-phosphate
  modified_base 21: mod_base = OTHER; note = 2'-O-methyladenosine-3'- phosphorothioate
  modified_base 22: mod_base = OTHER; note = 2'-O-methylcytidine-3'- phosphorothioate
  modified_base 23: mod_base = OTHER; note = 2'-O-methylcytidine-3'-phosphate
atctcgaggacatcttgaacacc

SEQ ID NO: 2426 - RNA, 21 nt, synthetic construct
  misc_feature 1..21: note = Description of Artificial Sequence: Synthetic oligonucleotide
  source 1..21: mol_type = other RNA
  modified_base 1: mod_base = OTHER; note = 2'-O-methylguanosine-3'- phosphorothioate
  modified_base 2: mod_base = OTHER; note = 2'-O-methyladenosine-3'- phosphorothioate
  modified_base 3: mod_base = OTHER; note = 2'-O-methylguanosine-3'-phosphate
  modified_base 4: mod_base = OTHER; note = 2'-O-methyladenosine-3'-phosphate
  modified_base 5: mod_base = OTHER; note = 2'-O-methyladenosine-3'-phosphate
  modified_base 6: mod_base = OTHER; note = 2'-O-methyladenosine-3'-phosphate
  modified_base 7: mod_base = OTHER; note = 2'-fluoroguanosine-3'-phosphate
  modified_base 8: mod_base = OTHER; note = 2'-O-methylguanosine-3'-phosphate
  modified_base 9: mod_base = OTHER; note = 2'-fluorouridine-3'-phosphate
  modified_base 10: mod_base = OTHER; note = 2'-fluoroguanosine-3'-phosphate
  modified_base 11: mod_base = OTHER; note = 2'-fluorouridine-3'-phosphate
  modified_base 12: mod_base = OTHER; note = 2'-O-methyluridine-3'-phosphate
  modified_base 13: mod_base = OTHER; note = 2'-O-methylcytidine-3'-phosphate
  modified_base 14: mod_base = OTHER; note = 2'-O-methyladenosine-3'-phosphate
  modified_base 15: mod_base = OTHER; note = 2'-O-methyladenosine-3'-phosphate
  modified_base 16: mod_base = OTHER; note = 2'-O-methylguanosine-3'-phosphate
  modified_base 17: mod_base = OTHER; note = 2'-O-methyladenosine-3'-phosphate
  modified_base 18: mod_base = OTHER; note = 2'-O-methyluridine-3'-phosphate
  modified_base 19: mod_base = OTHER; note = 2'-O-methylguanosine-3'-phosphate
  modified_base 20: mod_base = OTHER; note = 2'-O-methyluridine-3'-phosphate
  modified_base 21: mod_base = OTHER; note = 2'-O-methylcytidine-3'-phosphate attached to N-[tris(N-acetylgalactosamine-alkyl)-amidodecanoyl)]-4-hydr oxyprolinol Hyp-(N-acetylgalactosamine-alkyl)3
gagaaaggtgttcaagatgtc

SEQ ID NO: 2427 - RNA, 23 nt, synthetic construct
  misc_feature 1..23: note = Description of Artificial Sequence: Synthetic oligonucleotide
  source 1..23: mol_type = other RNA
  modified_base 1: mod_base = OTHER; note = 2'-O-methylguanosine-3'- phosphorothioate
  modified_base 2: mod_base = OTHER; note = 2'-fluoroadenosine-3'-phosphorothioate
  modified_base 3: mod_base = OTHER; note = 2'-O-methylcytidine-3'-phosphate
  modified_base 4: mod_base = OTHER; note = 2'-O-methyladenosine-3'-phosphate
  modified_base 5: mod_base = OTHER; note = 2'-O-methyluridine-3'-phosphate
  modified_base 6: mod_base = OTHER; note = 2'-fluorocytidine-3'-phosphate
  modified_base 7: mod_base = OTHER; note = 2'-O-methyluridine-3'-phosphate
  modified_base 8: mod_base = OTHER; note = 2'-fluorouridine-3'-phosphate
  modified_base 9: mod_base = OTHER; note = 2'-fluoroguanosine-3'-phosphate
  modified_base 10: mod_base = OTHER; note = 2'-O-methyladenosine-3'-phosphate
  modified_base 11: mod_base = OTHER; note = 2'-O-methyladenosine-3'-phosphate
  modified_base 12: mod_base = OTHER; note = 2'-O-methylcytidine-3'-phosphate
  modified_base 13: mod_base = OTHER; note = 2'-O-methyladenosine-3'-phosphate
  modified_base 14: mod_base = OTHER; note = 2'-fluorocytidine-3'-phosphate
  modified_base 15: mod_base = OTHER; note = 2'-O-methylcytidine-3'-phosphate
  modified_base 16: mod_base = OTHER; note = 2'-fluorouridine-3'-phosphate
  modified_base 17: mod_base = OTHER; note = 2'-O-methyluridine-3'-phosphate
  modified_base 18: mod_base = OTHER; note = 2'-O-methyluridine-3'-phosphate
  modified_base 19: mod_base = OTHER; note = 2'-O-methylcytidine-3'-phosphate
  modified_base 20: mod_base = OTHER; note = 2'-O-methyluridine-3'-phosphate
  modified_base 21: mod_base = OTHER; note = 2'-O-methylcytidine-3'- phosphorothioate
  modified_base 22: mod_base = OTHER; note = 2'-O-methylcytidine-3'- phosphorothioate
  modified_base 23: mod_base = OTHER; note = 2'-O-methylcytidine-3'-phosphate
gacatcttgaacacctttctccc

SEQ ID NO: 2428 - RNA, 21 nt, synthetic construct
  misc_feature 1..21: note = Description of Artificial Sequence: Synthetic oligonucleotide
  source 1..21: mol_type = other RNA
  modified_base 1: mod_base = OTHER; note = 2'-O-methyladenosine-3'- phosphorothioate
  modified_base 2: mod_base = OTHER; note = 2'-O-methylguanosine-3'- phosphorothioate
  modified_base 3: mod_base = OTHER; note = 2'-O-methyladenosine-3'-phosphate
  modified_base 4: mod_base = OTHER; note = 2'-O-methyladenosine-3'-phosphate
  modified_base 5: mod_base = OTHER; note = 2'-O-methyladenosine-3'-phosphate
  modified_base 6: mod_base = OTHER; note = 2'-O-methylguanosine-3'-phosphate
  modified_base 7: mod_base = OTHER; note = 2'-fluoroguanosine-3'-phosphate
  modified_base 8: mod_base = OTHER; note = 2'-O-methyluridine-3'-phosphate
  modified_base 9: mod_base = OTHER; note = 2'-fluoroguanosine-3'-phosphate
  modified_base 10: mod_base = OTHER; note = 2'-fluorouridine-3'-phosphate
  modified_base 11: mod_base = OTHER; note = 2'-fluorouridine-3'-phosphate
  modified_base 12: mod_base = OTHER; note = 2'-O-methylcytidine-3'-phosphate
  modified_base 13: mod_base = OTHER; note = 2'-O-methyladenosine-3'-phosphate
  modified_base 14: mod_base = OTHER; note = 2'-O-methyladenosine-3'-phosphate
  modified_base 15: mod_base = OTHER; note = 2'-O-methylguanosine-3'-phosphate
  modified_base 16: mod_base = OTHER; note = 2'-O-methyladenosine-3'-phosphate
  modified_base 17: mod_base = OTHER; note = 2'-O-methyluridine-3'-phosphate
  modified_base 18: mod_base = OTHER; note = 2'-O-methylguanosine-3'-phosphate
  modified_base 19: mod_base = OTHER; note = 2'-O-methyluridine-3'-phosphate
  modified_base 20: mod_base = OTHER; note = 2'-O-methylcytidine-3'-phosphate
  modified_base 21: mod_base = OTHER; note = 2'-O-methylcytidine-3'-phosphate attached to N-[tris(N-acetylgalactosamine-alkyl)-amidodecanoyl)]-4-hydr oxyprolinol Hyp-(N-acetylgalactosamine-alkyl)3
agaaaggtgttcaagatgtcc

SEQ ID NO: 2429 - RNA, 23 nt, synthetic construct
  misc_feature 1..23: note = Description of Artificial Sequence: Synthetic oligonucleotide
  source 1..23: mol_type = other RNA
  modified_base 1: mod_base = OTHER; note = 2'-O-methylguanosine-3'- phosphorothioate
  modified_base 2: mod_base = OTHER; note = 2'-fluoroguanosine-3'-phosphorothioate
  modified_base 3: mod_base = OTHER; note = 2'-O-methyladenosine-3'-phosphate
  modified_base 4: mod_base = OTHER; note = 2'-O-methylcytidine-3'-phosphate
  modified_base 5: mod_base = OTHER; note = 2'-O-methyladenosine-3'-phosphate
  modified_base 6: mod_base = OTHER; note = 2'-fluorouridine-3'-phosphate
  modified_base 7: mod_base = OTHER; note = 2'-O-methylcytidine-3'-phosphate
  modified_base 8: mod_base = OTHER; note = 2'-fluorouridine-3'-phosphate
  modified_base 9: mod_base = OTHER; note = 2'-fluorouridine-3'-phosphate
  modified_base 10: mod_base = OTHER; note = 2'-O-methylguanosine-3'-phosphate
  modified_base 11: mod_base = OTHER; note = 2'-O-methyladenosine-3'-phosphate
  modified_base 12: mod_base = OTHER; note = 2'-O-methyladenosine-3'-phosphate
  modified_base 13: mod_base = OTHER; note = 2'-O-methylcytidine-3'-phosphate
  modified_base 14: mod_base = OTHER; note = 2'-fluoroadenosine-3'-phosphate
  modified_base 15: mod_base = OTHER; note = 2'-O-methylcytidine-3'-phosphate
  modified_base 16: mod_base = OTHER; note = 2'-fluorocytidine-3'-phosphate
  modified_base 17: mod_base = OTHER; note = 2'-O-methyluridine-3'-phosphate
  modified_base 18: mod_base = OTHER; note = 2'-O-methyluridine-3'-phosphate
  modified_base 19: mod_base = OTHER; note = 2'-O-methyluridine-3'-phosphate
  modified_base 20: mod_base = OTHER; note = 2'-O-methylcytidine-3'-phosphate
  modified_base 21: mod_base = OTHER; note = 2'-O-methyluridine-3'-phosphorothioate
  modified_base 22: mod_base = OTHER; note = 2'-O-methylcytidine-3'- phosphorothioate
  modified_base 23: mod_base = OTHER; note = 2'-O-methylcytidine-3'-phosphate
ggacatcttgaacacctttctcc

SEQ ID NO: 2430 - RNA, 21 nt, synthetic construct
  misc_feature 1..21: note = Description of Artificial Sequence: Synthetic oligonucleotide
  source 1..21: mol_type = other RNA
  modified_base 1: mod_base = OTHER; note = 2'-O-methylguanosine-3'- phosphorothioate
  modified_base 2: mod_base = OTHER; note = 2'-O-methylguanosine-3'- phosphorothioate
  modified_base 3: mod_base = OTHER; note = 2'-O-methylguanosine-3'-phosphate
  modified_base 4: mod_base = OTHER; note = 2'-O-methylguanosine-3'-phosphate
  modified_base 5: mod_base = OTHER; note = 2'-O-methylguanosine-3'-phosphate
  modified_base 6: mod_base = OTHER; note = 2'-O-methyladenosine-3'-phosphate
  modified_base 7: mod_base = OTHER; note = 2'-fluoroguanosine-3'-phosphate
  modified_base 8: mod_base = OTHER; note = 2'-O-methyladenosine-3'-phosphate
  modified_base 9: mod_base = OTHER; note = 2'-fluoroadenosine-3'-phosphate
  modified_base 10: mod_base = OTHER; note = 2'-fluoroadenosine-3'-phosphate
  modified_base 11: mod_base = OTHER; note = 2'-fluoroguanosine-3'-phosphate
  modified_base 12: mod_base = OTHER; note = 2'-O-methylguanosine-3'-phosphate
  modified_base 13: mod_base = OTHER; note = 2'-O-methyluridine-3'-phosphate
  modified_base 14: mod_base = OTHER; note = 2'-O-methylguanosine-3'-phosphate
  modified_base 15: mod_base = OTHER; note = 2'-O-methyluridine-3'-phosphate
  modified_base 16: mod_base = OTHER; note = 2'-O-methyluridine-3'-phosphate
  modified_base 17: mod_base = OTHER; note = 2'-O-methylcytidine-3'-phosphate
  modified_base 18: mod_base = OTHER; note = 2'-O-methyladenosine-3'-phosphate
  modified_base 19: mod_base = OTHER; note = 2'-O-methyladenosine-3'-phosphate
  modified_base 20: mod_base = OTHER; note = 2'-O-methylguanosine-3'-phosphate
  modified_base 21: mod_base = OTHER; note = 2'-O-methyladenosine-3'-phosphate attached to N-[tris(N-acetylgalactosamine-alkyl)-amidodecanoyl)]-4-hydr oxyprolinol Hyp-(N-acetylgalactosamine-alkyl)3
gggggagaaaggtgttcaaga

SEQ ID NO: 2431 - RNA, 23 nt, synthetic construct
  misc_feature 1..23: note = Description of Artificial Sequence: Synthetic oligonucleotide
  source 1..23: mol_type = other RNA
  modified_base 1: mod_base = OTHER; note = 2'-O-methyluridine-3'-phosphorothioate
  modified_base 2: mod_base = OTHER; note = 2'-fluorocytidine-3'-phosphorothioate
  modified_base 3: mod_base = OTHER; note = 2'-O-methyluridine-3'-phosphate
  modified_base 4: mod_base = OTHER; note = 2'-O-methyluridine-3'-phosphate
  modified_base 5: mod_base = OTHER; note = 2'-O-methylguanosine-3'-phosphate
  modified_base 6: mod_base = OTHER; note = 2'-fluoroadenosine-3'-phosphate
  modified_base 7: mod_base = OTHER; note = 2'-O-methyladenosine-3'-phosphate
  modified_base 8: mod_base = OTHER; note = 2'-fluorocytidine-3'-phosphate
  modified_base 9: mod_base = OTHER; note = 2'-fluoroadenosine-3'-phosphate
  modified_base 10: mod_base = OTHER; note = 2'-O-methylcytidine-3'-phosphate
  modified_base 11: mod_base = OTHER; note = 2'-O-methylcytidine-3'-phosphate
  modified_base 12: mod_base = OTHER; note = 2'-O-methyluridine-3'-phosphate
  modified_base 13: mod_base = OTHER; note = 2'-O-methyluridine-3'-phosphate
  modified_base 14: mod_base = OTHER; note = 2'-fluorouridine-3'-phosphate
  modified_base 15: mod_base = OTHER; note = 2'-O-methylcytidine-3'-phosphate
  modified_base 16: mod_base = OTHER; note = 2'-fluorouridine-3'-phosphate
  modified_base 17: mod_base = OTHER; note = 2'-O-methylcytidine-3'-phosphate
  modified_base 18: mod_base = OTHER; note = 2'-O-methylcytidine-3'-phosphate
  modified_base 19: mod_base = OTHER; note = 2'-O-methylcytidine-3'-phosphate
  modified_base 20: mod_base = OTHER; note = 2'-O-methylcytidine-3'-phosphate
  modified_base 21: mod_base = OTHER; note = 2'-O-methylcytidine-3'- phosphorothioate
  modified_base 22: mod_base = OTHER; note = 2'-O-methyluridine-3'-phosphorothioate
  modified_base 23: mod_base = OTHER; note = 2'-O-methylguanosine-3'-phosphate
tcttgaacacctttctccccctg

SEQ ID NO: 2432 - RNA, 21 nt, synthetic construct
  misc_feature 1..21: note = Description of Artificial Sequence: Synthetic oligonucleotide
  source 1..21: mol_type = other RNA
  modified_base 1: mod_base = OTHER; note = 2'-O-methyladenosine-3'- phosphorothioate
  modified_base 2: mod_base = OTHER; note = 2'-O-methylguanosine-3'- phosphorothioate
  modified_base 3: mod_base = OTHER; note = 2'-O-methylguanosine-3'-phosphate
  modified_base 4: mod_base = OTHER; note = 2'-O-methylguanosine-3'-phosphate
  modified_base 5: mod_base = OTHER; note = 2'-O-methylguanosine-3'-phosphate
  modified_base 6: mod_base = OTHER; note = 2'-O-methylguanosine-3'-phosphate
  modified_base 7: mod_base = OTHER; note = 2'-fluoroadenosine-3'-phosphate
  modified_base 8: mod_base = OTHER; note = 2'-O-methylguanosine-3'-phosphate
  modified_base 9: mod_base = OTHER; note = 2'-fluoroadenosine-3'-phosphate
  modified_base 10: mod_base = OTHER; note = 2'-fluoroadenosine-3'-phosphate
  modified_base 11: mod_base = OTHER; note = 2'-fluoroadenosine-3'-phosphate
  modified_base 12: mod_base = OTHER; note = 2'-O-methylguanosine-3'-phosphate
  modified_base 13: mod_base = OTHER; note = 2'-O-methylguanosine-3'-phosphate
  modified_base 14: mod_base = OTHER; note = 2'-O-methyluridine-3'-phosphate
  modified_base 15: mod_base = OTHER; note = 2'-O-methylguanosine-3'-phosphate
  modified_base 16: mod_base = OTHER; note = 2'-O-methyluridine-3'-phosphate
  modified_base 17: mod_base = OTHER; note = 2'-O-methyluridine-3'-phosphate
  modified_base 18: mod_base = OTHER; note = 2'-O-methylcytidine-3'-phosphate
  modified_base 19: mod_base = OTHER; note = 2'-O-methyladenosine-3'-phosphate
  modified_base 20: mod_base = OTHER; note = 2'-O-methyladenosine-3'-phosphate
  modified_base 21: mod_base = OTHER; note = 2'-O-methylguanosine-3'-phosphate attached to N-[tris(N-acetylgalactosamine-alkyl)-amidodecanoyl)]-4-hydr oxyprolinol Hyp-(N-acetylgalactosamine-alkyl)3
agggggagaaaggtgttcaag

SEQ ID NO: 2433 - RNA, 23 nt, synthetic construct
  misc_feature 1..23: note = Description of Artificial Sequence: Synthetic oligonucleotide
  source 1..23: mol_type = other RNA
  modified_base 1: mod_base = OTHER; note = 2'-O-methylcytidine-3'- phosphorothioate
  modified_base 2: mod_base = OTHER; note = 2'-fluorouridine -3'-phosphorothioate
  modified_base 3: mod_base = OTHER; note = 2'-O-methyluridine-3'-phosphate
  modified_base 4: mod_base = OTHER; note = 2'-O-methylguanosine-3'-phosphate
  modified_base 5: mod_base = OTHER; note = 2'-O-methyladenosine-3'-phosphate
  modified_base 6: mod_base = OTHER; note = 2'-fluoroadenosine-3'-phosphate
  modified_base 7: mod_base = OTHER; note = 2'-O-methylcytidine-3'-phosphate
  modified_base 8: mod_base = OTHER; note = 2'-fluoroadenosine-3'-phosphate
  modified_base 9: mod_base = OTHER; note = 2'-fluorocytidine-3'-phosphate
  modified_base 10: mod_base = OTHER; note = 2'-O-methylcytidine-3'-phosphate
  modified_base 11: mod_base = OTHER; note = 2'-O-methyluridine-3'-phosphate
  modified_base 12: mod_base = OTHER; note = 2'-O-methyluridine-3'-phosphate
  modified_base 13: mod_base = OTHER; note = 2'-O-methyluridine-3'-phosphate
  modified_base 14: mod_base = OTHER; note = 2'-fluorocytidine-3'-phosphate
  modified_base 15: mod_base = OTHER; note = 2'-O-methyluridine-3'-phosphate
  modified_base 16: mod_base = OTHER; note = 2'-fluorocytidine-3'-phosphate
  modified_base 17: mod_base = OTHER; note = 2'-O-methylcytidine-3'-phosphate
  modified_base 18: mod_base = OTHER; note = 2'-O-methylcytidine-3'-phosphate
  modified_base 19: mod_base = OTHER; note = 2'-O-methylcytidine-3'-phosphate
  modified_base 20: mod_base = OTHER; note = 2'-O-methylcytidine-3'-phosphate
  modified_base 21: mod_base = OTHER; note = 2'-O-methyluridine-3'-phosphorothioate
  modified_base 22: mod_base = OTHER; note = 2'-O-methylguanosine-3'- phosphorothioate
  modified_base 23: mod_base = OTHER; note = 2'-O-methylguanosine-3'-phosphate
cttgaacacctttctccccctgg

SEQ ID NO: 2434 - RNA, 21 nt, synthetic construct
  misc_feature 1..21: note = Description of Artificial Sequence: Synthetic oligonucleotide
  source 1..21: mol_type = other RNA
  modified_base 1: mod_base = OTHER; note = 2'-O-methylguanosine-3'- phosphorothioate
  modified_base 2: mod_base = OTHER; note = 2'-O-methylcytidine-3'- phosphorothioate
  modified_base 3: mod_base = OTHER; note = 2'-O-methyluridine-3'-phosphate
  modified_base 4: mod_base = OTHER; note = 2'-O-methylguanosine-3'-phosphate
  modified_base 5: mod_base = OTHER; note = 2'-O-methylguanosine-3'-phosphate
  modified_base 6: mod_base = OTHER; note = 2'-O-methylguanosine-3'-phosphate
  modified_base 7: mod_base = OTHER; note = 2'-fluoroadenosine-3'-phosphate
  modified_base 8: mod_base = OTHER; note = 2'-O-methyladenosine-3'-phosphate
  modified_base 9: mod_base = OTHER; note = 2'-fluoroguanosine-3'-phosphate
  modified_base 10: mod_base = OTHER; note = 2'-fluoroadenosine-3'-phosphate
  modified_base 11: mod_base = OTHER; note = 2'-fluorouridine-3'-phosphate
  modified_base 12: mod_base = OTHER; note = 2'-O-methyladenosine-3'-phosphate
  modified_base 13: mod_base = OTHER; note = 2'-O-methyluridine-3'-phosphate
  modified_base 14: mod_base = OTHER; note = 2'-O-methylcytidine-3'-phosphate
  modified_base 15: mod_base = OTHER; note = 2'-O-methyladenosine-3'-phosphate
  modified_base 16: mod_base = OTHER; note = 2'-O-methyladenosine-3'-phosphate
  modified_base 17: mod_base = OTHER; note = 2'-O-methyladenosine-3'-phosphate
  modified_base 18: mod_base = OTHER; note = 2'-O-methyluridine-3'-phosphate
  modified_base 19: mod_base = OTHER; note = 2'-O-methylguanosine-3'-phosphate
  modified_base 20: mod_base = OTHER; note = 2'-O-methylguanosine-3'-phosphate
  modified_base 21: mod_base = OTHER; note = 2'-O-methylcytidine-3'-phosphate attached to N-[tris(N-acetylgalactosamine-alkyl)-amidodecanoyl)]-4-hydr oxyprolinol Hyp-(N-acetylgalactosamine-alkyl)3
gctgggaagatatcaaatggc

SEQ ID NO: 2435 - RNA, 23 nt, synthetic construct
  misc_feature 1..23: note = Description of Artificial Sequence: Synthetic oligonucleotide
  source 1..23: mol_type = other RNA
  modified_base 1: mod_base = OTHER; note = 2'-O-methylguanosine-3'- phosphorothioate
  modified_base 2: mod_base = OTHER; note = 2'-fluorocytidine-3'-phosphorothioate
  modified_base 3: mod_base = OTHER; note = 2'-O-methylcytidine-3'-phosphate
  modified_base 4: mod_base = OTHER; note = 2'-O-methyladenosine-3'-phosphate
  modified_base 5: mod_base = OTHER; note = 2'-O-methyluridine-3'-phosphate
  modified_base 6: mod_base = OTHER; note = 2'-fluorouridine-3'-phosphate
  modified_base 7: mod_base = OTHER; note = 2'-O-methyluridine-3'-phosphate
  modified_base 8: mod_base = OTHER; note = 2'-fluoroguanosine-3'-phosphate
  modified_base 9: mod_base = OTHER; note = 2'-fluoroadenosine-3'-phosphate
  modified_base 10: mod_base = OTHER; note = 2'-O-methyluridine-3'-phosphate
  modified_base 11: mod_base = OTHER; note = 2'-O-methyladenosine-3'-phosphate
  modified_base 12: mod_base = OTHER; note = 2'-O-methyluridine-3'-phosphate
  modified_base 13: mod_base = OTHER; note = 2'-O-methylcytidine-3'-phosphate
  modified_base 14: mod_base = OTHER; note = 2'-fluorouridine-3'-phosphate
  modified_base 15: mod_base = OTHER; note = 2'-O-methyluridine-3'-phosphate
  modified_base 16: mod_base = OTHER; note = 2'-fluorocytidine-3'-phosphate
  modified_base 17: mod_base = OTHER; note = 2'-O-methylcytidine-3'-phosphate
  modified_base 18: mod_base = OTHER; note = 2'-O-methylcytidine-3'-phosphate
  modified_base 19: mod_base = OTHER; note = 2'-O-methyladenosine-3'-phosphate
  modified_base 20: mod_base = OTHER; note = 2'-O-methylguanosine-3'-phosphate
  modified_base 21: mod_base = OTHER; note = 2'-O-methylcytidine-3'- phosphorothioate
  modified_base 22: mod_base = OTHER; note = 2'-O-methyluridine-3'-phosphorothioate
  modified_base 23: mod_base = OTHER; note = 2'-O-methylguanosine-3'-phosphate
gccatttgatatcttcccagctg

SEQ ID NO: 2436 - RNA, 21 nt, synthetic construct
  misc_feature 1..21: note = Description of Artificial Sequence: Synthetic oligonucleotide
  source 1..21: mol_type = other RNA
  modified_base 1: mod_base = OTHER; note = 2'-O-methylcytidine-3'- phosphorothioate
  modified_base 2: mod_base = OTHER; note = 2'-O-methyluridine-3'-phosphorothioate
  modified_base 3: mod_base = OTHER; note = 2'-O-methylguanosine-3'-phosphate
  modified_base 4: mod_base = OTHER; note = 2'-O-methylguanosine-3'-phosphate
  modified_base 5: mod_base = OTHER; note = 2'-O-methylguanosine-3'-phosphate
  modified_base 6: mod_base = OTHER; note = 2'-O-methyladenosine-3'-phosphate
  modified_base 7: mod_base = OTHER; note = 2'-fluoroadenosine-3'-phosphate
  modified_base 8: mod_base = OTHER; note = 2'-O-methylguanosine-3'-phosphate
  modified_base 9: mod_base = OTHER; note = 2'-fluoroadenosine-3'-phosphate
  modified_base 10: mod_base = OTHER; note = 2'-fluorouridine-3'-phosphate
  modified_base 11: mod_base = OTHER; note = 2'-fluoroadenosine-3'-phosphate
  modified_base 12: mod_base = OTHER; note = 2'-O-methyluridine-3'-phosphate
  modified_base 13: mod_base = OTHER; note = 2'-O-methylcytidine-3'-phosphate
  modified_base 14: mod_base = OTHER; note = 2'-O-methyladenosine-3'-phosphate
  modified_base 15: mod_base = OTHER; note = 2'-O-methyladenosine-3'-phosphate
  modified_base 16: mod_base = OTHER; note = 2'-O-methyladenosine-3'-phosphate
  modified_base 17: mod_base = OTHER; note = 2'-O-methyluridine-3'-phosphate
  modified_base 18: mod_base = OTHER; note = 2'-O-methylguanosine-3'-phosphate
  modified_base 19: mod_base = OTHER; note = 2'-O-methylguanosine-3'-phosphate
  modified_base 20: mod_base = OTHER; note = 2'-O-methylcytidine-3'-phosphate
  modified_base 21: mod_base = OTHER; note = 2'-O-methyluridine-3'-phosphate attached to N-[tris(N-acetylgalactosamine-alkyl)-amidodecanoyl)]-4-hydr oxyprolinol Hyp-(N-acetylgalactosamine-alkyl)3
ctgggaagatatcaaatggct

SEQ ID NO: 2437 - RNA, 23 nt, synthetic construct
  misc_feature 1..23: note = Description of Artificial Sequence: Synthetic oligonucleotide
  source 1..23: mol_type = other RNA
  modified_base 1: mod_base = OTHER; note = 2'-O-methyladenosine-3'- phosphorothioate
  modified_base 2: mod_base = OTHER; note = 2'-fluoroguanosine-3'-phosphorothioate
  modified_base 3: mod_base = OTHER; note = 2'-O-methylcytidine-3'-phosphate
  modified_base 4: mod_base = OTHER; note = 2'-O-methylcytidine-3'-phosphate
  modified_base 5: mod_base = OTHER; note = 2'-O-methyladenosine-3'-phosphate
  modified_base 6: mod_base = OTHER; note = 2'-fluorouridine-3'-phosphate
  modified_base 7: mod_base = OTHER; note = 2'-O-methyluridine-3'-phosphate
  modified_base 8: mod_base = OTHER; note = 2'-fluorouridine-3'-phosphate
  modified_base 9: mod_base = OTHER; note = 2'-fluoroguanosine-3'-phosphate
  modified_base 10: mod_base = OTHER; note = 2'-O-methyladenosine-3'-phosphate
  modified_base 11: mod_base = OTHER; note = 2'-O-methyluridine-3'-phosphate
  modified_base 12: mod_base = OTHER; note = 2'-O-methyladenosine-3'-phosphate
  modified_base 13: mod_base = OTHER; note = 2'-O-methyluridine-3'-phosphate
  modified_base 14: mod_base = OTHER; note = 2'-fluorocytidine-3'-phosphate
  modified_base 15: mod_base = OTHER; note = 2'-O-methyluridine-3'-phosphate
  modified_base 16: mod_base = OTHER; note = 2'-fluorouridine-3'-phosphate
  modified_base 17: mod_base = OTHER; note = 2'-O-methylcytidine-3'-phosphate
  modified_base 18: mod_base = OTHER; note = 2'-O-methylcytidine-3'-phosphate
  modified_base 19: mod_base = OTHER; note = 2'-O-methylcytidine-3'-phosphate
  modified_base 20: mod_base = OTHER; note = 2'-O-methyladenosine-3'-phosphate
  modified_base 21: mod_base = OTHER; note = 2'-O-methylguanosine-3'- phosphorothioate
  modified_base 22: mod_base = OTHER; note = 2'-O-methylcytidine-3'- phosphorothioate
  modified_base 23: mod_base = OTHER; note = 2'-O-methyluridine-3'-phosphate
agccatttgatatcttcccagct

SEQ ID NO: 2438 - RNA, 21 nt, synthetic construct
  misc_feature 1..21: note = Description of Artificial Sequence: Synthetic oligonucleotide
  source 1..21: mol_type = other RNA
  modified_base 1: mod_base = OTHER; note = 2'-O-methyladenosine-3'- phosphorothioate
  modified_base 2: mod_base = OTHER; note = 2'-O-methyluridine-3'-phosphorothioate
  modified_base 3: mod_base = OTHER; note = 2'-O-methylcytidine-3'-phosphate
  modified_base 4: mod_base = OTHER; note = 2'-O-methyladenosine-3'-phosphate
  modified_base 5: mod_base = OTHER; note = 2'-O-methylguanosine-3'-phosphate
  modified_base 6: mod_base = OTHER; note = 2'-O-methylcytidine-3'-phosphate
  modified_base 7: mod_base = OTHER; note = 2'-fluorouridine-3'-phosphate
  modified_base 8: mod_base = OTHER; note = 2'-O-methylguanosine-3'-phosphate
  modified_base 9: mod_base = OTHER; note = 2'-fluoroguanosine-3'-phosphate
  modified_base 10: mod_base = OTHER; note = 2'-fluoroguanosine-3'-phosphate
  modified_base 11: mod_base = OTHER; note = 2'-fluoroadenosine-3'-phosphate
  modified_base 12: mod_base = OTHER; note = 2'-O-methyladenosine-3'-phosphate
  modified_base 13: mod_base = OTHER; note = 2'-O-methylguanosine-3'-phosphate
  modified_base 14: mod_base = OTHER; note = 2'-O-methyladenosine-3'-phosphate
  modified_base 15: mod_base = OTHER; note = 2'-O-methyluridine-3'-phosphate
  modified_base 16: mod_base = OTHER; note = 2'-O-methyladenosine-3'-phosphate
  modified_base 17: mod_base = OTHER; note = 2'-O-methyluridine-3'-phosphate
  modified_base 18: mod_base = OTHER; note = 2'-O-methylcytidine-3'-phosphate
  modified_base 19: mod_base = OTHER; note = 2'-O-methyladenosine-3'-phosphate
  modified_base 20: mod_base = OTHER; note = 2'-O-methyladenosine-3'-phosphate
  modified_base 21: mod_base = OTHER; note = 2'-O-methyladenosine-3'-phosphate attached to N-[tris(N-acetylgalactosamine-alkyl)-amidodecanoyl)]-4-hydr oxyprolinol Hyp-(N-acetylgalactosamine-alkyl)3
atcagctgggaagatatcaaa

SEQ ID NO: 2439 - RNA, 23 nt, synthetic construct
  misc_feature 1..23: note = Description of Artificial Sequence: Synthetic oligonucleotide
  source 1..23: mol_type = other RNA
  modified_base 1: mod_base = OTHER; note = 2'-O-methyluridine-3'-phosphorothioate
  modified_base 2: mod_base = OTHER; note = 2'-fluorouridine -3'-phosphorothioate
  modified_base 3: mod_base = OTHER; note = 2'-O-methyluridine-3'-phosphate
  modified_base 4: mod_base = OTHER; note = 2'-O-methylguanosine-3'-phosphate
  modified_base 5: mod_base = OTHER; note = 2'-O-methyladenosine-3'-phosphate
  modified_base 6: mod_base = OTHER; note = 2'-fluorouridine-3'-phosphate
  modified_base 7: mod_base = OTHER; note = 2'-O-methyladenosine-3'-phosphate
  modified_base 8: mod_base = OTHER; note = 2'-fluorouridine-3'-phosphate
  modified_base 9: mod_base = OTHER; note = 2'-fluorocytidine-3'-phosphate
  modified_base 10: mod_base = OTHER; note = 2'-O-methyluridine-3'-phosphate
  modified_base 11: mod_base = OTHER; note = 2'-O-methyluridine-3'-phosphate
  modified_base 12: mod_base = OTHER; note = 2'-O-methylcytidine-3'-phosphate
  modified_base 13: mod_base = OTHER; note = 2'-O-methylcytidine-3'-phosphate
  modified_base 14: mod_base = OTHER; note = 2'-fluorocytidine-3'-phosphate
  modified_base 15: mod_base = OTHER; note = 2'-O-methyladenosine-3'-phosphate
  modified_base 16: mod_base = OTHER; note = 2'-fluoroguanosine-3'-phosphate
  modified_base 17: mod_base = OTHER; note = 2'-O-methylcytidine-3'-phosphate
  modified_base 18: mod_base = OTHER; note = 2'-O-methyluridine-3'-phosphate
  modified_base 19: mod_base = OTHER; note = 2'-O-methylguanosine-3'-phosphate
  modified_base 20: mod_base = OTHER; note = 2'-O-methyladenosine-3'-phosphate
  modified_base 21: mod_base = OTHER; note = 2'-O-methyluridine-3'-phosphorothioate
  modified_base 22: mod_base = OTHER; note = 2'-O-methyladenosine-3'- phosphorothioate
  modified_base 23: mod_base = OTHER; note = 2'-O-methylguanosine-3'-phosphate
tttgatatcttcccagctgatag

SEQ ID NO: 2440 - RNA, 21 nt, synthetic construct
  misc_feature 1..21: note = Description of Artificial Sequence: Synthetic oligonucleotide
  source 1..21: mol_type = other RNA
  modified_base 1: mod_base = OTHER; note = 2'-O-methyluridine-3'-phosphorothioate
  modified_base 2: mod_base = OTHER; note = 2'-O-methyladenosine-3'- phosphorothioate
  modified_base 3: mod_base = OTHER; note = 2'-O-methyluridine-3'-phosphate
  modified_base 4: mod_base = OTHER; note = 2'-O-methylcytidine-3'-phosphate
  modified_base 5: mod_base = OTHER; note = 2'-O-methyladenosine-3'-phosphate
  modified_base 6: mod_base = OTHER; note = 2'-O-methylguanosine-3'-phosphate
  modified_base 7: mod_base = OTHER; note = 2'-fluorocytidine-3'-phosphate
  modified_base 8: mod_base = OTHER; note = 2'-O-methyluridine-3'-phosphate
  modified_base 9: mod_base = OTHER; note = 2'-fluoroguanosine-3'-phosphate
  modified_base 10: mod_base = OTHER; note = 2'-fluoroguanosine-3'-phosphate
  modified_base 11: mod_base = OTHER; note = 2'-fluoroguanosine-3'-phosphate
  modified_base 12: mod_base = OTHER; note = 2'-O-methyladenosine-3'-phosphate
  modified_base 13: mod_base = OTHER; note = 2'-O-methyladenosine-3'-phosphate
  modified_base 14: mod_base = OTHER; note = 2'-O-methylguanosine-3'-phosphate
  modified_base 15: mod_base = OTHER; note = 2'-O-methyladenosine-3'-phosphate
  modified_base 16: mod_base = OTHER; note = 2'-O-methyluridine-3'-phosphate
  modified_base 17: mod_base = OTHER; note = 2'-O-methyladenosine-3'-phosphate
  modified_base 18: mod_base = OTHER; note = 2'-O-methyluridine-3'-phosphate
  modified_base 19: mod_base = OTHER; note = 2'-O-methylcytidine-3'-phosphate
  modified_base 20: mod_base = OTHER; note = 2'-O-methyladenosine-3'-phosphate
  modified_base 21: mod_base = OTHER; note = 2'-O-methyladenosine-3'-phosphate attached to N-[tris(N-acetylgalactosamine-alkyl)-amidodecanoyl)]-4-hydr oxyprolinol Hyp-(N-acetylgalactosamine-alkyl)3
tatcagctgggaagatatcaa

SEQ ID NO: 2441 - RNA, 23 nt, synthetic construct
  misc_feature 1..23: note = Description of Artificial Sequence: Synthetic oligonucleotide
  source 1..23: mol_type = other RNA
  modified_base 1: mod_base = OTHER; note = 2'-O-methyluridine-3'-phosphorothioate
  modified_base 2: mod_base = OTHER; note = 2'-fluorouridine -3'-phosphorothioate
  modified_base 3: mod_base = OTHER; note = 2'-O-methylguanosine-3'-phosphate
  modified_base 4: mod_base = OTHER; note = 2'-O-methyladenosine-3'-phosphate
  modified_base 5: mod_base = OTHER; note = 2'-O-methyluridine-3'-phosphate
  modified_base 6: mod_base = OTHER; note = 2'-fluoroadenosine-3'-phosphate
  modified_base 7: mod_base = OTHER; note = 2'-O-methyluridine-3'-phosphate
  modified_base 8: mod_base = OTHER; note = 2'-fluorocytidine-3'-phosphate
  modified_base 9: mod_base = OTHER; note = 2'-fluorouridine-3'-phosphate
  modified_base 10: mod_base = OTHER; note = 2'-O-methyluridine-3'-phosphate
  modified_base 11: mod_base = OTHER; note = 2'-O-methylcytidine-3'-phosphate
  modified_base 12: mod_base = OTHER; note = 2'-O-methylcytidine-3'-phosphate
  modified_base 13: mod_base = OTHER; note = 2'-O-methylcytidine-3'-phosphate
  modified_base 14: mod_base = OTHER; note = 2'-fluoroadenosine-3'-phosphate
  modified_base 15: mod_base = OTHER; note = 2'-O-methylguanosine-3'-phosphate
  modified_base 16: mod_base = OTHER; note = 2'-fluorocytidine-3'-phosphate
  modified_base 17: mod_base = OTHER; note = 2'-O-methyluridine-3'-phosphate
  modified_base 18: mod_base = OTHER; note = 2'-O-methylguanosine-3'-phosphate
  modified_base 19: mod_base = OTHER; note = 2'-O-methyladenosine-3'-phosphate
  modified_base 20: mod_base = OTHER; note = 2'-O-methyluridine-3'-phosphate
  modified_base 21: mod_base = OTHER; note = 2'-O-methyladenosine-3'- phosphorothioate
  modified_base 22: mod_base = OTHER; note = 2'-O-methylguanosine-3'- phosphorothioate
  modified_base 23: mod_base = OTHER; note = 2'-O-methyladenosine-3'-phosphate
ttgatatcttcccagctgataga

SEQ ID NO: 2442 - RNA, 21 nt, synthetic construct
  misc_feature 1..21: note = Description of Artificial Sequence: Synthetic oligonucleotide
  source 1..21: mol_type = other RNA
  modified_base 1: mod_base = OTHER; note = 2'-O-methyluridine-3'-phosphorothioate
  modified_base 2: mod_base = OTHER; note = 2'-O-methylcytidine-3'- phosphorothioate
  modified_base 3: mod_base = OTHER; note = 2'-O-methyluridine-3'-phosphate
  modified_base 4: mod_base = OTHER; note = 2'-O-methylguanosine-3'-phosphate
  modified_base 5: mod_base = OTHER; note = 2'-O-methyluridine-3'-phosphate
  modified_base 6: mod_base = OTHER; note = 2'-O-methylcytidine-3'-phosphate
  modified_base 7: mod_base = OTHER; note = 2'-fluoroguanosine-3'-phosphate
  modified_base 8: mod_base = OTHER; note = 2'-O-methyladenosine-3'-phosphate
  modified_base 9: mod_base = OTHER; note = 2'-fluorocytidine-3'-phosphate
  modified_base 10: mod_base = OTHER; note = 2'-fluorouridine-3'-phosphate
  modified_base 11: mod_base = OTHER; note = 2'-fluorouridine-3'-phosphate
  modified_base 12: mod_base = OTHER; note = 2'-O-methylcytidine-3'-phosphate
  modified_base 13: mod_base = OTHER; note = 2'-O-methyluridine-3'-phosphate
  modified_base 14: mod_base = OTHER; note = 2'-O-methylguanosine-3'-phosphate
  modified_base 15: mod_base = OTHER; note = 2'-O-methyluridine-3'-phosphate
  modified_base 16: mod_base = OTHER; note = 2'-O-methyluridine-3'-phosphate
  modified_base 17: mod_base = OTHER; note = 2'-O-methyluridine-3'-phosphate
  modified_base 18: mod_base = OTHER; note = 2'-O-methyluridine-3'-phosphate
  modified_base 19: mod_base = OTHER; note = 2'-O-methyladenosine-3'-phosphate
  modified_base 20: mod_base = OTHER; note = 2'-O-methylguanosine-3'-phosphate
  modified_base 21: mod_base = OTHER; note = 2'-O-methylguanosine-3'-phosphate attached to N-[tris(N-acetylgalactosamine-alkyl)-amidodecanoyl)]-4-hydr oxyprolinol Hyp-(N-acetylgalactosamine-alkyl)3
tctgtcgacttctgttttagg

SEQ ID NO: 2443 - RNA, 23 nt, synthetic construct
  misc_feature 1..23: note = Description of Artificial Sequence: Synthetic oligonucleotide
  source 1..23: mol_type = other RNA
  modified_base 1: mod_base = OTHER; note = 2'-O-methylcytidine-3'- phosphorothioate
  modified_base 2: mod_base = OTHER; note = 2'-fluorocytidine-3'-phosphorothioate
  modified_base 3: mod_base = OTHER; note = 2'-O-methyluridine-3'-phosphate
  modified_base 4: mod_base = OTHER; note = 2'-O-methyladenosine-3'-phosphate
  modified_base 5: mod_base = OTHER; note = 2'-O-methyladenosine-3'-phosphate
  modified_base 6: mod_base = OTHER; note = 2'-fluoroadenosine-3'-phosphate
  modified_base 7: mod_base = OTHER; note = 2'-O-methyladenosine-3'-phosphate
  modified_base 8: mod_base = OTHER; note = 2'-fluorocytidine-3'-phosphate
  modified_base 9: mod_base = OTHER; note = 2'-fluoroadenosine-3'-phosphate
  modified_base 10: mod_base = OTHER; note = 2'-O-methylguanosine-3'-phosphate
  modified_base 11: mod_base = OTHER; note = 2'-O-methyladenosine-3'-phosphate
  modified_base 12: mod_base = OTHER; note = 2'-O-methyladenosine-3'-phosphate
  modified_base 13: mod_base = OTHER; note = 2'-O-methylguanosine-3'-phosphate
  modified_base 14: mod_base = OTHER; note = 2'-fluorouridine-3'-phosphate
  modified_base 15: mod_base = OTHER; note = 2'-O-methylcytidine-3'-phosphate
  modified_base 16: mod_base = OTHER; note = 2'-fluoroguanosine-3'-phosphate
  modified_base 17: mod_base = OTHER; note = 2'-O-methyladenosine-3'-phosphate
  modified_base 18: mod_base = OTHER; note = 2'-O-methylcytidine-3'-phosphate
  modified_base 19: mod_base = OTHER; note = 2'-O-methyladenosine-3'-phosphate
  modified_base 20: mod_base = OTHER; note = 2'-O-methylguanosine-3'-phosphate
  modified_base 21: mod_base = OTHER; note = 2'-O-methyladenosine-3'- phosphorothioate
  modified_base 22: mod_base = OTHER; note = 2'-O-methyluridine-3'-phosphorothioate
  modified_base 23: mod_base = OTHER; note = 2'-O-methylcytidine-3'-phosphate
cctaaaacagaagtcgacagatc

SEQ ID NO: 2444 - RNA, 21 nt, synthetic construct
  misc_feature 1..21: note = Description of Artificial Sequence: Synthetic oligonucleotide
  source 1..21: mol_type = other RNA
  modified_base 1: mod_base = OTHER; note = 2'-O-methylcytidine-3'- phosphorothioate
  modified_base 2: mod_base = OTHER; note = 2'-O-methyluridine-3'-phosphorothioate
  modified_base 3: mod_base = OTHER; note = 2'-O-methylguanosine-3'-phosphate
  modified_base 4: mod_base = OTHER; note = 2'-O-methyluridine-3'-phosphate
  modified_base 5: mod_base = OTHER; note = 2'-O-methylcytidine-3'-phosphate
  modified_base 6: mod_base = OTHER; note = 2'-O-methylguanosine-3'-phosphate
  modified_base 7: mod_base = OTHER; note = 2'-fluoroadenosine-3'-phosphate
  modified_base 8: mod_base = OTHER; note = 2'-O-methylcytidine-3'-phosphate
  modified_base 9: mod_base = OTHER; note = 2'-fluorouridine-3'-phosphate
  modified_base 10: mod_base = OTHER; note = 2'-fluorouridine-3'-phosphate
  modified_base 11: mod_base = OTHER; note = 2'-fluorocytidine-3'-phosphate
  modified_base 12: mod_base = OTHER; note = 2'-O-methyluridine-3'-phosphate
  modified_base 13: mod_base = OTHER; note = 2'-O-methylguanosine-3'-phosphate
  modified_base 14: mod_base = OTHER; note = 2'-O-methyluridine-3'-phosphate
  modified_base 15: mod_base = OTHER; note = 2'-O-methyluridine-3'-phosphate
  modified_base 16: mod_base = OTHER; note = 2'-O-methyluridine-3'-phosphate
  modified_base 17: mod_base = OTHER; note = 2'-O-methyluridine-3'-phosphate
  modified_base 18: mod_base = OTHER; note = 2'-O-methyladenosine-3'-phosphate
  modified_base 19: mod_base = OTHER; note = 2'-O-methylguanosine-3'-phosphate
  modified_base 20: mod_base = OTHER; note = 2'-O-methylguanosine-3'-phosphate
  modified_base 21: mod_base = OTHER; note = 2'-O-methyladenosine-3'-phosphate attached to N-[tris(N-acetylgalactosamine-alkyl)-amidodecanoyl)]-4-hydr oxyprolinol Hyp-(N-acetylgalactosamine-alkyl)3
ctgtcgacttctgttttagga

SEQ ID NO: 2445 - RNA, 23 nt, synthetic construct
  misc_feature 1..23: note = Description of Artificial Sequence: Synthetic oligonucleotide
  source 1..23: mol_type = other RNA
  modified_base 1: mod_base = OTHER; note = 2'-O-methyluridine-3'-phosphorothioate
  modified_base 2: mod_base = OTHER; note = 2'-fluorocytidine-3'-phosphorothioate
  modified_base 3: mod_base = OTHER; note = 2'-O-methylcytidine-3'-phosphate
  modified_base 4: mod_base = OTHER; note = 2'-O-methyluridine-3'-phosphate
  modified_base 5: mod_base = OTHER; note = 2'-O-methyladenosine-3'-phosphate
  modified_base 6: mod_base = OTHER; note = 2'-fluoroadenosine-3'-phosphate
  modified_base 7: mod_base = OTHER; note = 2'-O-methyladenosine-3'-phosphate
  modified_base 8: mod_base = OTHER; note = 2'-fluoroadenosine-3'-phosphate
  modified_base 9: mod_base = OTHER; note = 2'-fluorocytidine-3'-phosphate
  modified_base 10: mod_base = OTHER; note = 2'-O-methyladenosine-3'-phosphate
  modified_base 11: mod_base = OTHER; note = 2'-O-methylguanosine-3'-phosphate
  modified_base 12: mod_base = OTHER; note = 2'-O-methyladenosine-3'-phosphate
  modified_base 13: mod_base = OTHER; note = 2'-O-methyladenosine-3'-phosphate
  modified_base 14: mod_base = OTHER; note = 2'-fluoroguanosine-3'-phosphate
  modified_base 15: mod_base = OTHER; note = 2'-O-methyluridine-3'-phosphate
  modified_base 16: mod_base = OTHER; note = 2'-fluorocytidine-3'-phosphate
  modified_base 17: mod_base = OTHER; note = 2'-O-methylguanosine-3'-phosphate
  modified_base 18: mod_base = OTHER; note = 2'-O-methyladenosine-3'-phosphate
  modified_base 19: mod_base = OTHER; note = 2'-O-methylcytidine-3'-phosphate
  modified_base 20: mod_base = OTHER; note = 2'-O-methyladenosine-3'-phosphate
  modified_base 21: mod_base = OTHER; note = 2'-O-methylguanosine-3'- phosphorothioate
  modified_base 22: mod_base = OTHER; note = 2'-O-methyladenosine-3'- phosphorothioate
  modified_base 23: mod_base = OTHER; note = 2'-O-methyluridine-3'-phosphate
tcctaaaacagaagtcgacagat

SEQ ID NO: 2446 - RNA, 21 nt, synthetic construct
  misc_feature 1..21: note = Description of Artificial Sequence: Synthetic oligonucleotide
  source 1..21: mol_type = other RNA
  modified_base 1: mod_base = OTHER; note = 2'-O-methylcytidine-3'- phosphorothioate
  modified_base 2: mod_base = OTHER; note = 2'-O-methyladenosine-3'- phosphorothioate
  modified_base 3: mod_base = OTHER; note = 2'-O-methylguanosine-3'-phosphate
  modified_base 4: mod_base = OTHER; note = 2'-O-methyladenosine-3'-phosphate
  modified_base 5: mod_base = OTHER; note = 2'-O-methyluridine-3'-phosphate
  modified_base 6: mod_base = OTHER; note = 2'-O-methylcytidine-3'-phosphate
  modified_base 7: mod_base = OTHER; note = 2'-fluorouridine-3'-phosphate
  modified_base 8: mod_base = OTHER; note = 2'-O-methylguanosine-3'-phosphate
  modified_base 9: mod_base = OTHER; note = 2'-fluorouridine-3'-phosphate
  modified_base 10: mod_base = OTHER; note = 2'-fluorocytidine-3'-phosphate
  modified_base 11: mod_base = OTHER; note = 2'-fluoroguanosine-3'-phosphate
  modified_base 12: mod_base = OTHER; note = 2'-O-methyladenosine-3'-phosphate
  modified_base 13: mod_base = OTHER; note = 2'-O-methylcytidine-3'-phosphate
  modified_base 14: mod_base = OTHER; note = 2'-O-methyluridine-3'-phosphate
  modified_base 15: mod_base = OTHER; note = 2'-O-methyluridine-3'-phosphate
  modified_base 16: mod_base = OTHER; note = 2'-O-methylcytidine-3'-phosphate
  modified_base 17: mod_base = OTHER; note = 2'-O-methyluridine-3'-phosphate
  modified_base 18: mod_base = OTHER; note = 2'-O-methylguanosine-3'-phosphate
  modified_base 19: mod_base = OTHER; note = 2'-O-methyluridine-3'-phosphate
  modified_base 20: mod_base = OTHER; note = 2'-O-methyluridine-3'-phosphate
  modified_base 21: mod_base = OTHER; note = 2'-O-methyluridine-3'-phosphate attached to N-[tris(N-acetylgalactosamine-alkyl)-amidodecanoyl)]-4-hydr oxyprolinol Hyp-(N-acetylgalactosamine-alkyl)3
cagatctgtcgacttctgttt

SEQ ID NO: 2447 - RNA, 23 nt, synthetic construct
  misc_feature 1..23: note = Description of Artificial Sequence: Synthetic oligonucleotide
  source 1..23: mol_type = other RNA
  modified_base 1: mod_base = OTHER; note = 2'-O-methyladenosine-3'- phosphorothioate
  modified_base 2: mod_base = OTHER; note = 2'-fluoroadenosine-3'-phosphorothioate
  modified_base 3: mod_base = OTHER; note = 2'-O-methyladenosine-3'-phosphate
  modified_base 4: mod_base = OTHER; note = 2'-O-methylcytidine-3'-phosphate
  modified_base 5: mod_base = OTHER; note = 2'-O-methyladenosine-3'-phosphate
  modified_base 6: mod_base = OTHER; note = 2'-fluoroguanosine-3'-phosphate
  modified_base 7: mod_base = OTHER; note = 2'-O-methyladenosine-3'-phosphate
  modified_base 8: mod_base = OTHER; note = 2'-fluoroadenosine-3'-phosphate
  modified_base 9: mod_base = OTHER; note = 2'-fluoroguanosine-3'-phosphate
  modified_base 10: mod_base = OTHER; note = 2'-O-methyluridine-3'-phosphate
  modified_base 11: mod_base = OTHER; note = 2'-O-methylcytidine-3'-phosphate
  modified_base 12: mod_base = OTHER; note = 2'-O-methylguanosine-3'-phosphate
  modified_base 13: mod_base = OTHER; note = 2'-O-methyladenosine-3'-phosphate
  modified_base 14: mod_base = OTHER; note = 2'-fluorocytidine-3'-phosphate
  modified_base 15: mod_base = OTHER; note = 2'-O-methyladenosine-3'-phosphate
  modified_base 16: mod_base = OTHER; note = 2'-fluoroguanosine-3'-phosphate
  modified_base 17: mod_base = OTHER; note = 2'-O-methyladenosine-3'-phosphate
  modified_base 18: mod_base = OTHER; note = 2'-O-methyluridine-3'-phosphate
  modified_base 19: mod_base = OTHER; note = 2'-O-methylcytidine-3'-phosphate
  modified_base 20: mod_base = OTHER; note = 2'-O-methyluridine-3'-phosphate
  modified_base 21: mod_base = OTHER; note = 2'-O-methylguanosine-3'- phosphorothioate
  modified_base 22: mod_base = OTHER; note = 2'-O-methyluridine-3'-phosphorothioate
  modified_base 23: mod_base = OTHER; note = 2'-O-methyluridine-3'-phosphate
aaacagaagtcgacagatctgtt

SEQ ID NO: 2448 - RNA, 21 nt, synthetic construct
  misc_feature 1..21: note = Description of Artificial Sequence: Synthetic oligonucleotide
  source 1..21: mol_type = other RNA
  modified_base 1: mod_base = OTHER; note = 2'-O-methyladenosine-3'- phosphorothioate
  modified_base 2: mod_base = OTHER; note = 2'-O-methylcytidine-3'- phosphorothioate
  modified_base 3: mod_base = OTHER; note = 2'-O-methyladenosine-3'-phosphate
  modified_base 4: mod_base = OTHER; note = 2'-O-methylguanosine-3'-phosphate
  modified_base 5: mod_base = OTHER; note = 2'-O-methyladenosine-3'-phosphate
  modified_base 6: mod_base = OTHER; note = 2'-O-methyluridine-3'-phosphate
  modified_base 7: mod_base = OTHER; note = 2'-fluorocytidine-3'-phosphate
  modified_base 8: mod_base = OTHER; note = 2'-O-methyluridine-3'-phosphate
  modified_base 9: mod_base = OTHER; note = 2'-fluoroguanosine-3'-phosphate
  modified_base 10: mod_base = OTHER; note = 2'-fluorouridine-3'-phosphate
  modified_base 11: mod_base = OTHER; note = 2'-fluorocytidine-3'-phosphate
  modified_base 12: mod_base = OTHER; note = 2'-O-methylguanosine-3'-phosphate
  modified_base 13: mod_base = OTHER; note = 2'-O-methyladenosine-3'-phosphate
  modified_base 14: mod_base = OTHER; note = 2'-O-methylcytidine-3'-phosphate
  modified_base 15: mod_base = OTHER; note = 2'-O-methyluridine-3'-phosphate
  modified_base 16: mod_base = OTHER; note = 2'-O-methyluridine-3'-phosphate
  modified_base 17: mod_base = OTHER; note = 2'-O-methylcytidine-3'-phosphate
  modified_base 18: mod_base = OTHER; note = 2'-O-methyluridine-3'-phosphate
  modified_base 19: mod_base = OTHER; note = 2'-O-methylguanosine-3'-phosphate
  modified_base 20: mod_base = OTHER; note = 2'-O-methyluridine-3'-phosphate
  modified_base 21: mod_base = OTHER; note = 2'-O-methyluridine-3'-phosphate attached to N-[tris(N-acetylgalactosamine-alkyl)-amidodecanoyl)]-4-hydr oxyprolinol Hyp-(N-acetylgalactosamine-alkyl)3
acagatctgtcgacttctgtt

SEQ ID NO: 2449 - RNA, 23 nt, synthetic construct
  misc_feature 1..23: note = Description of Artificial Sequence: Synthetic oligonucleotide
  source 1..23: mol_type = other RNA
  modified_base 1: mod_base = OTHER; note = 2'-O-methyladenosine-3'- phosphorothioate
  modified_base 2: mod_base = OTHER; note = 2'-fluoroadenosine-3'-phosphorothioate
  modified_base 3: mod_base = OTHER; note = 2'-O-methylcytidine-3'-phosphate
  modified_base 4: mod_base = OTHER; note = 2'-O-methyladenosine-3'-phosphate
  modified_base 5: mod_base = OTHER; note = 2'-O-methylguanosine-3'-phosphate
  modified_base 6: mod_base = OTHER; note = 2'-fluoroadenosine-3'-phosphate
  modified_base 7: mod_base = OTHER; note = 2'-O-methyladenosine-3'-phosphate
  modified_base 8: mod_base = OTHER; note = 2'-fluoroguanosine-3'-phosphate
  modified_base 9: mod_base = OTHER; note = 2'-fluorouridine-3'-phosphate
  modified_base 10: mod_base = OTHER; note = 2'-O-methylcytidine-3'-phosphate
  modified_base 11: mod_base = OTHER; note = 2'-O-methylguanosine-3'-phosphate
  modified_base 12: mod_base = OTHER; note = 2'-O-methyladenosine-3'-phosphate
  modified_base 13: mod_base = OTHER; note = 2'-O-methylcytidine-3'-phosphate
  modified_base 14: mod_base = OTHER; note = 2'-fluoroadenosine-3'-phosphate
  modified_base 15: mod_base = OTHER; note = 2'-O-methylguanosine-3'-phosphate
  modified_base 16: mod_base = OTHER; note = 2'-fluoroadenosine-3'-phosphate
  modified_base 17: mod_base = OTHER; note = 2'-O-methyluridine-3'-phosphate
  modified_base 18: mod_base = OTHER; note = 2'-O-methylcytidine-3'-phosphate
  modified_base 19: mod_base = OTHER; note = 2'-O-methyluridine-3'-phosphate
  modified_base 20: mod_base = OTHER; note = 2'-O-methylguanosine-3'-phosphate
  modified_base 21: mod_base = OTHER; note = 2'-O-methyluridine-3'-phosphorothioate
  modified_base 22: mod_base = OTHER; note = 2'-O-methyluridine-3'-phosphorothioate
  modified_base 23: mod_base = OTHER; note = 2'-O-methyluridine-3'-phosphate
aacagaagtcgacagatctgttt

SEQ ID NO: 2450 - RNA, 21 nt, synthetic construct
  misc_feature 1..21: note = Description of Artificial Sequence: Synthetic oligonucleotide
  source 1..21: mol_type = other RNA
  modified_base 1: mod_base = OTHER; note = 2'-O-methyluridine-3'-phosphorothioate
  modified_base 2: mod_base = OTHER; note = 2'-O-methyladenosine-3'- phosphorothioate
  modified_base 3: mod_base = OTHER; note = 2'-O-methylcytidine-3'-phosphate
  modified_base 4: mod_base = OTHER; note = 2'-O-methyluridine-3'-phosphate
  modified_base 5: mod_base = OTHER; note = 2'-O-methyluridine-3'-phosphate
  modified_base 6: mod_base = OTHER; note = 2'-O-methylcytidine-3'-phosphate
  modified_base 7: mod_base = OTHER; note = 2'-fluorouridine-3'-phosphate
  modified_base 8: mod_base = OTHER; note = 2'-O-methyluridine-3'-phosphate
  modified_base 9: mod_base = OTHER; note = 2'-fluorouridine-3'-phosphate
  modified_base 10: mod_base = OTHER; note = 2'-fluoroguanosine-3'-phosphate
  modified_base 11: mod_base = OTHER; note = 2'-fluoroadenosine-3'-phosphate
  modified_base 12: mod_base = OTHER; note = 2'-O-methyladenosine-3'-phosphate
  modified_base 13: mod_base = OTHER; note = 2'-O-methyluridine-3'-phosphate
  modified_base 14: mod_base = OTHER; note = 2'-O-methylguanosine-3'-phosphate
  modified_base 15: mod_base = OTHER; note = 2'-O-methyluridine-3'-phosphate
  modified_base 16: mod_base = OTHER; note = 2'-O-methyladenosine-3'-phosphate
  modified_base 17: mod_base = OTHER; note = 2'-O-methylguanosine-3'-phosphate
  modified_base 18: mod_base = OTHER; note = 2'-O-methyladenosine-3'-phosphate
  modified_base 19: mod_base = OTHER; note = 2'-O-methyluridine-3'-phosphate
  modified_base 20: mod_base = OTHER; note = 2'-O-methyluridine-3'-phosphate
  modified_base 21: mod_base = OTHER; note = 2'-O-methyluridine-3'-phosphate attached to N-[tris(N-acetylgalactosamine-alkyl)-amidodecanoyl)]-4-hydr oxyprolinol Hyp-(N-acetylgalactosamine-alkyl)3
tacttctttgaatgtagattt

SEQ ID NO: 2451 - RNA, 23 nt, synthetic construct
  misc_feature 1..23: note = Description of Artificial Sequence: Synthetic oligonucleotide
  source 1..23: mol_type = other RNA
  modified_base 1: mod_base = OTHER; note = 2'-O-methyladenosine-3'- phosphorothioate
  modified_base 2: mod_base = OTHER; note = 2'-fluoroadenosine-3'-phosphorothioate
  modified_base 3: mod_base = OTHER; note = 2'-O-methyladenosine-3'-phosphate
  modified_base 4: mod_base = OTHER; note = 2'-O-methyluridine-3'-phosphate
  modified_base 5: mod_base = OTHER; note = 2'-O-methylcytidine-3'-phosphate
  modified_base 6: mod_base = OTHER; note = 2'-fluorouridine-3'-phosphate
  modified_base 7: mod_base = OTHER; note = 2'-O-methyladenosine-3'-phosphate
  modified_base 8: mod_base = OTHER; note = 2'-fluorocytidine-3'-phosphate
  modified_base 9: mod_base = OTHER; note = 2'-fluoroadenosine-3'-phosphate
  modified_base 10: mod_base = OTHER; note = 2'-O-methyluridine-3'-phosphate
  modified_base 11: mod_base = OTHER; note = 2'-O-methyluridine-3'-phosphate
  modified_base 12: mod_base = OTHER; note = 2'-O-methylcytidine-3'-phosphate
  modified_base 13: mod_base = OTHER; note = 2'-O-methyladenosine-3'-phosphate
  modified_base 14: mod_base = OTHER; note = 2'-fluoroadenosine-3'-phosphate
  modified_base 15: mod_base = OTHER; note = 2'-O-methyladenosine-3'-phosphate
  modified_base 16: mod_base = OTHER; note = 2'-fluoroguanosine-3'-phosphate
  modified_base 17: mod_base = OTHER; note = 2'-O-methyladenosine-3'-phosphate
  modified_base 18: mod_base = OTHER; note = 2'-O-methyladenosine-3'-phosphate
  modified_base 19: mod_base = OTHER; note = 2'-O-methylguanosine-3'-phosphate
  modified_base 20: mod_base = OTHER; note = 2'-O-methyluridine-3'-phosphate
  modified_base 21: mod_base = OTHER; note = 2'-O-methyladenosine-3'- phosphorothioate
  modified_base 22: mod_base = OTHER; note = 2'-O-methyluridine-3'-phosphorothioate
  modified_base 23: mod_base = OTHER; note = 2'-O-methylcytidine-3'-phosphate
aaatctacattcaaagaagtatc

SEQ ID NO: 2452 - RNA, 21 nt, synthetic construct
  misc_feature 1..21: note = Description of Artificial Sequence: Synthetic oligonucleotide
  source 1..21: mol_type = other RNA
  modified_base 1: mod_base = OTHER; note = 2'-O-methyladenosine-3'- phosphorothioate
  modified_base 2: mod_base = OTHER; note = 2'-O-methylcytidine-3'- phosphorothioate
  modified_base 3: mod_base = OTHER; note = 2'-O-methyluridine-3'-phosphate
  modified_base 4: mod_base = OTHER; note = 2'-O-methyluridine-3'-phosphate
  modified_base 5: mod_base = OTHER; note = 2'-O-methylcytidine-3'-phosphate
  modified_base 6: mod_base = OTHER; note = 2'-O-methyluridine-3'-phosphate
  modified_base 7: mod_base = OTHER; note = 2'-fluorouridine-3'-phosphate
  modified_base 8: mod_base = OTHER; note = 2'-O-methyluridine-3'-phosphate
  modified_base 9: mod_base = OTHER; note = 2'-fluoroguanosine-3'-phosphate
  modified_base 10: mod_base = OTHER; note = 2'-fluoroadenosine-3'-phosphate
  modified_base 11: mod_base = OTHER; note = 2'-fluoroadenosine-3'-phosphate
  modified_base 12: mod_base = OTHER; note = 2'-O-methyluridine-3'-phosphate
  modified_base 13: mod_base = OTHER; note = 2'-O-methylguanosine-3'-phosphate
  modified_base 14: mod_base = OTHER; note = 2'-O-methyluridine-3'-phosphate
  modified_base 15: mod_base = OTHER; note = 2'-O-methyladenosine-3'-phosphate
  modified_base 16: mod_base = OTHER; note = 2'-O-methylguanosine-3'-phosphate
  modified_base 17: mod_base = OTHER; note = 2'-O-methyladenosine-3'-phosphate
  modified_base 18: mod_base = OTHER; note = 2'-O-methyluridine-3'-phosphate
  modified_base 19: mod_base = OTHER; note = 2'-O-methyluridine-3'-phosphate
  modified_base 20: mod_base = OTHER; note = 2'-O-methyluridine-3'-phosphate
  modified_base 21: mod_base = OTHER; note = 2'-O-methylcytidine-3'-phosphate attached to N-[tris(N-acetylgalactosamine-alkyl)-amidodecanoyl)]-4-hydr oxyprolinol Hyp-(N-acetylgalactosamine-alkyl)3
acttctttgaatgtagatttc

SEQ ID NO: 2453 - RNA, 23 nt, synthetic construct
  misc_feature 1..23: note = Description of Artificial Sequence: Synthetic oligonucleotide
  source 1..23: mol_type = other RNA
  modified_base 1: mod_base = OTHER; note = 2'-O-methylguanosine-3'- phosphorothioate
  modified_base 2: mod_base = OTHER; note = 2'-fluoroadenosine-3'-phosphorothioate
  modified_base 3: mod_base = OTHER; note = 2'-O-methyladenosine-3'-phosphate
  modified_base 4: mod_base = OTHER; note = 2'-O-methyladenosine-3'-phosphate
  modified_base 5: mod_base = OTHER; note = 2'-O-methyluridine-3'-phosphate
  modified_base 6: mod_base = OTHER; note = 2'-fluorocytidine-3'-phosphate
  modified_base 7: mod_base = OTHER; note = 2'-O-methyluridine-3'-phosphate
  modified_base 8: mod_base = OTHER; note = 2'-fluoroadenosine-3'-phosphate
  modified_base 9: mod_base = OTHER; note = 2'-fluorocytidine-3'-phosphate
  modified_base 10: mod_base = OTHER; note = 2'-O-methyladenosine-3'-phosphate
  modified_base 11: mod_base = OTHER; note = 2'-O-methyluridine-3'-phosphate
  modified_base 12: mod_base = OTHER; note = 2'-O-methyluridine-3'-phosphate
  modified_base 13: mod_base = OTHER; note = 2'-O-methylcytidine-3'-phosphate
  modified_base 14: mod_base = OTHER; note = 2'-fluoroadenosine-3'-phosphate
  modified_base 15: mod_base = OTHER; note = 2'-O-methyladenosine-3'-phosphate
  modified_base 16: mod_base = OTHER; note = 2'-fluoroadenosine-3'-phosphate
  modified_base 17: mod_base = OTHER; note = 2'-O-methylguanosine-3'-phosphate
  modified_base 18: mod_base = OTHER; note = 2'-O-methyladenosine-3'-phosphate
  modified_base 19: mod_base = OTHER; note = 2'-O-methyladenosine-3'-phosphate
  modified_base 20: mod_base = OTHER; note = 2'-O-methylguanosine-3'-phosphate
  modified_base 21: mod_base = OTHER; note = 2'-O-methyluridine-3'-phosphorothioate
  modified_base 22: mod_base = OTHER; note = 2'-O-methyladenosine-3'- phosphorothioate
  modified_base 23: mod_base = OTHER; note = 2'-O-methyluridine-3'-phosphate
gaaatctacattcaaagaagtat

SEQ ID NO: 2454 - RNA, 21 nt, synthetic construct
  misc_feature 1..21: note = Description of Artificial Sequence: Synthetic oligonucleotide
  source 1..21: mol_type = other RNA
  modified_base 1: mod_base = OTHER; note = 2'-O-methylguanosine-3'- phosphorothioate
  modified_base 2: mod_base = OTHER; note = 2'-O-methyluridine-3'-phosphorothioate
  modified_base 3: mod_base = OTHER; note = 2'-O-methylguanosine-3'-phosphate
  modified_base 4: mod_base = OTHER; note = 2'-O-methyladenosine-3'-phosphate
  modified_base 5: mod_base = OTHER; note = 2'-O-methyluridine-3'-phosphate
  modified_base 6: mod_base = OTHER; note = 2'-O-methyladenosine-3'-phosphate
  modified_base 7: mod_base = OTHER; note = 2'-fluorocytidine-3'-phosphate
  modified_base 8: mod_base = OTHER; note = 2'-O-methyluridine-3'-phosphate
  modified_base 9: mod_base = OTHER; note = 2'-fluorouridine-3'-phosphate
  modified_base 10: mod_base = OTHER; note = 2'-fluorocytidine-3'-phosphate
  modified_base 11: mod_base = OTHER; note = 2'-fluorouridine-3'-phosphate
  modified_base 12: mod_base = OTHER; note = 2'-O-methyluridine-3'-phosphate
  modified_base 13: mod_base = OTHER; note = 2'-O-methyluridine-3'-phosphate
  modified_base 14: mod_base = OTHER; note = 2'-O-methylguanosine-3'-phosphate
  modified_base 15: mod_base = OTHER; note = 2'-O-methyladenosine-3'-phosphate
  modified_base 16: mod_base = OTHER; note = 2'-O-methyladenosine-3'-phosphate
  modified_base 17: mod_base = OTHER; note = 2'-O-methyluridine-3'-phosphate
  modified_base 18: mod_base = OTHER; note = 2'-O-methylguanosine-3'-phosphate
  modified_base 19: mod_base = OTHER; note = 2'-O-methyluridine-3'-phosphate
  modified_base 20: mod_base = OTHER; note = 2'-O-methyladenosine-3'-phosphate
  modified_base 21: mod_base = OTHER; note = 2'-O-methylguanosine-3'-phosphate attached to N-[tris(N-acetylgalactosamine-alkyl)-amidodecanoyl)]-4-hydr oxyprolinol Hyp-(N-acetylgalactosamine-alkyl)3
gtgatacttctttgaatgtag

SEQ ID NO: 2455 - RNA, 23 nt, synthetic construct
  misc_feature 1..23: note = Description of Artificial Sequence: Synthetic oligonucleotide
  source 1..23: mol_type = other RNA
  modified_base 1: mod_base = OTHER; note = 2'-O-methylcytidine-3'- phosphorothioate
  modified_base 2: mod_base = OTHER; note = 2'-fluorouridine -3'-phosphorothioate
  modified_base 3: mod_base = OTHER; note = 2'-O-methyladenosine-3'-phosphate
  modified_base 4: mod_base = OTHER; note = 2'-O-methylcytidine-3'-phosphate
  modified_base 5: mod_base = OTHER; note = 2'-O-methyladenosine-3'-phosphate
  modified_base 6: mod_base = OTHER; note = 2'-fluorouridine-3'-phosphate
  modified_base 7: mod_base = OTHER; note = 2'-O-methyluridine-3'-phosphate
  modified_base 8: mod_base = OTHER; note = 2'-fluorocytidine-3'-phosphate
  modified_base 9: mod_base = OTHER; note = 2'-fluoroadenosine-3'-phosphate
  modified_base 10: mod_base = OTHER; note = 2'-O-methyladenosine-3'-phosphate
  modified_base 11: mod_base = OTHER; note = 2'-O-methyladenosine-3'-phosphate
  modified_base 12: mod_base = OTHER; note = 2'-O-methylguanosine-3'-phosphate
  modified_base 13: mod_base = OTHER; note = 2'-O-methyladenosine-3'-phosphate
  modified_base 14: mod_base = OTHER; note = 2'-fluoroadenosine-3'-phosphate
  modified_base 15: mod_base = OTHER; note = 2'-O-methylguanosine-3'-phosphate
  modified_base 16: mod_base = OTHER; note = 2'-fluorouridine-3'-phosphate
  modified_base 17: mod_base = OTHER; note = 2'-O-methyladenosine-3'-phosphate
  modified_base 18: mod_base = OTHER; note = 2'-O-methyluridine-3'-phosphate
  modified_base 19: mod_base = OTHER; note = 2'-O-methylcytidine-3'-phosphate
  modified_base 20: mod_base = OTHER; note = 2'-O-methyladenosine-3'-phosphate
  modified_base 21: mod_base = OTHER; note = 2'-O-methylcytidine-3'- phosphorothioate
  modified_base 22: mod_base = OTHER; note = 2'-O-methylcytidine-3'- phosphorothioate
  modified_base 23: mod_base = OTHER; note = 2'-O-methyladenosine-3'-phosphate
ctacattcaaagaagtatcacca

SEQ ID NO: 2456 - RNA, 21 nt, synthetic construct
  misc_feature 1..21: note = Description of Artificial Sequence: Synthetic oligonucleotide
  source 1..21: mol_type = other RNA
  modified_base 1: mod_base = OTHER; note = 2'-O-methylguanosine-3'- phosphorothioate
  modified_base 2: mod_base = OTHER; note = 2'-O-methylguanosine-3'- phosphorothioate
  modified_base 3: mod_base = OTHER; note = 2'-O-methyluridine-3'-phosphate
  modified_base 4: mod_base = OTHER; note = 2'-O-methylguanosine-3'-phosphate
  modified_base 5: mod_base = OTHER; note = 2'-O-methyladenosine-3'-phosphate
  modified_base 6: mod_base = OTHER; note = 2'-O-methyluridine-3'-phosphate
  modified_base 7: mod_base = OTHER; note = 2'-fluoroadenosine-3'-phosphate
  modified_base 8: mod_base = OTHER; note = 2'-O-methylcytidine-3'-phosphate
  modified_base 9: mod_base = OTHER; note = 2'-fluorouridine-3'-phosphate
  modified_base 10: mod_base = OTHER; note = 2'-fluorouridine-3'-phosphate
  modified_base 11: mod_base = OTHER; note = 2'-fluorocytidine-3'-phosphate
  modified_base 12: mod_base = OTHER; note = 2'-O-methyluridine-3'-phosphate
  modified_base 13: mod_base = OTHER; note = 2'-O-methyluridine-3'-phosphate
  modified_base 14: mod_base = OTHER; note = 2'-O-methyluridine-3'-phosphate
  modified_base 15: mod_base = OTHER; note = 2'-O-methylguanosine-3'-phosphate
  modified_base 16: mod_base = OTHER; note = 2'-O-methyladenosine-3'-phosphate
  modified_base 17: mod_base = OTHER; note = 2'-O-methyladenosine-3'-phosphate
  modified_base 18: mod_base = OTHER; note = 2'-O-methyluridine-3'-phosphate
  modified_base 19: mod_base = OTHER; note = 2'-O-methylguanosine-3'-phosphate
  modified_base 20: mod_base = OTHER; note = 2'-O-methyluridine-3'-phosphate
  modified_base 21: mod_base = OTHER; note = 2'-O-methyladenosine-3'-phosphate attached to N-[tris(N-acetylgalactosamine-alkyl)-amidodecanoyl)]-4-hydr oxyprolinol Hyp-(N-acetylgalactosamine-alkyl)3
ggtgatacttctttgaatgta

SEQ ID NO: 2457 - RNA, 23 nt, synthetic construct
  misc_feature 1..23: note = Description of Artificial Sequence: Synthetic oligonucleotide
  source 1..23: mol_type = other RNA
  modified_base 1: mod_base = OTHER; note = 2'-O-methyluridine-3'-phosphorothioate
  modified_base 2: mod_base = OTHER; note = 2'-fluoroadenosine-3'-phosphorothioate
  modified_base 3: mod_base = OTHER; note = 2'-O-methylcytidine-3'-phosphate
  modified_base 4: mod_base = OTHER; note = 2'-O-methyladenosine-3'-phosphate
  modified_base 5: mod_base = OTHER; note = 2'-O-methyluridine-3'-phosphate
  modified_base 6: mod_base = OTHER; note = 2'-fluorouridine-3'-phosphate
  modified_base 7: mod_base = OTHER; note = 2'-O-methylcytidine-3'-phosphate
  modified_base 8: mod_base = OTHER; note = 2'-fluoroadenosine-3'-phosphate
  modified_base 9: mod_base = OTHER; note = 2'-fluoroadenosine-3'-phosphate
  modified_base 10: mod_base = OTHER; note = 2'-O-methyladenosine-3'-phosphate
  modified_base 11: mod_base = OTHER; note = 2'-O-methylguanosine-3'-phosphate
  modified_base 12: mod_base = OTHER; note = 2'-O-methyladenosine-3'-phosphate
  modified_base 13: mod_base = OTHER; note = 2'-O-methyladenosine-3'-phosphate
  modified_base 14: mod_base = OTHER; note = 2'-fluoroguanosine-3'-phosphate
  modified_base 15: mod_base = OTHER; note = 2'-O-methyluridine-3'-phosphate
  modified_base 16: mod_base = OTHER; note = 2'-fluoroadenosine-3'-phosphate
  modified_base 17: mod_base = OTHER; note = 2'-O-methyluridine-3'-phosphate
  modified_base 18: mod_base = OTHER; note = 2'-O-methylcytidine-3'-phosphate
  modified_base 19: mod_base = OTHER; note = 2'-O-methyladenosine-3'-phosphate
  modified_base 20: mod_base = OTHER; note = 2'-O-methylcytidine-3'-phosphate
  modified_base 21: mod_base = OTHER; note = 2'-O-methylcytidine-3'- phosphorothioate
  modified_base 22: mod_base = OTHER; note = 2'-O-methyladenosine-3'- phosphorothioate
  modified_base 23: mod_base = OTHER; note = 2'-O-methyladenosine-3'-phosphate
tacattcaaagaagtatcaccaa

SEQ ID NO: 2458 - RNA, 21 nt, synthetic construct
  misc_feature 1..21: note = Description of Artificial Sequence: Synthetic oligonucleotide
  source 1..21: mol_type = other RNA
  modified_base 1: mod_base = OTHER; note = 2'-O-methyluridine-3'-phosphorothioate
  modified_base 2: mod_base = OTHER; note = 2'-O-methylguanosine-3'- phosphorothioate
  modified_base 3: mod_base = OTHER; note = 2'-O-methylguanosine-3'-phosphate
  modified_base 4: mod_base = OTHER; note = 2'-O-methylguanosine-3'-phosphate
  modified_base 5: mod_base = OTHER; note = 2'-O-methyladenosine-3'-phosphate
  modified_base 6: mod_base = OTHER; note = 2'-O-methyladenosine-3'-phosphate
  modified_base 7: mod_base = OTHER; note = 2'-fluoroguanosine-3'-phosphate
  modified_base 8: mod_base = OTHER; note = 2'-O-methyladenosine-3'-phosphate
  modified_base 9: mod_base = OTHER; note = 2'-fluorouridine-3'-phosphate
  modified_base 10: mod_base = OTHER; note = 2'-fluoroadenosine-3'-phosphate
  modified_base 11: mod_base = OTHER; note = 2'-fluorouridine-3'-phosphate
  modified_base 12: mod_base = OTHER; note = 2'-O-methylcytidine-3'-phosphate
  modified_base 13: mod_base = OTHER; note = 2'-O-methyladenosine-3'-phosphate
  modified_base 14: mod_base = OTHER; note = 2'-O-methyladenosine-3'-phosphate
  modified_base 15: mod_base = OTHER; note = 2'-O-methyladenosine-3'-phosphate
  modified_base 16: mod_base = OTHER; note = 2'-O-methyluridine-3'-phosphate
  modified_base 17: mod_base = OTHER; note = 2'-O-methylguanosine-3'-phosphate
  modified_base 18: mod_base = OTHER; note = 2'-O-methylguanosine-3'-phosphate
  modified_base 19: mod_base = OTHER; note = 2'-O-methylcytidine-3'-phosphate
  modified_base 20: mod_base = OTHER; note = 2'-O-methyluridine-3'-phosphate
  modified_base 21: mod_base = OTHER; note = 2'-O-methylguanosine-3'-phosphate attached to N-[tris(N-acetylgalactosamine-alkyl)-amidodecanoyl)]-4-hydr oxyprolinol Hyp-(N-acetylgalactosamine-alkyl)3
tgggaagatatcaaatggctg

SEQ ID NO: 2459 - RNA, 23 nt, synthetic construct
  misc_feature 1..23: note = Description of Artificial Sequence: Synthetic oligonucleotide
  source 1..23: mol_type = other RNA
  modified_base 1: mod_base = OTHER; note = 2'-O-methylcytidine-3'- phosphorothioate
  modified_base 2: mod_base = OTHER; note = 2'-fluoroadenosine-3'-phosphorothioate
  modified_base 3: mod_base = OTHER; note = 2'-O-methylguanosine-3'-phosphate
  modified_base 4: mod_base = OTHER; note = 2'-O-methylcytidine-3'-phosphate
  modified_base 5: mod_base = OTHER; note = 2'-O-methylcytidine-3'-phosphate
  modified_base 6: mod_base = OTHER; note = 2'-fluoroadenosine-3'-phosphate
  modified_base 7: mod_base = OTHER; note = 2'-O-methyluridine-3'-phosphate
  modified_base 8: mod_base = OTHER; note = 2'-fluorouridine-3'-phosphate
  modified_base 9: mod_base = OTHER; note = 2'-fluorouridine-3'-phosphate
  modified_base 10: mod_base = OTHER; note = 2'-O-methylguanosine-3'-phosphate
  modified_base 11: mod_base = OTHER; note = 2'-O-methyladenosine-3'-phosphate
  modified_base 12: mod_base = OTHER; note = 2'-O-methyluridine-3'-phosphate
  modified_base 13: mod_base = OTHER; note = 2'-O-methyladenosine-3'-phosphate
  modified_base 14: mod_base = OTHER; note = 2'-fluorouridine-3'-phosphate
  modified_base 15: mod_base = OTHER; note = 2'-O-methylcytidine-3'-phosphate
  modified_base 16: mod_base = OTHER; note = 2'-fluorouridine-3'-phosphate
  modified_base 17: mod_base = OTHER; note = 2'-O-methyluridine-3'-phosphate
  modified_base 18: mod_base = OTHER; note = 2'-O-methylcytidine-3'-phosphate
  modified_base 19: mod_base = OTHER; note = 2'-O-methylcytidine-3'-phosphate
  modified_base 20: mod_base = OTHER; note = 2'-O-methylcytidine-3'-phosphate
  modified_base 21: mod_base = OTHER; note = 2'-O-methyladenosine-3'- phosphorothioate
  modified_base 22: mod_base = OTHER; note = 2'-O-methylguanosine-3'- phosphorothioate
  modified_base 23: mod_base = OTHER; note = 2'-O-methylcytidine-3'-phosphate
cagccatttgatatcttcccagc

SEQ ID NO: 2460 - RNA, 21 nt, synthetic construct
  misc_feature 1..21: note = Description of Artificial Sequence: Synthetic oligonucleotide
  source 1..21: mol_type = other RNA
  modified_base 1: mod_base = OTHER; note = 2'-O-methylguanosine-3'- phosphorothioate
  modified_base 2: mod_base = OTHER; note = 2'-O-methylguanosine-3'- phosphorothioate
  modified_base 3: mod_base = OTHER; note = 2'-O-methylguanosine-3'-phosphate
  modified_base 4: mod_base = OTHER; note = 2'-O-methyladenosine-3'-phosphate
  modified_base 5: mod_base = OTHER; note = 2'-O-methyladenosine-3'-phosphate
  modified_base 6: mod_base = OTHER; note = 2'-O-methylguanosine-3'-phosphate
  modified_base 7: mod_base = OTHER; note = 2'-fluoroadenosine-3'-phosphate
  modified_base 8: mod_base = OTHER; note = 2'-O-methyluridine-3'-phosphate
  modified_base 9: mod_base = OTHER; note = 2'-fluoroadenosine-3'-phosphate
  modified_base 10: mod_base = OTHER; note = 2'-fluorouridine-3'-phosphate
  modified_base 11: mod_base = OTHER; note = 2'-fluorocytidine-3'-phosphate
  modified_base 12: mod_base = OTHER; note = 2'-O-methyladenosine-3'-phosphate
  modified_base 13: mod_base = OTHER; note = 2'-O-methyladenosine-3'-phosphate
  modified_base 14: mod_base = OTHER; note = 2'-O-methyladenosine-3'-phosphate
  modified_base 15: mod_base = OTHER; note = 2'-O-methyluridine-3'-phosphate
  modified_base 16: mod_base = OTHER; note = 2'-O-methylguanosine-3'-phosphate
  modified_base 17: mod_base = OTHER; note = 2'-O-methylguanosine-3'-phosphate
  modified_base 18: mod_base = OTHER; note = 2'-O-methylcytidine-3'-phosphate
  modified_base 19: mod_base = OTHER; note = 2'-O-methyluridine-3'-phosphate
  modified_base 20: mod_base = OTHER; note = 2'-O-methylguanosine-3'-phosphate
  modified_base 21: mod_base = OTHER; note = 2'-O-methyladenosine-3'-phosphate attached to N-[tris(N-acetylgalactosamine-alkyl)-amidodecanoyl)]-4-hydr oxyprolinol Hyp-(N-acetylgalactosamine-alkyl)3
gggaagatatcaaatggctga

SEQ ID NO: 2461 - RNA, 23 nt, synthetic construct
  misc_feature 1..23: note = Description of Artificial Sequence: Synthetic oligonucleotide
  source 1..23: mol_type = other RNA
  modified_base 1: mod_base = OTHER; note = 2'-O-methyluridine-3'-phosphorothioate
  modified_base 2: mod_base = OTHER; note = 2'-fluorocytidine-3'-phosphorothioate
  modified_base 3: mod_base = OTHER; note = 2'-O-methyladenosine-3'-phosphate
  modified_base 4: mod_base = OTHER; note = 2'-O-methylguanosine-3'-phosphate
  modified_base 5: mod_base = OTHER; note = 2'-O-methylcytidine-3'-phosphate
  modified_base 6: mod_base = OTHER; note = 2'-fluorocytidine-3'-phosphate
  modified_base 7: mod_base = OTHER; note = 2'-O-methyladenosine-3'-phosphate
  modified_base 8: mod_base = OTHER; note = 2'-fluorouridine-3'-phosphate
  modified_base 9: mod_base = OTHER; note = 2'-fluorouridine-3'-phosphate
  modified_base 10: mod_base = OTHER; note = 2'-O-methyluridine-3'-phosphate
  modified_base 11: mod_base = OTHER; note = 2'-O-methylguanosine-3'-phosphate
  modified_base 12: mod_base = OTHER; note = 2'-O-methyladenosine-3'-phosphate
  modified_base 13: mod_base = OTHER; note = 2'-O-methyluridine-3'-phosphate
  modified_base 14: mod_base = OTHER; note = 2'-fluoroadenosine-3'-phosphate
  modified_base 15: mod_base = OTHER; note = 2'-O-methyluridine-3'-phosphate
  modified_base 16: mod_base = OTHER; note = 2'-fluorocytidine-3'-phosphate
  modified_base 17: mod_base = OTHER; note = 2'-O-methyluridine-3'-phosphate
  modified_base 18: mod_base = OTHER; note = 2'-O-methyluridine-3'-phosphate
  modified_base 19: mod_base = OTHER; note = 2'-O-methylcytidine-3'-phosphate
  modified_base 20: mod_base = OTHER; note = 2'-O-methylcytidine-3'-phosphate
  modified_base 21: mod_base = OTHER; note = 2'-O-methylcytidine-3'- phosphorothioate
  modified_base 22: mod_base = OTHER; note = 2'-O-methyladenosine-3'- phosphorothioate
  modified_base 23: mod_base = OTHER; note = 2'-O-methylguanosine-3'-phosphate
tcagccatttgatatcttcccag

SEQ ID NO: 2462 - RNA, 21 nt, synthetic construct
  misc_feature 1..21: note = Description of Artificial Sequence: Synthetic oligonucleotide
  source 1..21: mol_type = other RNA
  modified_base 1: mod_base = OTHER; note = 2'-O-methylcytidine-3'- phosphorothioate
  modified_base 2: mod_base = OTHER; note = 2'-O-methyladenosine-3'- phosphorothioate
  modified_base 3: mod_base = OTHER; note = 2'-O-methylguanosine-3'-phosphate
  modified_base 4: mod_base = OTHER; note = 2'-O-methylcytidine-3'-phosphate
  modified_base 5: mod_base = OTHER; note = 2'-O-methyluridine-3'-phosphate
  modified_base 6: mod_base = OTHER; note = 2'-O-methylguanosine-3'-phosphate
  modified_base 7: mod_base = OTHER; note = 2'-fluoroguanosine-3'-phosphate
  modified_base 8: mod_base = OTHER; note = 2'-O-methylguanosine-3'-phosphate
  modified_base 9: mod_base = OTHER; note = 2'-fluoroadenosine-3'-phosphate
  modified_base 10: mod_base = OTHER; note = 2'-fluoroadenosine-3'-phosphate
  modified_base 11: mod_base = OTHER; note = 2'-fluoroguanosine-3'-phosphate
  modified_base 12: mod_base = OTHER; note = 2'-O-methyladenosine-3'-phosphate
  modified_base 13: mod_base = OTHER; note = 2'-O-methyluridine-3'-phosphate
  modified_base 14: mod_base = OTHER; note = 2'-O-methyladenosine-3'-phosphate
  modified_base 15: mod_base = OTHER; note = 2'-O-methyluridine-3'-phosphate
  modified_base 16: mod_base = OTHER; note = 2'-O-methylcytidine-3'-phosphate
  modified_base 17: mod_base = OTHER; note = 2'-O-methyladenosine-3'-phosphate
  modified_base 18: mod_base = OTHER; note = 2'-O-methyladenosine-3'-phosphate
  modified_base 19: mod_base = OTHER; note = 2'-O-methyladenosine-3'-phosphate
  modified_base 20: mod_base = OTHER; note = 2'-O-methyluridine-3'-phosphate
  modified_base 21: mod_base = OTHER; note = 2'-O-methylguanosine-3'-phosphate attached to N-[tris(N-acetylgalactosamine-alkyl)-amidodecanoyl)]-4-hydr oxyprolinol Hyp-(N-acetylgalactosamine-alkyl)3
cagctgggaagatatcaaatg

SEQ ID NO: 2463 - RNA, 23 nt, synthetic construct
  misc_feature 1..23: note = Description of Artificial Sequence: Synthetic oligonucleotide
  source 1..23: mol_type = other RNA
  modified_base 1: mod_base = OTHER; note = 2'-O-methylcytidine-3'- phosphorothioate
  modified_base 2: mod_base = OTHER; note = 2'-fluoroadenosine-3'-phosphorothioate
  modified_base 3: mod_base = OTHER; note = 2'-O-methyluridine-3'-phosphate
  modified_base 4: mod_base = OTHER; note = 2'-O-methyluridine-3'-phosphate
  modified_base 5: mod_base = OTHER; note = 2'-O-methyluridine-3'-phosphate
  modified_base 6: mod_base = OTHER; note = 2'-fluoroguanosine-3'-phosphate
  modified_base 7: mod_base = OTHER; note = 2'-O-methyladenosine-3'-phosphate
  modified_base 8: mod_base = OTHER; note = 2'-fluorouridine-3'-phosphate
  modified_base 9: mod_base = OTHER; note = 2'-fluoroadenosine-3'-phosphate
  modified_base 10: mod_base = OTHER; note = 2'-O-methyluridine-3'-phosphate
  modified_base 11: mod_base = OTHER; note = 2'-O-methylcytidine-3'-phosphate
  modified_base 12: mod_base = OTHER; note = 2'-O-methyluridine-3'-phosphate
  modified_base 13: mod_base = OTHER; note = 2'-O-methyluridine-3'-phosphate
  modified_base 14: mod_base = OTHER; note = 2'-fluorocytidine-3'-phosphate
  modified_base 15: mod_base = OTHER; note = 2'-O-methylcytidine-3'-phosphate
  modified_base 16: mod_base = OTHER; note = 2'-fluorocytidine-3'-phosphate
  modified_base 17: mod_base = OTHER; note = 2'-O-methyladenosine-3'-phosphate
  modified_base 18: mod_base = OTHER; note = 2'-O-methylguanosine-3'-phosphate
  modified_base 19: mod_base = OTHER; note = 2'-O-methylcytidine-3'-phosphate
  modified_base 20: mod_base = OTHER; note = 2'-O-methyluridine-3'-phosphate
  modified_base 21: mod_base = OTHER; note = 2'-O-methylguanosine-3'- phosphorothioate
  modified_base 22: mod_base = OTHER; note = 2'-O-methyladenosine-3'- phosphorothioate
  modified_base 23: mod_base = OTHER; note = 2'-O-methyluridine-3'-phosphate
catttgatatcttcccagctgat

SEQ ID NO: 2464 - RNA, 21 nt, synthetic construct
  misc_feature 1..21: note = Description of Artificial Sequence: Synthetic oligonucleotide
  source 1..21: mol_type = other RNA
  modified_base 1: mod_base = OTHER; note = 2'-O-methyluridine-3'-phosphorothioate
  modified_base 2: mod_base = OTHER; note = 2'-O-methylcytidine-3'- phosphorothioate
  modified_base 3: mod_base = OTHER; note = 2'-O-methyladenosine-3'-phosphate
  modified_base 4: mod_base = OTHER; note = 2'-O-methylguanosine-3'-phosphate
  modified_base 5: mod_base = OTHER; note = 2'-O-methylcytidine-3'-phosphate
  modified_base 6: mod_base = OTHER; note = 2'-O-methyluridine-3'-phosphate
  modified_base 7: mod_base = OTHER; note = 2'-fluoroguanosine-3'-phosphate
  modified_base 8: mod_base = OTHER; note = 2'-O-methylguanosine-3'-phosphate
  modified_base 9: mod_base = OTHER; note = 2'-fluoroguanosine-3'-phosphate
  modified_base 10: mod_base = OTHER; note = 2'-fluoroadenosine-3'-phosphate
  modified_base 11: mod_base = OTHER; note = 2'-fluoroadenosine-3'-phosphate
  modified_base 12: mod_base = OTHER; note = 2'-O-methylguanosine-3'-phosphate
  modified_base 13: mod_base = OTHER; note = 2'-O-methyladenosine-3'-phosphate
  modified_base 14: mod_base = OTHER; note = 2'-O-methyluridine-3'-phosphate
  modified_base 15: mod_base = OTHER; note = 2'-O-methyladenosine-3'-phosphate
  modified_base 16: mod_base = OTHER; note = 2'-O-methyluridine-3'-phosphate
  modified_base 17: mod_base = OTHER; note = 2'-O-methylcytidine-3'-phosphate
  modified_base 18: mod_base = OTHER; note = 2'-O-methyladenosine-3'-phosphate
  modified_base 19: mod_base = OTHER; note = 2'-O-methyladenosine-3'-phosphate
  modified_base 20: mod_base = OTHER; note = 2'-O-methyladenosine-3'-phosphate
  modified_base 21: mod_base = OTHER; note = 2'-O-methyluridine-3'-phosphate attached to N-[tris(N-acetylgalactosamine-alkyl)-amidodecanoyl)]-4-hydr oxyprolinol Hyp-(N-acetylgalactosamine-alkyl)3
tcagctgggaagatatcaaat

SEQ ID NO: 2465 - RNA, 23 nt, synthetic construct
  misc_feature 1..23: note = Description of Artificial Sequence: Synthetic oligonucleotide
  source 1..23: mol_type = other RNA
  modified_base 1: mod_base = OTHER; note = 2'-O-methyladenosine-3'- phosphorothioate
  modified_base 2: mod_base = OTHER; note = 2'-fluorouridine -3'-phosphorothioate
  modified_base 3: mod_base = OTHER; note = 2'-O-methyluridine-3'-phosphate
  modified_base 4: mod_base = OTHER; note = 2'-O-methyluridine-3'-phosphate
  modified_base 5: mod_base = OTHER; note = 2'-O-methylguanosine-3'-phosphate
  modified_base 6: mod_base = OTHER; note = 2'-fluoroadenosine-3'-phosphate
  modified_base 7: mod_base = OTHER; note = 2'-O-methyluridine-3'-phosphate
  modified_base 8: mod_base = OTHER; note = 2'-fluoroadenosine-3'-phosphate
  modified_base 9: mod_base = OTHER; note = 2'-fluorouridine-3'-phosphate
  modified_base 10: mod_base = OTHER; note = 2'-O-methylcytidine-3'-phosphate
  modified_base 11: mod_base = OTHER; note = 2'-O-methyluridine-3'-phosphate
  modified_base 12: mod_base = OTHER; note = 2'-O-methyluridine-3'-phosphate
  modified_base 13: mod_base = OTHER; note = 2'-O-methylcytidine-3'-phosphate
  modified_base 14: mod_base = OTHER; note = 2'-fluorocytidine-3'-phosphate
  modified_base 15: mod_base = OTHER; note = 2'-O-methylcytidine-3'-phosphate
  modified_base 16: mod_base = OTHER; note = 2'-fluoroadenosine-3'-phosphate
  modified_base 17: mod_base = OTHER; note = 2'-O-methylguanosine-3'-phosphate
  modified_base 18: mod_base = OTHER; note = 2'-O-methylcytidine-3'-phosphate
  modified_base 19: mod_base = OTHER; note = 2'-O-methyluridine-3'-phosphate
  modified_base 20: mod_base = OTHER; note = 2'-O-methylguanosine-3'-phosphate
  modified_base 21: mod_base = OTHER; note = 2'-O-methyladenosine-3'- phosphorothioate
  modified_base 22: mod_base = OTHER; note = 2'-O-methyluridine-3'-phosphorothioate
  modified_base 23: mod_base = OTHER; note = 2'-O-methyladenosine-3'-phosphate
atttgatatcttcccagctgata

SEQ ID NO: 2466 - RNA, 21 nt, synthetic construct
  misc_feature 1..21: note = Description of Artificial Sequence: Synthetic oligonucleotide
  source 1..21: mol_type = other RNA
  modified_base 1: mod_base = OTHER; note = 2'-O-methyluridine-3'-phosphorothioate
  modified_base 2: mod_base = OTHER; note = 2'-O-methylcytidine-3'- phosphorothioate
  modified_base 3: mod_base = OTHER; note = 2'-O-methylcytidine-3'-phosphate
  modified_base 4: mod_base = OTHER; note = 2'-O-methyladenosine-3'-phosphate
  modified_base 5: mod_base = OTHER; note = 2'-O-methyladenosine-3'-phosphate
  modified_base 6: mod_base = OTHER; note = 2'-O-methyladenosine-3'-phosphate
  modified_base 7: mod_base = OTHER; note = 2'-fluoroguanosine-3'-phosphate
  modified_base 8: mod_base = OTHER; note = 2'-O-methyluridine-3'-phosphate
  modified_base 9: mod_base = OTHER; note = 2'-fluorocytidine-3'-phosphate
  modified_base 10: mod_base = OTHER; note = 2'-fluorouridine-3'-phosphate
  modified_base 11: mod_base = OTHER; note = 2'-fluoroadenosine-3'-phosphate
  modified_base 12: mod_base = OTHER; note = 2'-O-methyluridine-3'-phosphate
  modified_base 13: mod_base = OTHER; note = 2'-O-methyladenosine-3'-phosphate
  modified_base 14: mod_base = OTHER; note = 2'-O-methyluridine-3'-phosphate
  modified_base 15: mod_base = OTHER; note = 2'-O-methyladenosine-3'-phosphate
  modified_base 16: mod_base = OTHER; note = 2'-O-methyluridine-3'-phosphate
  modified_base 17: mod_base = OTHER; note = 2'-O-methylguanosine-3'-phosphate
  modified_base 18: mod_base = OTHER; note = 2'-O-methyladenosine-3'-phosphate
  modified_base 19: mod_base = OTHER; note = 2'-O-methylcytidine-3'-phosphate
  modified_base 20: mod_base = OTHER; note = 2'-O-methyluridine-3'-phosphate
  modified_base 21: mod_base = OTHER; note = 2'-O-methyladenosine-3'-phosphate attached to N-[tris(N-acetylgalactosamine-alkyl)-amidodecanoyl)]-4-hydr oxyprolinol Hyp-(N-acetylgalactosamine-alkyl)3
tccaaagtctatatatgacta

SEQ ID NO: 2467 - RNA, 23 nt, synthetic construct
  misc_feature 1..23: note = Description of Artificial Sequence: Synthetic oligonucleotide
  source 1..23: mol_type = other RNA
  modified_base 1: mod_base = OTHER; note = 2'-O-methyluridine-3'-phosphorothioate
  modified_base 2: mod_base = OTHER; note = 2'-fluoroadenosine-3'-phosphorothioate
  modified_base 3: mod_base = OTHER; note = 2'-O-methylguanosine-3'-phosphate
  modified_base 4: mod_base = OTHER; note = 2'-O-methyluridine-3'-phosphate
  modified_base 5: mod_base = OTHER; note = 2'-O-methylcytidine-3'-phosphate
  modified_base 6: mod_base = OTHER; note = 2'-fluoroadenosine-3'-phosphate
  modified_base 7: mod_base = OTHER; note = 2'-O-methyluridine-3'-phosphate
  modified_base 8: mod_base = OTHER; note = 2'-fluoroadenosine-3'-phosphate
  modified_base 9: mod_base = OTHER; note = 2'-fluorouridine-3'-phosphate
  modified_base 10: mod_base = OTHER; note = 2'-O-methyladenosine-3'-phosphate
  modified_base 11: mod_base = OTHER; note = 2'-O-methyluridine-3'-phosphate
  modified_base 12: mod_base = OTHER; note = 2'-O-methyladenosine-3'-phosphate
  modified_base 13: mod_base = OTHER; note = 2'-O-methylguanosine-3'-phosphate
  modified_base 14: mod_base = OTHER; note = 2'-fluoroadenosine-3'-phosphate
  modified_base 15: mod_base = OTHER; note = 2'-O-methylcytidine-3'-phosphate
  modified_base 16: mod_base = OTHER; note = 2'-fluorouridine-3'-phosphate
  modified_base 17: mod_base = OTHER; note = 2'-O-methyluridine-3'-phosphate
  modified_base 18: mod_base = OTHER; note = 2'-O-methyluridine-3'-phosphate
  modified_base 19: mod_base = OTHER; note = 2'-O-methylguanosine-3'-phosphate
  modified_base 20: mod_base = OTHER; note = 2'-O-methylguanosine-3'-phosphate
  modified_base 21: mod_base = OTHER; note = 2'-O-methyladenosine-3'- phosphorothioate
  modified_base 22: mod_base = OTHER; note = 2'-O-methyladenosine-3'- phosphorothioate
  modified_base 23: mod_base = OTHER; note = 2'-O-methylguanosine-3'-phosphate
tagtcatatatagactttggaag

SEQ ID NO: 2468 - RNA, 21 nt, synthetic construct
  misc_feature 1..21: note = Description of Artificial Sequence: Synthetic oligonucleotide
  source 1..21: mol_type = other RNA
  modified_base 1: mod_base = OTHER; note = 2'-O-methylcytidine-3'- phosphorothioate
  modified_base 2: mod_base = OTHER; note = 2'-O-methylcytidine-3'- phosphorothioate
  modified_base 3: mod_base = OTHER; note = 2'-O-methyladenosine-3'-phosphate
  modified_base 4: mod_base = OTHER; note = 2'-O-methyladenosine-3'-phosphate
  modified_base 5: mod_base = OTHER; note = 2'-O-methyladenosine-3'-phosphate
  modified_base 6: mod_base = OTHER; note = 2'-O-methylguanosine-3'-phosphate
  modified_base 7: mod_base = OTHER; note = 2'-fluorouridine-3'-phosphate
  modified_base 8: mod_base = OTHER; note = 2'-O-methylcytidine-3'-phosphate
  modified_base 9: mod_base = OTHER; note = 2'-fluorouridine-3'-phosphate
  modified_base 10: mod_base = OTHER; note = 2'-fluoroadenosine-3'-phosphate
  modified_base 11: mod_base = OTHER; note = 2'-fluorouridine-3'-phosphate
  modified_base 12: mod_base = OTHER; note = 2'-O-methyladenosine-3'-phosphate
  modified_base 13: mod_base = OTHER; note = 2'-O-methyluridine-3'-phosphate
  modified_base 14: mod_base = OTHER; note = 2'-O-methyladenosine-3'-phosphate
  modified_base 15: mod_base = OTHER; note = 2'-O-methyluridine-3'-phosphate
  modified_base 16: mod_base = OTHER; note = 2'-O-methylguanosine-3'-phosphate
  modified_base 17: mod_base = OTHER; note = 2'-O-methyladenosine-3'-phosphate
  modified_base 18: mod_base = OTHER; note = 2'-O-methylcytidine-3'-phosphate
  modified_base 19: mod_base = OTHER; note = 2'-O-methyluridine-3'-phosphate
  modified_base 20: mod_base = OTHER; note = 2'-O-methyladenosine-3'-phosphate
  modified_base 21: mod_base = OTHER; note = 2'-O-methyluridine-3'-phosphate attached to N-[tris(N-acetylgalactosamine-alkyl)-amidodecanoyl)]-4-hydr oxyprolinol Hyp-(N-acetylgalactosamine-alkyl)3
ccaaagtctatatatgactat

SEQ ID NO: 2469 - RNA, 23 nt, synthetic construct
  misc_feature 1..23: note = Description of Artificial Sequence: Synthetic oligonucleotide
  source 1..23: mol_type = other RNA
  modified_base 1: mod_base = OTHER; note = 2'-O-methyladenosine-3'- phosphorothioate
  modified_base 2: mod_base = OTHER; note = 2'-fluorouridine -3'-phosphorothioate
  modified_base 3: mod_base = OTHER; note = 2'-O-methyladenosine-3'-phosphate
  modified_base 4: mod_base = OTHER; note = 2'-O-methylguanosine-3'-phosphate
  modified_base 5: mod_base = OTHER; note = 2'-O-methyluridine-3'-phosphate
  modified_base 6: mod_base = OTHER; note = 2'-fluorocytidine-3'-phosphate
  modified_base 7: mod_base = OTHER; note = 2'-O-methyladenosine-3'-phosphate
  modified_base 8: mod_base = OTHER; note = 2'-fluorouridine-3'-phosphate
  modified_base 9: mod_base = OTHER; note = 2'-fluoroadenosine-3'-phosphate
  modified_base 10: mod_base = OTHER; note = 2'-O-methyluridine-3'-phosphate
  modified_base 11: mod_base = OTHER; note = 2'-O-methyladenosine-3'-phosphate
  modified_base 12: mod_base = OTHER; note = 2'-O-methyluridine-3'-phosphate
  modified_base 13: mod_base = OTHER; note = 2'-O-methyladenosine-3'-phosphate
  modified_base 14: mod_base = OTHER; note = 2'-fluoroguanosine-3'-phosphate
  modified_base 15: mod_base = OTHER; note = 2'-O-methyladenosine-3'-phosphate
  modified_base 16: mod_base = OTHER; note = 2'-fluorocytidine-3'-phosphate
  modified_base 17: mod_base = OTHER; note = 2'-O-methyluridine-3'-phosphate
  modified_base 18: mod_base = OTHER; note = 2'-O-methyluridine-3'-phosphate
  modified_base 19: mod_base = OTHER; note = 2'-O-methyluridine-3'-phosphate
  modified_base 20: mod_base = OTHER; note = 2'-O-methylguanosine-3'-phosphate
  modified_base 21: mod_base = OTHER; note = 2'-O-methylguanosine-3'- phosphorothioate
  modified_base 22: mod_base = OTHER; note = 2'-O-methyladenosine-3'- phosphorothioate
  modified_base 23: mod_base = OTHER; note = 2'-O-methyladenosine-3'-phosphate
atagtcatatatagactttggaa

SEQ ID NO: 2470 - RNA, 21 nt, synthetic construct
  misc_feature 1..21: note = Description of Artificial Sequence: Synthetic oligonucleotide
  source 1..21: mol_type = other RNA
  modified_base 1: mod_base = OTHER; note = 2'-O-methyluridine-3'-phosphorothioate
  modified_base 2: mod_base = OTHER; note = 2'-O-methyladenosine-3'- phosphorothioate
  modified_base 3: mod_base = OTHER; note = 2'-O-methylcytidine-3'-phosphate
  modified_base 4: mod_base = OTHER; note = 2'-O-methyluridine-3'-phosphate
  modified_base 5: mod_base = OTHER; note = 2'-O-methyluridine-3'-phosphate
  modified_base 6: mod_base = OTHER; note = 2'-O-methylcytidine-3'-phosphate
  modified_base 7: mod_base = OTHER; note = 2'-fluorocytidine-3'-phosphate
  modified_base 8: mod_base = OTHER; note = 2'-O-methyladenosine-3'-phosphate
  modified_base 9: mod_base = OTHER; note = 2'-fluoroadenosine-3'-phosphate
  modified_base 10: mod_base = OTHER; note = 2'-fluoroadenosine-3'-phosphate
  modified_base 11: mod_base = OTHER; note = 2'-fluoroguanosine-3'-phosphate
  modified_base 12: mod_base = OTHER; note = 2'-O-methyluridine-3'-phosphate
  modified_base 13: mod_base = OTHER; note = 2'-O-methylcytidine-3'-phosphate
  modified_base 14: mod_base = OTHER; note = 2'-O-methyluridine-3'-phosphate
  modified_base 15: mod_base = OTHER; note = 2'-O-methyladenosine-3'-phosphate
  modified_base 16: mod_base = OTHER; note = 2'-O-methyluridine-3'-phosphate
  modified_base 17: mod_base = OTHER; note = 2'-O-methyladenosine-3'-phosphate
  modified_base 18: mod_base = OTHER; note = 2'-O-methyluridine-3'-phosphate
  modified_base 19: mod_base = OTHER; note = 2'-O-methyladenosine-3'-phosphate
  modified_base 20: mod_base = OTHER; note = 2'-O-methyluridine-3'-phosphate
  modified_base 21: mod_base = OTHER; note = 2'-O-methylguanosine-3'-phosphate attached to N-[tris(N-acetylgalactosamine-alkyl)-amidodecanoyl)]-4-hydr oxyprolinol Hyp-(N-acetylgalactosamine-alkyl)3
tacttccaaagtctatatatg

SEQ ID NO: 2471 - RNA, 23 nt, synthetic construct
  misc_feature 1..23: note = Description of Artificial Sequence: Synthetic oligonucleotide
  source 1..23: mol_type = other RNA
  modified_base 1: mod_base = OTHER; note = 2'-O-methylcytidine-3'- phosphorothioate
  modified_base 2: mod_base = OTHER; note = 2'-fluoroadenosine-3'-phosphorothioate
  modified_base 3: mod_base = OTHER; note = 2'-O-methyluridine-3'-phosphate
  modified_base 4: mod_base = OTHER; note = 2'-O-methyladenosine-3'-phosphate
  modified_base 5: mod_base = OTHER; note = 2'-O-methyluridine-3'-phosphate
  modified_base 6: mod_base = OTHER; note = 2'-fluoroadenosine-3'-phosphate
  modified_base 7: mod_base = OTHER; note = 2'-O-methyluridine-3'-phosphate
  modified_base 8: mod_base = OTHER; note = 2'-fluoroadenosine-3'-phosphate
  modified_base 9: mod_base = OTHER; note = 2'-fluoroguanosine-3'-phosphate
  modified_base 10: mod_base = OTHER; note = 2'-O-methyladenosine-3'-phosphate
  modified_base 11: mod_base = OTHER; note = 2'-O-methylcytidine-3'-phosphate
  modified_base 12: mod_base = OTHER; note = 2'-O-methyluridine-3'-phosphate
  modified_base 13: mod_base = OTHER; note = 2'-O-methyluridine-3'-phosphate
  modified_base 14: mod_base = OTHER; note = 2'-fluorouridine-3'-phosphate
  modified_base 15: mod_base = OTHER; note = 2'-O-methylguanosine-3'-phosphate
  modified_base 16: mod_base = OTHER; note = 2'-fluoroguanosine-3'-phosphate
  modified_base 17: mod_base = OTHER; note = 2'-O-methyladenosine-3'-phosphate
  modified_base 18: mod_base = OTHER; note = 2'-O-methyladenosine-3'-phosphate
  modified_base 19: mod_base = OTHER; note = 2'-O-methylguanosine-3'-phosphate
  modified_base 20: mod_base = OTHER; note = 2'-O-methyluridine-3'-phosphate
  modified_base 21: mod_base = OTHER; note = 2'-O-methyladenosine-3'- phosphorothioate
  modified_base 22: mod_base = OTHER; note = 2'-O-methylcytidine-3'- phosphorothioate
  modified_base 23: mod_base = OTHER; note = 2'-O-methyluridine-3'-phosphate
catatatagactttggaagtact

SEQ ID NO: 2472 - RNA, 21 nt, synthetic construct
  misc_feature 1..21: note = Description of Artificial Sequence: Synthetic oligonucleotide
  source 1..21: mol_type = other RNA
  modified_base 1: mod_base = OTHER; note = 2'-O-methylguanosine-3'- phosphorothioate
  modified_base 2: mod_base = OTHER; note = 2'-O-methyluridine-3'-phosphorothioate
  modified_base 3: mod_base = OTHER; note = 2'-O-methyladenosine-3'-phosphate
  modified_base 4: mod_base = OTHER; note = 2'-O-methylcytidine-3'-phosphate
  modified_base 5: mod_base = OTHER; note = 2'-O-methyluridine-3'-phosphate
  modified_base 6: mod_base = OTHER; note = 2'-O-methyluridine-3'-phosphate
  modified_base 7: mod_base = OTHER; note = 2'-fluorocytidine-3'-phosphate
  modified_base 8: mod_base = OTHER; note = 2'-O-methylcytidine-3'-phosphate
  modified_base 9: mod_base = OTHER; note = 2'-fluoroadenosine-3'-phosphate
  modified_base 10: mod_base = OTHER; note = 2'-fluoroadenosine-3'-phosphate
  modified_base 11: mod_base = OTHER; note = 2'-fluoroadenosine-3'-phosphate
  modified_base 12: mod_base = OTHER; note = 2'-O-methylguanosine-3'-phosphate
  modified_base 13: mod_base = OTHER; note = 2'-O-methyluridine-3'-phosphate
  modified_base 14: mod_base = OTHER; note = 2'-O-methylcytidine-3'-phosphate
  modified_base 15: mod_base = OTHER; note = 2'-O-methyluridine-3'-phosphate
  modified_base 16: mod_base = OTHER; note = 2'-O-methyladenosine-3'-phosphate
  modified_base 17: mod_base = OTHER; note = 2'-O-methyluridine-3'-phosphate
  modified_base 18: mod_base = OTHER; note = 2'-O-methyladenosine-3'-phosphate
  modified_base 19: mod_base = OTHER; note = 2'-O-methyluridine-3'-phosphate
  modified_base 20: mod_base = OTHER; note = 2'-O-methyladenosine-3'-phosphate
  modified_base 21: mod_base = OTHER; note = 2'-O-methyluridine-3'-phosphate attached to N-[tris(N-acetylgalactosamine-alkyl)-amidodecanoyl)]-4-hydr oxyprolinol Hyp-(N-acetylgalactosamine-alkyl)3
gtacttccaaagtctatatat

SEQ ID NO: 2473 - RNA, 23 nt, synthetic construct
  misc_feature 1..23: note = Description of Artificial Sequence: Synthetic oligonucleotide
  source 1..23: mol_type = other RNA
  modified_base 1: mod_base = OTHER; note = 2'-O-methyladenosine-3'- phosphorothioate
  modified_base 2: mod_base = OTHER; note = 2'-fluorouridine -3'-phosphorothioate
  modified_base 3: mod_base = OTHER; note = 2'-O-methyladenosine-3'-phosphate
  modified_base 4: mod_base = OTHER; note = 2'-O-methyluridine-3'-phosphate
  modified_base 5: mod_base = OTHER; note = 2'-O-methyladenosine-3'-phosphate
  modified_base 6: mod_base = OTHER; note = 2'-fluorouridine-3'-phosphate
  modified_base 7: mod_base = OTHER; note = 2'-O-methyladenosine-3'-phosphate
  modified_base 8: mod_base = OTHER; note = 2'-fluoroguanosine-3'-phosphate
  modified_base 9: mod_base = OTHER; note = 2'-fluoroadenosine-3'-phosphate
  modified_base 10: mod_base = OTHER; note = 2'-O-methylcytidine-3'-phosphate
  modified_base 11: mod_base = OTHER; note = 2'-O-methyluridine-3'-phosphate
  modified_base 12: mod_base = OTHER; note = 2'-O-methyluridine-3'-phosphate
  modified_base 13: mod_base = OTHER; note = 2'-O-methyluridine-3'-phosphate
  modified_base 14: mod_base = OTHER; note = 2'-fluoroguanosine-3'-phosphate
  modified_base 15: mod_base = OTHER; note = 2'-O-methylguanosine-3'-phosphate
  modified_base 16: mod_base = OTHER; note = 2'-fluoroadenosine-3'-phosphate
  modified_base 17: mod_base = OTHER; note = 2'-O-methyladenosine-3'-phosphate
  modified_base 18: mod_base = OTHER; note = 2'-O-methylguanosine-3'-phosphate
  modified_base 19: mod_base = OTHER; note = 2'-O-methyluridine-3'-phosphate
  modified_base 20: mod_base = OTHER; note = 2'-O-methyladenosine-3'-phosphate
  modified_base 21: mod_base = OTHER; note = 2'-O-methylcytidine-3'- phosphorothioate
  modified_base 22: mod_base = OTHER; note = 2'-O-methyluridine-3'-phosphorothioate
  modified_base 23: mod_base = OTHER; note = 2'-O-methylguanosine-3'-phosphate
atatatagactttggaagtactg

SEQ ID NO: 2474 - RNA, 21 nt, synthetic construct
  misc_feature 1..21: note = Description of Artificial Sequence: Synthetic oligonucleotide
  source 1..21: mol_type = other RNA
  modified_base 1: mod_base = OTHER; note = 2'-O-methyluridine-3'-phosphorothioate
  modified_base 2: mod_base = OTHER; note = 2'-O-methyluridine-3'-phosphorothioate
  modified_base 3: mod_base = OTHER; note = 2'-O-methyladenosine-3'-phosphate
  modified_base 4: mod_base = OTHER; note = 2'-O-methyluridine-3'-phosphate
  modified_base 5: mod_base = OTHER; note = 2'-O-methylguanosine-3'-phosphate
  modified_base 6: mod_base = OTHER; note = 2'-O-methyladenosine-3'-phosphate
  modified_base 7: mod_base = OTHER; note = 2'-fluoroadenosine-3'-phosphate
  modified_base 8: mod_base = OTHER; note = 2'-O-methylcytidine-3'-phosphate
  modified_base 9: mod_base = OTHER; note = 2'-fluoroadenosine-3'-phosphate
  modified_base 10: mod_base = OTHER; note = 2'-fluoroadenosine-3'-phosphate
  modified_base 11: mod_base = OTHER; note = 2'-fluorocytidine-3'-phosphate
  modified_base 12: mod_base = OTHER; note = 2'-O-methyladenosine-3'-phosphate
  modified_base 13: mod_base = OTHER; note = 2'-O-methyluridine-3'-phosphate
  modified_base 14: mod_base = OTHER; note = 2'-O-methylguanosine-3'-phosphate
  modified_base 15: mod_base = OTHER; note = 2'-O-methylcytidine-3'-phosphate
  modified_base 16: mod_base = OTHER; note = 2'-O-methyluridine-3'-phosphate
  modified_base 17: mod_base = OTHER; note = 2'-O-methyladenosine-3'-phosphate
  modified_base 18: mod_base = OTHER; note = 2'-O-methyladenosine-3'-phosphate
  modified_base 19: mod_base = OTHER; note = 2'-O-methyladenosine-3'-phosphate
  modified_base 20: mod_base = OTHER; note = 2'-O-methyluridine-3'-phosphate
  modified_base 21: mod_base = OTHER; note = 2'-O-methylcytidine-3'-phosphate attached to N-[tris(N-acetylgalactosamine-alkyl)-amidodecanoyl)]-4-hydr oxyprolinol Hyp-(N-acetylgalactosamine-alkyl)3
ttatgaacaacatgctaaatc

SEQ ID NO: 2475 - RNA, 23 nt, synthetic construct
  misc_feature 1..23: note = Description of Artificial Sequence: Synthetic oligonucleotide
  source 1..23: mol_type = other RNA
  modified_base 1: mod_base = OTHER; note = 2'-O-methylguanosine-3'- phosphorothioate
  modified_base 2: mod_base = OTHER; note = 2'-fluoroadenosine-3'-phosphorothioate
  modified_base 3: mod_base = OTHER; note = 2'-O-methyluridine-3'-phosphate
  modified_base 4: mod_base = OTHER; note = 2'-O-methyluridine-3'-phosphate
  modified_base 5: mod_base = OTHER; note = 2'-O-methyluridine-3'-phosphate
  modified_base 6: mod_base = OTHER; note = 2'-fluoroadenosine-3'-phosphate
  modified_base 7: mod_base = OTHER; note = 2'-O-methylguanosine-3'-phosphate
  modified_base 8: mod_base = OTHER; note = 2'-fluorocytidine-3'-phosphate
  modified_base 9: mod_base = OTHER; note = 2'-fluoroadenosine-3'-phosphate
  modified_base 10: mod_base = OTHER; note = 2'-O-methyluridine-3'-phosphate
  modified_base 11: mod_base = OTHER; note = 2'-O-methylguanosine-3'-phosphate
  modified_base 12: mod_base = OTHER; note = 2'-O-methyluridine-3'-phosphate
  modified_base 13: mod_base = OTHER; note = 2'-O-methyluridine-3'-phosphate
  modified_base 14: mod_base = OTHER; note = 2'-fluoroguanosine-3'-phosphate
  modified_base 15: mod_base = OTHER; note = 2'-O-methyluridine-3'-phosphate
  modified_base 16: mod_base = OTHER; note = 2'-fluorouridine-3'-phosphate
  modified_base 17: mod_base = OTHER; note = 2'-O-methylcytidine-3'-phosphate
  modified_base 18: mod_base = OTHER; note = 2'-O-methyladenosine-3'-phosphate
  modified_base 19: mod_base = OTHER; note = 2'-O-methyluridine-3'-phosphate
  modified_base 20: mod_base = OTHER; note = 2'-O-methyladenosine-3'-phosphate
  modified_base 21: mod_base = OTHER; note = 2'-O-methyladenosine-3'- phosphorothioate
  modified_base 22: mod_base = OTHER; note = 2'-O-methyluridine-3'-phosphorothioate
  modified_base 23: mod_base = OTHER; note = 2'-O-methylcytidine-3'-phosphate
gatttagcatgttgttcataatc

SEQ ID NO: 2476 - RNA, 21 nt, synthetic construct
  misc_feature 1..21: note = Description of Artificial Sequence: Synthetic oligonucleotide
  source 1..21: mol_type = other RNA
  modified_base 1: mod_base = OTHER; note = 2'-O-methyluridine-3'-phosphorothioate
  modified_base 2: mod_base = OTHER; note = 2'-O-methyladenosine-3'- phosphorothioate
  modified_base 3: mod_base = OTHER; note = 2'-O-methyluridine-3'-phosphate
  modified_base 4: mod_base = OTHER; note = 2'-O-methylguanosine-3'-phosphate
  modified_base 5: mod_base = OTHER; note = 2'-O-methyladenosine-3'-phosphate
  modified_base 6: mod_base = OTHER; note = 2'-O-methyladenosine-3'-phosphate
  modified_base 7: mod_base = OTHER; note = 2'-fluorocytidine-3'-phosphate
  modified_base 8: mod_base = OTHER; note = 2'-O-methyladenosine-3'-phosphate
  modified_base 9: mod_base = OTHER; note = 2'-fluoroadenosine-3'-phosphate
  modified_base 10: mod_base = OTHER; note = 2'-fluorocytidine-3'-phosphate
  modified_base 11: mod_base = OTHER; note = 2'-fluoroadenosine-3'-phosphate
  modified_base 12: mod_base = OTHER; note = 2'-O-methyluridine-3'-phosphate
  modified_base 13: mod_base = OTHER; note = 2'-O-methylguanosine-3'-phosphate
  modified_base 14: mod_base = OTHER; note = 2'-O-methylcytidine-3'-phosphate
  modified_base 15: mod_base = OTHER; note = 2'-O-methyluridine-3'-phosphate
  modified_base 16: mod_base = OTHER; note = 2'-O-methyladenosine-3'-phosphate
  modified_base 17: mod_base = OTHER; note = 2'-O-methyladenosine-3'-phosphate
  modified_base 18: mod_base = OTHER; note = 2'-O-methyladenosine-3'-phosphate
  modified_base 19: mod_base = OTHER; note = 2'-O-methyluridine-3'-phosphate
  modified_base 20: mod_base = OTHER; note = 2'-O-methylcytidine-3'-phosphate
  modified_base 21: mod_base = OTHER; note = 2'-O-methyladenosine-3'-phosphate attached to N-[tris(N-acetylgalactosamine-alkyl)-amidodecanoyl)]-4-hydr oxyprolinol Hyp-(N-acetylgalactosamine-alkyl)3
tatgaacaacatgctaaatca

SEQ ID NO: 2477 - RNA, 23 nt, synthetic construct
  misc_feature 1..23: note = Description of Artificial Sequence: Synthetic oligonucleotide
  source 1..23: mol_type = other RNA
  modified_base 1: mod_base = OTHER; note = 2'-O-methyluridine-3'-phosphorothioate
  modified_base 2: mod_base = OTHER; note = 2'-fluoroguanosine-3'-phosphorothioate
  modified_base 3: mod_base = OTHER; note = 2'-O-methyladenosine-3'-phosphate
  modified_base 4: mod_base = OTHER; note = 2'-O-methyluridine-3'-phosphate
  modified_base 5: mod_base = OTHER; note = 2'-O-methyluridine-3'-phosphate
  modified_base 6: mod_base = OTHER; note = 2'-fluorouridine-3'-phosphate
  modified_base 7: mod_base = OTHER; note = 2'-O-methyladenosine-3'-phosphate
  modified_base 8: mod_base = OTHER; note = 2'-fluoroguanosine-3'-phosphate
  modified_base 9: mod_base = OTHER; note = 2'-fluorocytidine-3'-phosphate
  modified_base 10: mod_base = OTHER; note = 2'-O-methyladenosine-3'-phosphate
  modified_base 11: mod_base = OTHER; note = 2'-O-methyluridine-3'-phosphate
  modified_base 12: mod_base = OTHER; note = 2'-O-methylguanosine-3'-phosphate
  modified_base 13: mod_base = OTHER; note = 2'-O-methyluridine-3'-phosphate
  modified_base 14: mod_base = OTHER; note = 2'-fluorouridine-3'-phosphate
  modified_base 15: mod_base = OTHER; note = 2'-O-methylguanosine-3'-phosphate
  modified_base 16: mod_base = OTHER; note = 2'-fluorouridine-3'-phosphate
  modified_base 17: mod_base = OTHER; note = 2'-O-methyluridine-3'-phosphate
  modified_base 18: mod_base = OTHER; note = 2'-O-methylcytidine-3'-phosphate
  modified_base 19: mod_base = OTHER; note = 2'-O-methyladenosine-3'-phosphate
  modified_base 20: mod_base = OTHER; note = 2'-O-methyluridine-3'-phosphate
  modified_base 21: mod_base = OTHER; note = 2'-O-methyladenosine-3'- phosphorothioate
  modified_base 22: mod_base = OTHER; note = 2'-O-methyladenosine-3'- phosphorothioate
  modified_base 23: mod_base = OTHER; note = 2'-O-methyluridine-3'-phosphate
tgatttagcatgttgttcataat

SEQ ID NO: 2478 - RNA, 21 nt, synthetic construct
  misc_feature 1..21: note = Description of Artificial Sequence: Synthetic oligonucleotide
  source 1..21: mol_type = other RNA
  modified_base 1: mod_base = OTHER; note = 2'-O-methyladenosine-3'- phosphorothioate
  modified_base 2: mod_base = OTHER; note = 2'-O-methyluridine-3'-phosphorothioate
  modified_base 3: mod_base = OTHER; note = 2'-O-methylguanosine-3'-phosphate
  modified_base 4: mod_base = OTHER; note = 2'-O-methyladenosine-3'-phosphate
  modified_base 5: mod_base = OTHER; note = 2'-O-methyluridine-3'-phosphate
  modified_base 6: mod_base = OTHER; note = 2'-O-methyluridine-3'-phosphate
  modified_base 7: mod_base = OTHER; note = 2'-fluoroadenosine-3'-phosphate
  modified_base 8: mod_base = OTHER; note = 2'-O-methyluridine-3'-phosphate
  modified_base 9: mod_base = OTHER; note = 2'-fluoroguanosine-3'-phosphate
  modified_base 10: mod_base = OTHER; note = 2'-fluoroadenosine-3'-phosphate
  modified_base 11: mod_base = OTHER; note = 2'-fluoroadenosine-3'-phosphate
  modified_base 12: mod_base = OTHER; note = 2'-O-methylcytidine-3'-phosphate
  modified_base 13: mod_base = OTHER; note = 2'-O-methyladenosine-3'-phosphate
  modified_base 14: mod_base = OTHER; note = 2'-O-methyladenosine-3'-phosphate
  modified_base 15: mod_base = OTHER; note = 2'-O-methylcytidine-3'-phosphate
  modified_base 16: mod_base = OTHER; note = 2'-O-methyladenosine-3'-phosphate
  modified_base 17: mod_base = OTHER; note = 2'-O-methyluridine-3'-phosphate
  modified_base 18: mod_base = OTHER; note = 2'-O-methylguanosine-3'-phosphate
  modified_base 19: mod_base = OTHER; note = 2'-O-methylcytidine-3'-phosphate
  modified_base 20: mod_base = OTHER; note = 2'-O-methyluridine-3'-phosphate
  modified_base 21: mod_base = OTHER; note = 2'-O-methyladenosine-3'-phosphate attached to N-[tris(N-acetylgalactosamine-alkyl)-amidodecanoyl)]-4-hydr oxyprolinol Hyp-(N-acetylgalactosamine-alkyl)3
atgattatgaacaacatgcta

SEQ ID NO: 2479 - RNA, 23 nt, synthetic construct
  misc_feature 1..23: note = Description of Artificial Sequence: Synthetic oligonucleotide
  source 1..23: mol_type = other RNA
  modified_base 1: mod_base = OTHER; note = 2'-O-methyluridine-3'-phosphorothioate
  modified_base 2: mod_base = OTHER; note = 2'-fluoroadenosine-3'-phosphorothioate
  modified_base 3: mod_base = OTHER; note = 2'-O-methylguanosine-3'-phosphate
  modified_base 4: mod_base = OTHER; note = 2'-O-methylcytidine-3'-phosphate
  modified_base 5: mod_base = OTHER; note = 2'-O-methyladenosine-3'-phosphate
  modified_base 6: mod_base = OTHER; note = 2'-fluorouridine-3'-phosphate
  modified_base 7: mod_base = OTHER; note = 2'-O-methylguanosine-3'-phosphate
  modified_base 8: mod_base = OTHER; note = 2'-fluorouridine-3'-phosphate
  modified_base 9: mod_base = OTHER; note = 2'-fluorouridine-3'-phosphate
  modified_base 10: mod_base = OTHER; note = 2'-O-methylguanosine-3'-phosphate
  modified_base 11: mod_base = OTHER; note = 2'-O-methyluridine-3'-phosphate
  modified_base 12: mod_base = OTHER; note = 2'-O-methyluridine-3'-phosphate
  modified_base 13: mod_base = OTHER; note = 2'-O-methylcytidine-3'-phosphate
  modified_base 14: mod_base = OTHER; note = 2'-fluoroadenosine-3'-phosphate
  modified_base 15: mod_base = OTHER; note = 2'-O-methyluridine-3'-phosphate
  modified_base 16: mod_base = OTHER; note = 2'-fluoroadenosine-3'-phosphate
  modified_base 17: mod_base = OTHER; note = 2'-O-methyladenosine-3'-phosphate
  modified_base 18: mod_base = OTHER; note = 2'-O-methyluridine-3'-phosphate
  modified_base 19: mod_base = OTHER; note = 2'-O-methylcytidine-3'-phosphate
  modified_base 20: mod_base = OTHER; note = 2'-O-methyladenosine-3'-phosphate
  modified_base 21: mod_base = OTHER; note = 2'-O-methyluridine-3'-phosphorothioate
  modified_base 22: mod_base = OTHER; note = 2'-O-methyluridine-3'-phosphorothioate
  modified_base 23: mod_base = OTHER; note = 2'-O-methylguanosine-3'-phosphate
tagcatgttgttcataatcattg

SEQ ID NO: 2480 - RNA, 21 nt, synthetic construct
  misc_feature 1..21: note = Description of Artificial Sequence: Synthetic oligonucleotide
  source 1..21: mol_type = other RNA
  modified_base 1: mod_base = OTHER; note = 2'-O-methyladenosine-3'- phosphorothioate
  modified_base 2: mod_base = OTHER; note = 2'-O-methyladenosine-3'- phosphorothioate
  modified_base 3: mod_base = OTHER; note = 2'-O-methyluridine-3'-phosphate
  modified_base 4: mod_base = OTHER; note = 2'-O-methylguanosine-3'-phosphate
  modified_base 5: mod_base = OTHER; note = 2'-O-methyladenosine-3'-phosphate
  modified_base 6: mod_base = OTHER; note = 2'-O-methyluridine-3'-phosphate
  modified_base 7: mod_base = OTHER; note = 2'-fluorouridine-3'-phosphate
  modified_base 8: mod_base = OTHER; note = 2'-O-methyladenosine-3'-phosphate
  modified_base 9: mod_base = OTHER; note = 2'-fluorouridine-3'-phosphate
  modified_base 10: mod_base = OTHER; note = 2'-fluoroguanosine-3'-phosphate
  modified_base 11: mod_base = OTHER; note = 2'-fluoroadenosine-3'-phosphate
  modified_base 12: mod_base = OTHER; note = 2'-O-methyladenosine-3'-phosphate
  modified_base 13: mod_base = OTHER; note = 2'-O-methylcytidine-3'-phosphate
  modified_base 14: mod_base = OTHER; note = 2'-O-methyladenosine-3'-phosphate
  modified_base 15: mod_base = OTHER; note = 2'-O-methyladenosine-3'-phosphate
  modified_base 16: mod_base = OTHER; note = 2'-O-methylcytidine-3'-phosphate
  modified_base 17: mod_base = OTHER; note = 2'-O-methyladenosine-3'-phosphate
  modified_base 18: mod_base = OTHER; note = 2'-O-methyluridine-3'-phosphate
  modified_base 19: mod_base = OTHER; note = 2'-O-methylguanosine-3'-phosphate
  modified_base 20: mod_base = OTHER; note = 2'-O-methylcytidine-3'-phosphate
  modified_base 21: mod_base = OTHER; note = 2'-O-methyluridine-3'-phosphate attached to N-[tris(N-acetylgalactosamine-alkyl)-amidodecanoyl)]-4-hydr oxyprolinol Hyp-(N-acetylgalactosamine-alkyl)3
aatgattatgaacaacatgct

SEQ ID NO: 2481 - RNA, 23 nt, synthetic construct
  misc_feature 1..23: note = Description of Artificial Sequence: Synthetic oligonucleotide
  source 1..23: mol_type = other RNA
  modified_base 1: mod_base = OTHER; note = 2'-O-methyladenosine-3'- phosphorothioate
  modified_base 2: mod_base = OTHER; note = 2'-fluoroguanosine-3'-phosphorothioate
  modified_base 3: mod_base = OTHER; note = 2'-O-methylcytidine-3'-phosphate
  modified_base 4: mod_base = OTHER; note = 2'-O-methyladenosine-3'-phosphate
  modified_base 5: mod_base = OTHER; note = 2'-O-methyluridine-3'-phosphate
  modified_base 6: mod_base = OTHER; note = 2'-fluoroguanosine-3'-phosphate
  modified_base 7: mod_base = OTHER; note = 2'-O-methyluridine-3'-phosphate
  modified_base 8: mod_base = OTHER; note = 2'-fluorouridine-3'-phosphate
  modified_base 9: mod_base = OTHER; note = 2'-fluoroguanosine-3'-phosphate
  modified_base 10: mod_base = OTHER; note = 2'-O-methyluridine-3'-phosphate
  modified_base 11: mod_base = OTHER; note = 2'-O-methyluridine-3'-phosphate
  modified_base 12: mod_base = OTHER; note = 2'-O-methylcytidine-3'-phosphate
  modified_base 13: mod_base = OTHER; note = 2'-O-methyladenosine-3'-phosphate
  modified_base 14: mod_base = OTHER; note = 2'-fluorouridine-3'-phosphate
  modified_base 15: mod_base = OTHER; note = 2'-O-methyladenosine-3'-phosphate
  modified_base 16: mod_base = OTHER; note = 2'-fluoroadenosine-3'-phosphate
  modified_base 17: mod_base = OTHER; note = 2'-O-methyluridine-3'-phosphate
  modified_base 18: mod_base = OTHER; note = 2'-O-methylcytidine-3'-phosphate
  modified_base 19: mod_base = OTHER; note = 2'-O-methyladenosine-3'-phosphate
  modified_base 20: mod_base = OTHER; note = 2'-O-methyluridine-3'-phosphate
  modified_base 21: mod_base = OTHER; note = 2'-O-methyluridine-3'-phosphorothioate
  modified_base 22: mod_base = OTHER; note = 2'-O-methylguanosine-3'- phosphorothioate
  modified_base 23: mod_base = OTHER; note = 2'-O-methyladenosine-3'-phosphate
agcatgttgttcataatcattga

SEQ ID NO: 2482 - RNA, 21 nt, synthetic construct
  misc_feature 1..21: note = Description of Artificial Sequence: Synthetic oligonucleotide
  source 1..21: mol_type = other RNA
  modified_base 1: mod_base = OTHER; note = 2'-O-methyladenosine-3'- phosphorothioate
  modified_base 2: mod_base = OTHER; note = 2'-O-methyladenosine-3'- phosphorothioate
  modified_base 3: mod_base = OTHER; note = 2'-O-methyluridine-3'-phosphate
  modified_base 4: mod_base = OTHER; note = 2'-O-methyluridine-3'-phosphate
  modified_base 5: mod_base = OTHER; note = 2'-O-methylcytidine-3'-phosphate
  modified_base 6: mod_base = OTHER; note = 2'-O-methylcytidine-3'-phosphate
  modified_base 7: mod_base = OTHER; note = 2'-fluorocytidine-3'-phosphate
  modified_base 8: mod_base = OTHER; note = 2'-O-methylcytidine-3'-phosphate
  modified_base 9: mod_base = OTHER; note = 2'-fluoroadenosine-3'-phosphate
  modified_base 10: mod_base = OTHER; note = 2'-fluorocytidine-3'-phosphate
  modified_base 11: mod_base = OTHER; note = 2'-fluorouridine-3'-phosphate
  modified_base 12: mod_base = OTHER; note = 2'-O-methyluridine-3'-phosphate
  modified_base 13: mod_base = OTHER; note = 2'-O-methylcytidine-3'-phosphate
  modified_base 14: mod_base = OTHER; note = 2'-O-methyladenosine-3'-phosphate
  modified_base 15: mod_base = OTHER; note = 2'-O-methyladenosine-3'-phosphate
  modified_base 16: mod_base = OTHER; note = 2'-O-methyluridine-3'-phosphate
  modified_base 17: mod_base = OTHER; note = 2'-O-methyladenosine-3'-phosphate
  modified_base 18: mod_base = OTHER; note = 2'-O-methylcytidine-3'-phosphate
  modified_base 19: mod_base = OTHER; note = 2'-O-methyladenosine-3'-phosphate
  modified_base 20: mod_base = OTHER; note = 2'-O-methyladenosine-3'-phosphate
  modified_base 21: mod_base = OTHER; note = 2'-O-methyladenosine-3'-phosphate attached to N-[tris(N-acetylgalactosamine-alkyl)-amidodecanoyl)]-4-hydr oxyprolinol Hyp-(N-acetylgalactosamine-alkyl)3
aattccccacttcaatacaaa

SEQ ID NO: 2483 - RNA, 23 nt, synthetic construct
  misc_feature 1..23: note = Description of Artificial Sequence: Synthetic oligonucleotide
  source 1..23: mol_type = other RNA
  modified_base 1: mod_base = OTHER; note = 2'-O-methyluridine-3'-phosphorothioate
  modified_base 2: mod_base = OTHER; note = 2'-fluorouridine -3'-phosphorothioate
  modified_base 3: mod_base = OTHER; note = 2'-O-methyluridine-3'-phosphate
  modified_base 4: mod_base = OTHER; note = 2'-O-methylguanosine-3'-phosphate
  modified_base 5: mod_base = OTHER; note = 2'-O-methyluridine-3'-phosphate
  modified_base 6: mod_base = OTHER; note = 2'-fluoroadenosine-3'-phosphate
  modified_base 7: mod_base = OTHER; note = 2'-O-methyluridine-3'-phosphate
  modified_base 8: mod_base = OTHER; note = 2'-fluorouridine-3'-phosphate
  modified_base 9: mod_base = OTHER; note = 2'-fluoroguanosine-3'-phosphate
  modified_base 10: mod_base = OTHER; note = 2'-O-methyladenosine-3'-phosphate
  modified_base 11: mod_base = OTHER; note = 2'-O-methyladenosine-3'-phosphate
  modified_base 12: mod_base = OTHER; note = 2'-O-methylguanosine-3'-phosphate
  modified_base 13: mod_base = OTHER; note = 2'-O-methyluridine-3'-phosphate
  modified_base 14: mod_base = OTHER; note = 2'-fluoroguanosine-3'-phosphate
  modified_base 15: mod_base = OTHER; note = 2'-O-methylguanosine-3'-phosphate
  modified_base 16: mod_base = OTHER; note = 2'-fluoroguanosine-3'-phosphate
  modified_base 17: mod_base = OTHER; note = 2'-O-methylguanosine-3'-phosphate
  modified_base 18: mod_base = OTHER; note = 2'-O-methyladenosine-3'-phosphate
  modified_base 19: mod_base = OTHER; note = 2'-O-methyladenosine-3'-phosphate
  modified_base 20: mod_base = OTHER; note = 2'-O-methyluridine-3'-phosphate
  modified_base 21: mod_base = OTHER; note = 2'-O-methyluridine-3'-phosphorothioate
  modified_base 22: mod_base = OTHER; note = 2'-O-methyladenosine-3'- phosphorothioate
  modified_base 23: mod_base = OTHER; note = 2'-O-methylcytidine-3'-phosphate
tttgtattgaagtggggaattac

SEQ ID NO: 2484 - RNA, 21 nt, synthetic construct
  misc_feature 1..21: note = Description of Artificial Sequence: Synthetic oligonucleotide
  source 1..21: mol_type = other RNA
  modified_base 1: mod_base = OTHER; note = 2'-O-methyladenosine-3'- phosphorothioate
  modified_base 2: mod_base = OTHER; note = 2'-O-methyluridine-3'-phosphorothioate
  modified_base 3: mod_base = OTHER; note = 2'-O-methyluridine-3'-phosphate
  modified_base 4: mod_base = OTHER; note = 2'-O-methylcytidine-3'-phosphate
  modified_base 5: mod_base = OTHER; note = 2'-O-methylcytidine-3'-phosphate
  modified_base 6: mod_base = OTHER; note = 2'-O-methylcytidine-3'-phosphate
  modified_base 7: mod_base = OTHER; note = 2'-fluorocytidine-3'-phosphate
  modified_base 8: mod_base = OTHER; note = 2'-O-methyladenosine-3'-phosphate
  modified_base 9: mod_base = OTHER; note = 2'-fluorocytidine-3'-phosphate
  modified_base 10: mod_base = OTHER; note = 2'-fluorouridine-3'-phosphate
  modified_base 11: mod_base = OTHER; note = 2'-fluorouridine-3'-phosphate
  modified_base 12: mod_base = OTHER; note = 2'-O-methylcytidine-3'-phosphate
  modified_base 13: mod_base = OTHER; note = 2'-O-methyladenosine-3'-phosphate
  modified_base 14: mod_base = OTHER; note = 2'-O-methyladenosine-3'-phosphate
  modified_base 15: mod_base = OTHER; note = 2'-O-methyluridine-3'-phosphate
  modified_base 16: mod_base = OTHER; note = 2'-O-methyladenosine-3'-phosphate
  modified_base 17: mod_base = OTHER; note = 2'-O-methylcytidine-3'-phosphate
  modified_base 18: mod_base = OTHER; note = 2'-O-methyladenosine-3'-phosphate
  modified_base 19: mod_base = OTHER; note = 2'-O-methyladenosine-3'-phosphate
  modified_base 20: mod_base = OTHER; note = 2'-O-methyladenosine-3'-phosphate
  modified_base 21: mod_base = OTHER; note = 2'-O-methylguanosine-3'-phosphate attached to N-[tris(N-acetylgalactosamine-alkyl)-amidodecanoyl)]-4-hydr oxyprolinol Hyp-(N-acetylgalactosamine-alkyl)3
attccccacttcaatacaaag

SEQ ID NO: 2485 - RNA, 23 nt, synthetic construct
  misc_feature 1..23: note = Description of Artificial Sequence: Synthetic oligonucleotide
  source 1..23: mol_type = other RNA
  modified_base 1: mod_base = OTHER; note = 2'-O-methylcytidine-3'- phosphorothioate
  modified_base 2: mod_base = OTHER; note = 2'-fluorouridine -3'-phosphorothioate
  modified_base 3: mod_base = OTHER; note = 2'-O-methyluridine-3'-phosphate
  modified_base 4: mod_base = OTHER; note = 2'-O-methyluridine-3'-phosphate
  modified_base 5: mod_base = OTHER; note = 2'-O-methylguanosine-3'-phosphate
  modified_base 6: mod_base = OTHER; note = 2'-fluorouridine-3'-phosphate
  modified_base 7: mod_base = OTHER; note = 2'-O-methyladenosine-3'-phosphate
  modified_base 8: mod_base = OTHER; note = 2'-fluorouridine-3'-phosphate
  modified_base 9: mod_base = OTHER; note = 2'-fluorouridine-3'-phosphate
  modified_base 10: mod_base = OTHER; note = 2'-O-methylguanosine-3'-phosphate
  modified_base 11: mod_base = OTHER; note = 2'-O-methyladenosine-3'-phosphate
  modified_base 12: mod_base = OTHER; note = 2'-O-methyladenosine-3'-phosphate
  modified_base 13: mod_base = OTHER; note = 2'-O-methylguanosine-3'-phosphate
  modified_base 14: mod_base = OTHER; note = 2'-fluorouridine-3'-phosphate
  modified_base 15: mod_base = OTHER; note = 2'-O-methylguanosine-3'-phosphate
  modified_base 16: mod_base = OTHER; note = 2'-fluoroguanosine-3'-phosphate
  modified_base 17: mod_base = OTHER; note = 2'-O-methylguanosine-3'-phosphate
  modified_base 18: mod_base = OTHER; note = 2'-O-methylguanosine-3'-phosphate
  modified_base 19: mod_base = OTHER; note = 2'-O-methyladenosine-3'-phosphate
  modified_base 20: mod_base = OTHER; note = 2'-O-methyladenosine-3'-phosphate
  modified_base 21: mod_base = OTHER; note = 2'-O-methyluridine-3'-phosphorothioate
  modified_base 22: mod_base = OTHER; note = 2'-O-methyluridine-3'-phosphorothioate
  modified_base 23: mod_base = OTHER; note = 2'-O-methyladenosine-3'-phosphate
ctttgtattgaagtggggaatta

SEQ ID NO: 2486 - RNA, 21 nt, synthetic construct
  misc_feature 1..21: note = Description of Artificial Sequence: Synthetic oligonucleotide
  source 1..21: mol_type = other RNA
  modified_base 1: mod_base = OTHER; note = 2'-O-methylcytidine-3'- phosphorothioate
  modified_base 2: mod_base = OTHER; note = 2'-O-methyluridine-3'-phosphorothioate
  modified_base 3: mod_base = OTHER; note = 2'-O-methylguanosine-3'-phosphate
  modified_base 4: mod_base = OTHER; note = 2'-O-methyluridine-3'-phosphate
  modified_base 5: mod_base = OTHER; note = 2'-O-methyladenosine-3'-phosphate
  modified_base 6: mod_base = OTHER; note = 2'-O-methyladenosine-3'-phosphate
  modified_base 7: mod_base = OTHER; note = 2'-fluorouridine-3'-phosphate
  modified_base 8: mod_base = OTHER; note = 2'-O-methyluridine-3'-phosphate
  modified_base 9: mod_base = OTHER; note = 2'-fluorocytidine-3'-phosphate
  modified_base 10: mod_base = OTHER; note = 2'-fluorocytidine-3'-phosphate
  modified_base 11: mod_base = OTHER; note = 2'-fluorocytidine-3'-phosphate
  modified_base 12: mod_base = OTHER; note = 2'-O-methylcytidine-3'-phosphate
  modified_base 13: mod_base = OTHER; note = 2'-O-methyladenosine-3'-phosphate
  modified_base 14: mod_base = OTHER; note = 2'-O-methylcytidine-3'-phosphate
  modified_base 15: mod_base = OTHER; note = 2'-O-methyluridine-3'-phosphate
  modified_base 16: mod_base = OTHER; note = 2'-O-methyluridine-3'-phosphate
  modified_base 17: mod_base = OTHER; note = 2'-O-methylcytidine-3'-phosphate
  modified_base 18: mod_base = OTHER; note = 2'-O-methyladenosine-3'-phosphate
  modified_base 19: mod_base = OTHER; note = 2'-O-methyladenosine-3'-phosphate
  modified_base 20: mod_base = OTHER; note = 2'-O-methyluridine-3'-phosphate
  modified_base 21: mod_base = OTHER; note = 2'-O-methyladenosine-3'-phosphate attached to N-[tris(N-acetylgalactosamine-alkyl)-amidodecanoyl)]-4-hydr oxyprolinol Hyp-(N-acetylgalactosamine-alkyl)3
ctgtaattccccacttcaata

SEQ ID NO: 2487 - RNA, 23 nt, synthetic construct
  misc_feature 1..23: note = Description of Artificial Sequence: Synthetic oligonucleotide
  source 1..23: mol_type = other RNA
  modified_base 1: mod_base = OTHER; note = 2'-O-methyluridine-3'-phosphorothioate
  modified_base 2: mod_base = OTHER; note = 2'-fluoroadenosine-3'-phosphorothioate
  modified_base 3: mod_base = OTHER; note = 2'-O-methyluridine-3'-phosphate
  modified_base 4: mod_base = OTHER; note = 2'-O-methyluridine-3'-phosphate
  modified_base 5: mod_base = OTHER; note = 2'-O-methylguanosine-3'-phosphate
  modified_base 6: mod_base = OTHER; note = 2'-fluoroadenosine-3'-phosphate
  modified_base 7: mod_base = OTHER; note = 2'-O-methyladenosine-3'-phosphate
  modified_base 8: mod_base = OTHER; note = 2'-fluoroguanosine-3'-phosphate
  modified_base 9: mod_base = OTHER; note = 2'-fluorouridine-3'-phosphate
  modified_base 10: mod_base = OTHER; note = 2'-O-methylguanosine-3'-phosphate
  modified_base 11: mod_base = OTHER; note = 2'-O-methylguanosine-3'-phosphate
  modified_base 12: mod_base = OTHER; note = 2'-O-methylguanosine-3'-phosphate
  modified_base 13: mod_base = OTHER; note = 2'-O-methylguanosine-3'-phosphate
  modified_base 14: mod_base = OTHER; note = 2'-fluoroadenosine-3'-phosphate
  modified_base 15: mod_base = OTHER; note = 2'-O-methyladenosine-3'-phosphate
  modified_base 16: mod_base = OTHER; note = 2'-fluorouridine-3'-phosphate
  modified_base 17: mod_base = OTHER; note = 2'-O-methyluridine-3'-phosphate
  modified_base 18: mod_base = OTHER; note = 2'-O-methyladenosine-3'-phosphate
  modified_base 19: mod_base = OTHER; note = 2'-O-methylcytidine-3'-phosphate
  modified_base 20: mod_base = OTHER; note = 2'-O-methyladenosine-3'-phosphate
  modified_base 21: mod_base = OTHER; note = 2'-O-methylguanosine-3'- phosphorothioate
  modified_base 22: mod_base = OTHER; note = 2'-O-methyladenosine-3'- phosphorothioate
  modified_base 23: mod_base = OTHER; note = 2'-O-methylcytidine-3'-phosphate
tattgaagtggggaattacagac

SEQ ID NO: 2488 - RNA, 21 nt, synthetic construct
  misc_feature 1..21: note = Description of Artificial Sequence: Synthetic oligonucleotide
  source 1..21: mol_type = other RNA
  modified_base 1: mod_base = OTHER; note = 2'-O-methyluridine-3'-phosphorothioate
  modified_base 2: mod_base = OTHER; note = 2'-O-methylcytidine-3'- phosphorothioate
  modified_base 3: mod_base = OTHER; note = 2'-O-methyluridine-3'-phosphate
  modified_base 4: mod_base = OTHER; note = 2'-O-methylguanosine-3'-phosphate
  modified_base 5: mod_base = OTHER; note = 2'-O-methyluridine-3'-phosphate
  modified_base 6: mod_base = OTHER; note = 2'-O-methyladenosine-3'-phosphate
  modified_base 7: mod_base = OTHER; note = 2'-fluoroadenosine-3'-phosphate
  modified_base 8: mod_base = OTHER; note = 2'-O-methyluridine-3'-phosphate
  modified_base 9: mod_base = OTHER; note = 2'-fluorouridine-3'-phosphate
  modified_base 10: mod_base = OTHER; note = 2'-fluorocytidine-3'-phosphate
  modified_base 11: mod_base = OTHER; note = 2'-fluorocytidine-3'-phosphate
  modified_base 12: mod_base = OTHER; note = 2'-O-methylcytidine-3'-phosphate
  modified_base 13: mod_base = OTHER; note = 2'-O-methylcytidine-3'-phosphate
  modified_base 14: mod_base = OTHER; note = 2'-O-methyladenosine-3'-phosphate
  modified_base 15: mod_base = OTHER; note = 2'-O-methylcytidine-3'-phosphate
  modified_base 16: mod_base = OTHER; note = 2'-O-methyluridine-3'-phosphate
  modified_base 17: mod_base = OTHER; note = 2'-O-methyluridine-3'-phosphate
  modified_base 18: mod_base = OTHER; note = 2'-O-methylcytidine-3'-phosphate
  modified_base 19: mod_base = OTHER; note = 2'-O-methyladenosine-3'-phosphate
  modified_base 20: mod_base = OTHER; note = 2'-O-methyladenosine-3'-phosphate
  modified_base 21: mod_base = OTHER; note = 2'-O-methyluridine-3'-phosphate attached to N-[tris(N-acetylgalactosamine-alkyl)-amidodecanoyl)]-4-hydr oxyprolinol Hyp-(N-acetylgalactosamine-alkyl)3
tctgtaattccccacttcaat

SEQ ID NO: 2489 - RNA, 23 nt, synthetic construct
  misc_feature 1..23: note = Description of Artificial Sequence: Synthetic oligonucleotide
  source 1..23: mol_type = other RNA
  modified_base 1: mod_base = OTHER; note = 2'-O-methyladenosine-3'- phosphorothioate
  modified_base 2: mod_base = OTHER; note = 2'-fluorouridine -3'-phosphorothioate
  modified_base 3: mod_base = OTHER; note = 2'-O-methyluridine-3'-phosphate
  modified_base 4: mod_base = OTHER; note = 2'-O-methylguanosine-3'-phosphate
  modified_base 5: mod_base = OTHER; note = 2'-O-methyladenosine-3'-phosphate
  modified_base 6: mod_base = OTHER; note = 2'-fluoroadenosine-3'-phosphate
  modified_base 7: mod_base = OTHER; note = 2'-O-methylguanosine-3'-phosphate
  modified_base 8: mod_base = OTHER; note = 2'-fluorouridine-3'-phosphate
  modified_base 9: mod_base = OTHER; note = 2'-fluoroguanosine-3'-phosphate
  modified_base 10: mod_base = OTHER; note = 2'-O-methylguanosine-3'-phosphate
  modified_base 11: mod_base = OTHER; note = 2'-O-methylguanosine-3'-phosphate
  modified_base 12: mod_base = OTHER; note = 2'-O-methylguanosine-3'-phosphate
  modified_base 13: mod_base = OTHER; note = 2'-O-methyladenosine-3'-phosphate
  modified_base 14: mod_base = OTHER; note = 2'-fluoroadenosine-3'-phosphate
  modified_base 15: mod_base = OTHER; note = 2'-O-methyluridine-3'-phosphate
  modified_base 16: mod_base = OTHER; note = 2'-fluorouridine-3'-phosphate
  modified_base 17: mod_base = OTHER; note = 2'-O-methyladenosine-3'-phosphate
  modified_base 18: mod_base = OTHER; note = 2'-O-methylcytidine-3'-phosphate
  modified_base 19: mod_base = OTHER; note = 2'-O-methyladenosine-3'-phosphate
  modified_base 20: mod_base = OTHER; note = 2'-O-methylguanosine-3'-phosphate
  modified_base 21: mod_base = OTHER; note = 2'-O-methyladenosine-3'- phosphorothioate
  modified_base 22: mod_base = OTHER; note = 2'-O-methylcytidine-3'- phosphorothioate
  modified_base 23: mod_base = OTHER; note = 2'-O-methyluridine-3'-phosphate
attgaagtggggaattacagact

SEQ ID NO: 2490 - RNA, 21 nt, synthetic construct
  misc_feature 1..21: note = Description of Artificial Sequence: Synthetic oligonucleotide
  source 1..21: mol_type = other RNA
  modified_base 1: mod_base = OTHER; note = 2'-O-methyluridine-3'-phosphorothioate
  modified_base 2: mod_base = OTHER; note = 2'-O-methylguanosine-3'- phosphorothioate
  modified_base 3: mod_base = OTHER; note = 2'-O-methyladenosine-3'-phosphate
  modified_base 4: mod_base = OTHER; note = 2'-O-methyluridine-3'-phosphate
  modified_base 5: mod_base = OTHER; note = 2'-O-methylguanosine-3'-phosphate
  modified_base 6: mod_base = OTHER; note = 2'-O-methyluridine-3'-phosphate
  modified_base 7: mod_base = OTHER; note = 2'-fluoroguanosine-3'-phosphate
  modified_base 8: mod_base = OTHER; note = 2'-O-methylcytidine-3'-phosphate
  modified_base 9: mod_base = OTHER; note = 2'-fluoroguanosine-3'-phosphate
  modified_base 10: mod_base = OTHER; note = 2'-fluorouridine-3'-phosphate
  modified_base 11: mod_base = OTHER; note = 2'-fluoroadenosine-3'-phosphate
  modified_base 12: mod_base = OTHER; note = 2'-O-methyladenosine-3'-phosphate
  modified_base 13: mod_base = OTHER; note = 2'-O-methylcytidine-3'-phosphate
  modified_base 14: mod_base = OTHER; note = 2'-O-methyladenosine-3'-phosphate
  modified_base 15: mod_base = OTHER; note = 2'-O-methylguanosine-3'-phosphate
  modified_base 16: mod_base = OTHER; note = 2'-O-methyladenosine-3'-phosphate
  modified_base 17: mod_base = OTHER; note = 2'-O-methyluridine-3'-phosphate
  modified_base 18: mod_base = OTHER; note = 2'-O-methyluridine-3'-phosphate
  modified_base 19: mod_base = OTHER; note = 2'-O-methylcytidine-3'-phosphate
  modified_base 20: mod_base = OTHER; note = 2'-O-methyladenosine-3'-phosphate
  modified_base 21: mod_base = OTHER; note = 2'-O-methyladenosine-3'-phosphate attached to N-[tris(N-acetylgalactosamine-alkyl)-amidodecanoyl)]-4-hydr oxyprolinol Hyp-(N-acetylgalactosamine-alkyl)3
tgatgtgcgtaacagattcaa

SEQ ID NO: 2491 - RNA, 23 nt, synthetic construct
  misc_feature 1..23: note = Description of Artificial Sequence: Synthetic oligonucleotide
  source 1..23: mol_type = other RNA
  modified_base 1: mod_base = OTHER; note = 2'-O-methyluridine-3'-phosphorothioate
  modified_base 2: mod_base = OTHER; note = 2'-fluorouridine -3'-phosphorothioate
  modified_base 3: mod_base = OTHER; note = 2'-O-methylguanosine-3'-phosphate
  modified_base 4: mod_base = OTHER; note = 2'-O-methyladenosine-3'-phosphate
  modified_base 5: mod_base = OTHER; note = 2'-O-methyladenosine-3'-phosphate
  modified_base 6: mod_base = OTHER; note = 2'-fluorouridine-3'-phosphate
  modified_base 7: mod_base = OTHER; note = 2'-O-methylcytidine-3'-phosphate
  modified_base 8: mod_base = OTHER; note = 2'-fluorouridine-3'-phosphate
  modified_base 9: mod_base = OTHER; note = 2'-fluoroguanosine-3'-phosphate
  modified_base 10: mod_base = OTHER; note = 2'-O-methyluridine-3'-phosphate
  modified_base 11: mod_base = OTHER; note = 2'-O-methyluridine-3'-phosphate
  modified_base 12: mod_base = OTHER; note = 2'-O-methyladenosine-3'-phosphate
  modified_base 13: mod_base = OTHER; note = 2'-O-methylcytidine-3'-phosphate
  modified_base 14: mod_base = OTHER; note = 2'-fluoroguanosine-3'-phosphate
  modified_base 15: mod_base = OTHER; note = 2'-O-methylcytidine-3'-phosphate
  modified_base 16: mod_base = OTHER; note = 2'-fluoroadenosine-3'-phosphate
  modified_base 17: mod_base = OTHER; note = 2'-O-methylcytidine-3'-phosphate
  modified_base 18: mod_base = OTHER; note = 2'-O-methyladenosine-3'-phosphate
  modified_base 19: mod_base = OTHER; note = 2'-O-methyluridine-3'-phosphate
  modified_base 20: mod_base = OTHER; note = 2'-O-methylcytidine-3'-phosphate
  modified_base 21: mod_base = OTHER; note = 2'-O-methyladenosine-3'- phosphorothioate
  modified_base 22: mod_base = OTHER; note = 2'-O-methyluridine-3'-phosphorothioate
  modified_base 23: mod_base = OTHER; note = 2'-O-methylcytidine-3'-phosphate
ttgaatctgttacgcacatcatc

SEQ ID NO: 2492 - RNA, 21 nt, synthetic construct
  misc_feature 1..21: note = Description of Artificial Sequence: Synthetic oligonucleotide
  source 1..21: mol_type = other RNA
  modified_base 1: mod_base = OTHER; note = 2'-O-methylguanosine-3'- phosphorothioate
  modified_base 2: mod_base = OTHER; note = 2'-O-methyladenosine-3'- phosphorothioate
  modified_base 3: mod_base = OTHER; note = 2'-O-methyluridine-3'-phosphate
  modified_base 4: mod_base = OTHER; note = 2'-O-methylguanosine-3'-phosphate
  modified_base 5: mod_base = OTHER; note = 2'-O-methyluridine-3'-phosphate
  modified_base 6: mod_base = OTHER; note = 2'-O-methylguanosine-3'-phosphate
  modified_base 7: mod_base = OTHER; note = 2'-fluorocytidine-3'-phosphate
  modified_base 8: mod_base = OTHER; note = 2'-O-methylguanosine-3'-phosphate
  modified_base 9: mod_base = OTHER; note = 2'-fluorouridine-3'-phosphate
  modified_base 10: mod_base = OTHER; note = 2'-fluoroadenosine-3'-phosphate
  modified_base 11: mod_base = OTHER; note = 2'-fluoroadenosine-3'-phosphate
  modified_base 12: mod_base = OTHER; note = 2'-O-methylcytidine-3'-phosphate
  modified_base 13: mod_base = OTHER; note = 2'-O-methyladenosine-3'-phosphate
  modified_base 14: mod_base = OTHER; note = 2'-O-methylguanosine-3'-phosphate
  modified_base 15: mod_base = OTHER; note = 2'-O-methyladenosine-3'-phosphate
  modified_base 16: mod_base = OTHER; note = 2'-O-methyluridine-3'-phosphate
  modified_base 17: mod_base = OTHER; note = 2'-O-methyluridine-3'-phosphate
  modified_base 18: mod_base = OTHER; note = 2'-O-methylcytidine-3'-phosphate
  modified_base 19: mod_base = OTHER; note = 2'-O-methyladenosine-3'-phosphate
  modified_base 20: mod_base = OTHER; note = 2'-O-methyladenosine-3'-phosphate
  modified_base 21: mod_base = OTHER; note = 2'-O-methyladenosine-3'-phosphate attached to N-[tris(N-acetylgalactosamine-alkyl)-amidodecanoyl)]-4-hydr oxyprolinol Hyp-(N-acetylgalactosamine-alkyl)3
gatgtgcgtaacagattcaaa

SEQ ID NO: 2493 - RNA, 23 nt, synthetic construct
  misc_feature 1..23: note = Description of Artificial Sequence: Synthetic oligonucleotide
  source 1..23: mol_type = other RNA
  modified_base 1: mod_base = OTHER; note = 2'-O-methyluridine-3'-phosphorothioate
  modified_base 2: mod_base = OTHER; note = 2'-fluorouridine -3'-phosphorothioate
  modified_base 3: mod_base = OTHER; note = 2'-O-methyluridine-3'-phosphate
  modified_base 4: mod_base = OTHER; note = 2'-O-methylguanosine-3'-phosphate
  modified_base 5: mod_base = OTHER; note = 2'-O-methyladenosine-3'-phosphate
  modified_base 6: mod_base = OTHER; note = 2'-fluoroadenosine-3'-phosphate
  modified_base 7: mod_base = OTHER; note = 2'-O-methyluridine-3'-phosphate
  modified_base 8: mod_base = OTHER; note = 2'-fluorocytidine-3'-phosphate
  modified_base 9: mod_base = OTHER; note = 2'-fluorouridine-3'-phosphate
  modified_base 10: mod_base = OTHER; note = 2'-O-methylguanosine-3'-phosphate
  modified_base 11: mod_base = OTHER; note = 2'-O-methyluridine-3'-phosphate
  modified_base 12: mod_base = OTHER; note = 2'-O-methyluridine-3'-phosphate
  modified_base 13: mod_base = OTHER; note = 2'-O-methyladenosine-3'-phosphate
  modified_base 14: mod_base = OTHER; note = 2'-fluorocytidine-3'-phosphate
  modified_base 15: mod_base = OTHER; note = 2'-O-methylguanosine-3'-phosphate
  modified_base 16: mod_base = OTHER; note = 2'-fluorocytidine-3'-phosphate
  modified_base 17: mod_base = OTHER; note = 2'-O-methyladenosine-3'-phosphate
  modified_base 18: mod_base = OTHER; note = 2'-O-methylcytidine-3'-phosphate
  modified_base 19: mod_base = OTHER; note = 2'-O-methyladenosine-3'-phosphate
  modified_base 20: mod_base = OTHER; note = 2'-O-methyluridine-3'-phosphate
  modified_base 21: mod_base = OTHER; note = 2'-O-methylcytidine-3'- phosphorothioate
  modified_base 22: mod_base = OTHER; note = 2'-O-methyladenosine-3'- phosphorothioate
  modified_base 23: mod_base = OTHER; note = 2'-O-methyluridine-3'-phosphate
tttgaatctgttacgcacatcat

SEQ ID NO: 2494 - RNA, 21 nt, synthetic construct
  misc_feature 1..21: note = Description of Artificial Sequence: Synthetic oligonucleotide
  source 1..21: mol_type = other RNA
  modified_base 1: mod_base = OTHER; note = 2'-O-methyluridine-3'-phosphorothioate
  modified_base 2: mod_base = OTHER; note = 2'-O-methylguanosine-3'- phosphorothioate
  modified_base 3: mod_base = OTHER; note = 2'-O-methylguanosine-3'-phosphate
  modified_base 4: mod_base = OTHER; note = 2'-O-methyladenosine-3'-phosphate
  modified_base 5: mod_base = OTHER; note = 2'-O-methyluridine-3'-phosphate
  modified_base 6: mod_base = OTHER; note = 2'-O-methylguanosine-3'-phosphate
  modified_base 7: mod_base = OTHER; note = 2'-fluoroadenosine-3'-phosphate
  modified_base 8: mod_base = OTHER; note = 2'-O-methyluridine-3'-phosphate
  modified_base 9: mod_base = OTHER; note = 2'-fluoroguanosine-3'-phosphate
  modified_base 10: mod_base = OTHER; note = 2'-fluorouridine-3'-phosphate
  modified_base 11: mod_base = OTHER; note = 2'-fluoroguanosine-3'-phosphate
  modified_base 12: mod_base = OTHER; note = 2'-O-methylcytidine-3'-phosphate
  modified_base 13: mod_base = OTHER; note = 2'-O-methylguanosine-3'-phosphate
  modified_base 14: mod_base = OTHER; note = 2'-O-methyluridine-3'-phosphate
  modified_base 15: mod_base = OTHER; note = 2'-O-methyladenosine-3'-phosphate
  modified_base 16: mod_base = OTHER; note = 2'-O-methyladenosine-3'-phosphate
  modified_base 17: mod_base = OTHER; note = 2'-O-methylcytidine-3'-phosphate
  modified_base 18: mod_base = OTHER; note = 2'-O-methyladenosine-3'-phosphate
  modified_base 19: mod_base = OTHER; note = 2'-O-methylguanosine-3'-phosphate
  modified_base 20: mod_base = OTHER; note = 2'-O-methyladenosine-3'-phosphate
  modified_base 21: mod_base = OTHER; note = 2'-O-methyluridine-3'-phosphate attached to N-[tris(N-acetylgalactosamine-alkyl)-amidodecanoyl)]-4-hydr oxyprolinol Hyp-(N-acetylgalactosamine-alkyl)3
tggatgatgtgcgtaacagat

SEQ ID NO: 2495 - RNA, 23 nt, synthetic construct
  misc_feature 1..23: note = Description of Artificial Sequence: Synthetic oligonucleotide
  source 1..23: mol_type = other RNA
  modified_base 1: mod_base = OTHER; note = 2'-O-methyladenosine-3'- phosphorothioate
  modified_base 2: mod_base = OTHER; note = 2'-fluorouridine -3'-phosphorothioate
  modified_base 3: mod_base = OTHER; note = 2'-O-methylcytidine-3'-phosphate
  modified_base 4: mod_base = OTHER; note = 2'-O-methyluridine-3'-phosphate
  modified_base 5: mod_base = OTHER; note = 2'-O-methylguanosine-3'-phosphate
  modified_base 6: mod_base = OTHER; note = 2'-fluorouridine-3'-phosphate
  modified_base 7: mod_base = OTHER; note = 2'-O-methyluridine-3'-phosphate
  modified_base 8: mod_base = OTHER; note = 2'-fluoroadenosine-3'-phosphate
  modified_base 9: mod_base = OTHER; note = 2'-fluorocytidine-3'-phosphate
  modified_base 10: mod_base = OTHER; note = 2'-O-methylguanosine-3'-phosphate
  modified_base 11: mod_base = OTHER; note = 2'-O-methylcytidine-3'-phosphate
  modified_base 12: mod_base = OTHER; note = 2'-O-methyladenosine-3'-phosphate
  modified_base 13: mod_base = OTHER; note = 2'-O-methylcytidine-3'-phosphate
  modified_base 14: mod_base = OTHER; note = 2'-fluoroadenosine-3'-phosphate
  modified_base 15: mod_base = OTHER; note = 2'-O-methyluridine-3'-phosphate
  modified_base 16: mod_base = OTHER; note = 2'-fluorocytidine-3'-phosphate
  modified_base 17: mod_base = OTHER; note = 2'-O-methyladenosine-3'-phosphate
  modified_base 18: mod_base = OTHER; note = 2'-O-methyluridine-3'-phosphate
  modified_base 19: mod_base = OTHER; note = 2'-O-methylcytidine-3'-phosphate
  modified_base 20: mod_base = OTHER; note = 2'-O-methylcytidine-3'-phosphate
  modified_base 21: mod_base = OTHER; note = 2'-O-methyladenosine-3'- phosphorothioate
  modified_base 22: mod_base = OTHER; note = 2'-O-methylguanosine-3'- phosphorothioate
  modified_base 23: mod_base = OTHER; note = 2'-O-methyladenosine-3'-phosphate
atctgttacgcacatcatccaga

SEQ ID NO: 2496 - RNA, 21 nt, synthetic construct
  misc_feature 1..21: note = Description of Artificial Sequence: Synthetic oligonucleotide
  source 1..21: mol_type = other RNA
  modified_base 1: mod_base = OTHER; note = 2'-O-methylcytidine-3'- phosphorothioate
  modified_base 2: mod_base = OTHER; note = 2'-O-methyluridine-3'-phosphorothioate
  modified_base 3: mod_base = OTHER; note = 2'-O-methylguanosine-3'-phosphate
  modified_base 4: mod_base = OTHER; note = 2'-O-methylguanosine-3'-phosphate
  modified_base 5: mod_base = OTHER; note = 2'-O-methyladenosine-3'-phosphate
  modified_base 6: mod_base = OTHER; note = 2'-O-methyluridine-3'-phosphate
  modified_base 7: mod_base = OTHER; note = 2'-fluoroguanosine-3'-phosphate
  modified_base 8: mod_base = OTHER; note = 2'-O-methyladenosine-3'-phosphate
  modified_base 9: mod_base = OTHER; note = 2'-fluorouridine-3'-phosphate
  modified_base 10: mod_base = OTHER; note = 2'-fluoroguanosine-3'-phosphate
  modified_base 11: mod_base = OTHER; note = 2'-fluorouridine-3'-phosphate
  modified_base 12: mod_base = OTHER; note = 2'-O-methylguanosine-3'-phosphate
  modified_base 13: mod_base = OTHER; note = 2'-O-methylcytidine-3'-phosphate
  modified_base 14: mod_base = OTHER; note = 2'-O-methylguanosine-3'-phosphate
  modified_base 15: mod_base = OTHER; note = 2'-O-methyluridine-3'-phosphate
  modified_base 16: mod_base = OTHER; note = 2'-O-methyladenosine-3'-phosphate
  modified_base 17: mod_base = OTHER; note = 2'-O-methyladenosine-3'-phosphate
  modified_base 18: mod_base = OTHER; note = 2'-O-methylcytidine-3'-phosphate
  modified_base 19: mod_base = OTHER; note = 2'-O-methyladenosine-3'-phosphate
  modified_base 20: mod_base = OTHER; note = 2'-O-methylguanosine-3'-phosphate
  modified_base 21: mod_base = OTHER; note = 2'-O-methyladenosine-3'-phosphate attached to N-[tris(N-acetylgalactosamine-alkyl)-amidodecanoyl)]-4-hydr oxyprolinol Hyp-(N-acetylgalactosamine-alkyl)3
ctggatgatgtgcgtaacaga

SEQ ID NO: 2497 - RNA, 23 nt, synthetic construct
  misc_feature 1..23: note = Description of Artificial Sequence: Synthetic oligonucleotide
  source 1..23: mol_type = other RNA
  modified_base 1: mod_base = OTHER; note = 2'-O-methyluridine-3'-phosphorothioate
  modified_base 2: mod_base = OTHER; note = 2'-fluorocytidine-3'-phosphorothioate
  modified_base 3: mod_base = OTHER; note = 2'-O-methyluridine-3'-phosphate
  modified_base 4: mod_base = OTHER; note = 2'-O-methylguanosine-3'-phosphate
  modified_base 5: mod_base = OTHER; note = 2'-O-methyluridine-3'-phosphate
  modified_base 6: mod_base = OTHER; note = 2'-fluorouridine-3'-phosphate
  modified_base 7: mod_base = OTHER; note = 2'-O-methyladenosine-3'-phosphate
  modified_base 8: mod_base = OTHER; note = 2'-fluorocytidine-3'-phosphate
  modified_base 9: mod_base = OTHER; note = 2'-fluoroguanosine-3'-phosphate
  modified_base 10: mod_base = OTHER; note = 2'-O-methylcytidine-3'-phosphate
  modified_base 11: mod_base = OTHER; note = 2'-O-methyladenosine-3'-phosphate
  modified_base 12: mod_base = OTHER; note = 2'-O-methylcytidine-3'-phosphate
  modified_base 13: mod_base = OTHER; note = 2'-O-methyladenosine-3'-phosphate
  modified_base 14: mod_base = OTHER; note = 2'-fluorouridine-3'-phosphate
  modified_base 15: mod_base = OTHER; note = 2'-O-methylcytidine-3'-phosphate
  modified_base 16: mod_base = OTHER; note = 2'-fluoroadenosine-3'-phosphate
  modified_base 17: mod_base = OTHER; note = 2'-O-methyluridine-3'-phosphate
  modified_base 18: mod_base = OTHER; note = 2'-O-methylcytidine-3'-phosphate
  modified_base 19: mod_base = OTHER; note = 2'-O-methylcytidine-3'-phosphate
  modified_base 20: mod_base = OTHER; note = 2'-O-methyladenosine-3'-phosphate
  modified_base 21: mod_base = OTHER; note = 2'-O-methylguanosine-3'- phosphorothioate
  modified_base 22: mod_base = OTHER; note = 2'-O-methyladenosine-3'- phosphorothioate
  modified_base 23: mod_base = OTHER; note = 2'-O-methylcytidine-3'-phosphate
tctgttacgcacatcatccagac

SEQ ID NO: 2498 - RNA, 21 nt, synthetic construct
  misc_feature 1..21: note = Description of Artificial Sequence: Synthetic oligonucleotide
  source 1..21: mol_type = other RNA
  modified_base 1: mod_base = OTHER; note = 2'-O-methylguanosine-3'- phosphorothioate
  modified_base 2: mod_base = OTHER; note = 2'-O-methyladenosine-3'- phosphorothioate
  modified_base 3: mod_base = OTHER; note = 2'-O-methyladenosine-3'-phosphate
  modified_base 4: mod_base = OTHER; note = 2'-O-methyluridine-3'-phosphate
  modified_base 5: mod_base = OTHER; note = 2'-O-methylguanosine-3'-phosphate
  modified_base 6: mod_base = OTHER; note = 2'-O-methylguanosine-3'-phosphate
  modified_base 7: mod_base = OTHER; note = 2'-fluoroguanosine-3'-phosphate
  modified_base 8: mod_base = OTHER; note = 2'-O-methyluridine-3'-phosphate
  modified_base 9: mod_base = OTHER; note = 2'-fluoroguanosine-3'-phosphate
  modified_base 10: mod_base = OTHER; note = 2'-fluoroguanosine-3'-phosphate
  modified_base 11: mod_base = OTHER; note = 2'-fluorocytidine-3'-phosphate
  modified_base 12: mod_base = OTHER; note = 2'-O-methylguanosine-3'-phosphate
  modified_base 13: mod_base = OTHER; note = 2'-O-methylguanosine-3'-phosphate
  modified_base 14: mod_base = OTHER; note = 2'-O-methyluridine-3'-phosphate
  modified_base 15: mod_base = OTHER; note = 2'-O-methyladenosine-3'-phosphate
  modified_base 16: mod_base = OTHER; note = 2'-O-methyladenosine-3'-phosphate
  modified_base 17: mod_base = OTHER; note = 2'-O-methyluridine-3'-phosphate
  modified_base 18: mod_base = OTHER; note = 2'-O-methyluridine-3'-phosphate
  modified_base 19: mod_base = OTHER; note = 2'-O-methylguanosine-3'-phosphate
  modified_base 20: mod_base = OTHER; note = 2'-O-methylguanosine-3'-phosphate
  modified_base 21: mod_base = OTHER; note = 2'-O-methyluridine-3'-phosphate attached to N-[tris(N-acetylgalactosamine-alkyl)-amidodecanoyl)]-4-hydr oxyprolinol Hyp-(N-acetylgalactosamine-alkyl)3
gaatgggtggcggtaattggt

SEQ ID NO: 2499 - RNA, 23 nt, synthetic construct
  misc_feature 1..23: note = Description of Artificial Sequence: Synthetic oligonucleotide
  source 1..23: mol_type = other RNA
  modified_base 1: mod_base = OTHER; note = 2'-O-methyladenosine-3'- phosphorothioate
  modified_base 2: mod_base = OTHER; note = 2'-fluorocytidine-3'-phosphorothioate
  modified_base 3: mod_base = OTHER; note = 2'-O-methylcytidine-3'-phosphate
  modified_base 4: mod_base = OTHER; note = 2'-O-methyladenosine-3'-phosphate
  modified_base 5: mod_base = OTHER; note = 2'-O-methyladenosine-3'-phosphate
  modified_base 6: mod_base = OTHER; note = 2'-fluorouridine-3'-phosphate
  modified_base 7: mod_base = OTHER; note = 2'-O-methyluridine-3'-phosphate
  modified_base 8: mod_base = OTHER; note = 2'-fluoroadenosine-3'-phosphate
  modified_base 9: mod_base = OTHER; note = 2'-fluorocytidine-3'-phosphate
  modified_base 10: mod_base = OTHER; note = 2'-O-methylcytidine-3'-phosphate
  modified_base 11: mod_base = OTHER; note = 2'-O-methylguanosine-3'-phosphate
  modified_base 12: mod_base = OTHER; note = 2'-O-methylcytidine-3'-phosphate
  modified_base 13: mod_base = OTHER; note = 2'-O-methylcytidine-3'-phosphate
  modified_base 14: mod_base = OTHER; note = 2'-fluoroadenosine-3'-phosphate
  modified_base 15: mod_base = OTHER; note = 2'-O-methylcytidine-3'-phosphate
  modified_base 16: mod_base = OTHER; note = 2'-fluorocytidine-3'-phosphate
  modified_base 17: mod_base = OTHER; note = 2'-O-methylcytidine-3'-phosphate
  modified_base 18: mod_base = OTHER; note = 2'-O-methyladenosine-3'-phosphate
  modified_base 19: mod_base = OTHER; note = 2'-O-methyluridine-3'-phosphate
  modified_base 20: mod_base = OTHER; note = 2'-O-methyluridine-3'-phosphate
  modified_base 21: mod_base = OTHER; note = 2'-O-methylcytidine-3'- phosphorothioate
  modified_base 22: mod_base = OTHER; note = 2'-O-methylcytidine-3'- phosphorothioate
  modified_base 23: mod_base = OTHER; note = 2'-O-methyladenosine-3'-phosphate
accaattaccgccacccattcca

SEQ ID NO: 2500 - RNA, 21 nt, synthetic construct
  misc_feature 1..21: note = Description of Artificial Sequence: Synthetic oligonucleotide
  source 1..21: mol_type = other RNA
  modified_base 1: mod_base = OTHER; note = 2'-O-methyladenosine-3'- phosphorothioate
  modified_base 2: mod_base = OTHER; note = 2'-O-methyladenosine-3'- phosphorothioate
  modified_base 3: mod_base = OTHER; note = 2'-O-methyluridine-3'-phosphate
  modified_base 4: mod_base = OTHER; note = 2'-O-methylguanosine-3'-phosphate
  modified_base 5: mod_base = OTHER; note = 2'-O-methylguanosine-3'-phosphate
  modified_base 6: mod_base = OTHER; note = 2'-O-methylguanosine-3'-phosphate
  modified_base 7: mod_base = OTHER; note = 2'-fluorouridine-3'-phosphate
  modified_base 8: mod_base = OTHER; note = 2'-O-methylguanosine-3'-phosphate
  modified_base 9: mod_base = OTHER; note = 2'-fluoroguanosine-3'-phosphate
  modified_base 10: mod_base = OTHER; note = 2'-fluorocytidine-3'-phosphate
  modified_base 11: mod_base = OTHER; note = 2'-fluoroguanosine-3'-phosphate
  modified_base 12: mod_base = OTHER; note = 2'-O-methylguanosine-3'-phosphate
  modified_base 13: mod_base = OTHER; note = 2'-O-methyluridine-3'-phosphate
  modified_base 14: mod_base = OTHER; note = 2'-O-methyladenosine-3'-phosphate
  modified_base 15: mod_base = OTHER; note = 2'-O-methyladenosine-3'-phosphate
  modified_base 16: mod_base = OTHER; note = 2'-O-methyluridine-3'-phosphate
  modified_base 17: mod_base = OTHER; note = 2'-O-methyluridine-3'-phosphate
  modified_base 18: mod_base = OTHER; note = 2'-O-methylguanosine-3'-phosphate
  modified_base 19: mod_base = OTHER; note = 2'-O-methylguanosine-3'-phosphate
  modified_base 20: mod_base = OTHER; note = 2'-O-methyluridine-3'-phosphate
  modified_base 21: mod_base = OTHER; note = 2'-O-methylguanosine-3'-phosphate attached to N-[tris(N-acetylgalactosamine-alkyl)-amidodecanoyl)]-4-hydr oxyprolinol Hyp-(N-acetylgalactosamine-alkyl)3
aatgggtggcggtaattggtg

SEQ ID NO: 2501 - RNA, 23 nt, synthetic construct
  misc_feature 1..23: note = Description of Artificial Sequence: Synthetic oligonucleotide
  source 1..23: mol_type = other RNA
  modified_base 1: mod_base = OTHER; note = 2'-O-methylcytidine-3'- phosphorothioate
  modified_base 2: mod_base = OTHER; note = 2'-fluoroadenosine-3'-phosphorothioate
  modified_base 3: mod_base = OTHER; note = 2'-O-methylcytidine-3'-phosphate
  modified_base 4: mod_base = OTHER; note = 2'-O-methylcytidine-3'-phosphate
  modified_base 5: mod_base = OTHER; note = 2'-O-methyladenosine-3'-phosphate
  modified_base 6: mod_base = OTHER; note = 2'-fluoroadenosine-3'-phosphate
  modified_base 7: mod_base = OTHER; note = 2'-O-methyluridine-3'-phosphate
  modified_base 8: mod_base = OTHER; note = 2'-fluorouridine-3'-phosphate
  modified_base 9: mod_base = OTHER; note = 2'-fluoroadenosine-3'-phosphate
  modified_base 10: mod_base = OTHER; note = 2'-O-methylcytidine-3'-phosphate
  modified_base 11: mod_base = OTHER; note = 2'-O-methylcytidine-3'-phosphate
  modified_base 12: mod_base = OTHER; note = 2'-O-methylguanosine-3'-phosphate
  modified_base 13: mod_base = OTHER; note = 2'-O-methylcytidine-3'-phosphate
  modified_base 14: mod_base = OTHER; note = 2'-fluorocytidine-3'-phosphate
  modified_base 15: mod_base = OTHER; note = 2'-O-methyladenosine-3'-phosphate
  modified_base 16: mod_base = OTHER; note = 2'-fluorocytidine-3'-phosphate
  modified_base 17: mod_base = OTHER; note = 2'-O-methylcytidine-3'-phosphate
  modified_base 18: mod_base = OTHER; note = 2'-O-methylcytidine-3'-phosphate
  modified_base 19: mod_base = OTHER; note = 2'-O-methyladenosine-3'-phosphate
  modified_base 20: mod_base = OTHER; note = 2'-O-methyluridine-3'-phosphate
  modified_base 21: mod_base = OTHER; note = 2'-O-methyluridine-3'-phosphorothioate
  modified_base 22: mod_base = OTHER; note = 2'-O-methylcytidine-3'- phosphorothioate
  modified_base 23: mod_base = OTHER; note = 2'-O-methylcytidine-3'-phosphate
caccaattaccgccacccattcc

SEQ ID NO: 2502 - RNA, 21 nt, synthetic construct
  misc_feature 1..21: note = Description of Artificial Sequence: Synthetic oligonucleotide
  source 1..21: mol_type = other RNA
  modified_base 1: mod_base = OTHER; note = 2'-O-methyladenosine-3'- phosphorothioate
  modified_base 2: mod_base = OTHER; note = 2'-O-methyluridine-3'-phosphorothioate
  modified_base 3: mod_base = OTHER; note = 2'-O-methyluridine-3'-phosphate
  modified_base 4: mod_base = OTHER; note = 2'-O-methylguanosine-3'-phosphate
  modified_base 5: mod_base = OTHER; note = 2'-O-methylguanosine-3'-phosphate
  modified_base 6: mod_base = OTHER; note = 2'-O-methyladenosine-3'-phosphate
  modified_base 7: mod_base = OTHER; note = 2'-fluoroadenosine-3'-phosphate
  modified_base 8: mod_base = OTHER; note = 2'-O-methyluridine-3'-phosphate
  modified_base 9: mod_base = OTHER; note = 2'-fluoroguanosine-3'-phosphate
  modified_base 10: mod_base = OTHER; note = 2'-fluoroguanosine-3'-phosphate
  modified_base 11: mod_base = OTHER; note = 2'-fluoroguanosine-3'-phosphate
  modified_base 12: mod_base = OTHER; note = 2'-O-methyluridine-3'-phosphate
  modified_base 13: mod_base = OTHER; note = 2'-O-methylguanosine-3'-phosphate
  modified_base 14: mod_base = OTHER; note = 2'-O-methylguanosine-3'-phosphate
  modified_base 15: mod_base = OTHER; note = 2'-O-methylcytidine-3'-phosphate
  modified_base 16: mod_base = OTHER; note = 2'-O-methylguanosine-3'-phosphate
  modified_base 17: mod_base = OTHER; note = 2'-O-methylguanosine-3'-phosphate
  modified_base 18: mod_base = OTHER; note = 2'-O-methyluridine-3'-phosphate
  modified_base 19: mod_base = OTHER; note = 2'-O-methyladenosine-3'-phosphate
  modified_base 20: mod_base = OTHER; note = 2'-O-methyladenosine-3'-phosphate
  modified_base 21: mod_base = OTHER; note = 2'-O-methyluridine-3'-phosphate attached to N-[tris(N-acetylgalactosamine-alkyl)-amidodecanoyl)]-4-hydr oxyprolinol Hyp-(N-acetylgalactosamine-alkyl)3
attggaatgggtggcggtaat

SEQ ID NO: 2503 - RNA, 23 nt, synthetic construct
  misc_feature 1..23: note = Description of Artificial Sequence: Synthetic oligonucleotide
  source 1..23: mol_type = other RNA
  modified_base 1: mod_base = OTHER; note = 2'-O-methyladenosine-3'- phosphorothioate
  modified_base 2: mod_base = OTHER; note = 2'-fluorouridine -3'-phosphorothioate
  modified_base 3: mod_base = OTHER; note = 2'-O-methyluridine-3'-phosphate
  modified_base 4: mod_base = OTHER; note = 2'-O-methyladenosine-3'-phosphate
  modified_base 5: mod_base = OTHER; note = 2'-O-methylcytidine-3'-phosphate
  modified_base 6: mod_base = OTHER; note = 2'-fluorocytidine-3'-phosphate
  modified_base 7: mod_base = OTHER; note = 2'-O-methylguanosine-3'-phosphate
  modified_base 8: mod_base = OTHER; note = 2'-fluorocytidine-3'-phosphate
  modified_base 9: mod_base = OTHER; note = 2'-fluorocytidine-3'-phosphate
  modified_base 10: mod_base = OTHER; note = 2'-O-methyladenosine-3'-phosphate
  modified_base 11: mod_base = OTHER; note = 2'-O-methylcytidine-3'-phosphate
  modified_base 12: mod_base = OTHER; note = 2'-O-methylcytidine-3'-phosphate
  modified_base 13: mod_base = OTHER; note = 2'-O-methylcytidine-3'-phosphate
  modified_base 14: mod_base = OTHER; note = 2'-fluoroadenosine-3'-phosphate
  modified_base 15: mod_base = OTHER; note = 2'-O-methyluridine-3'-phosphate
  modified_base 16: mod_base = OTHER; note = 2'-fluorouridine-3'-phosphate
  modified_base 17: mod_base = OTHER; note = 2'-O-methylcytidine-3'-phosphate
  modified_base 18: mod_base = OTHER; note = 2'-O-methylcytidine-3'-phosphate
  modified_base 19: mod_base = OTHER; note = 2'-O-methyladenosine-3'-phosphate
  modified_base 20: mod_base = OTHER; note = 2'-O-methyladenosine-3'-phosphate
  modified_base 21: mod_base = OTHER; note = 2'-O-methyluridine-3'-phosphorothioate
  modified_base 22: mod_base = OTHER; note = 2'-O-methyluridine-3'-phosphorothioate
  modified_base 23: mod_base = OTHER; note = 2'-O-methylcytidine-3'-phosphate
attaccgccacccattccaattc

SEQ ID NO: 2504 - RNA, 21 nt, synthetic construct
  misc_feature 1..21: note = Description of Artificial Sequence: Synthetic oligonucleotide
  source 1..21: mol_type = other RNA
  modified_base 1: mod_base = OTHER; note = 2'-O-methyladenosine-3'- phosphorothioate
  modified_base 2: mod_base = OTHER; note = 2'-O-methyladenosine-3'- phosphorothioate
  modified_base 3: mod_base = OTHER; note = 2'-O-methyluridine-3'-phosphate
  modified_base 4: mod_base = OTHER; note = 2'-O-methyluridine-3'-phosphate
  modified_base 5: mod_base = OTHER; note = 2'-O-methylguanosine-3'-phosphate
  modified_base 6: mod_base = OTHER; note = 2'-O-methylguanosine-3'-phosphate
  modified_base 7: mod_base = OTHER; note = 2'-fluoroadenosine-3'-phosphate
  modified_base 8: mod_base = OTHER; note = 2'-O-methyladenosine-3'-phosphate
  modified_base 9: mod_base = OTHER; note = 2'-fluorouridine-3'-phosphate
  modified_base 10: mod_base = OTHER; note = 2'-fluoroguanosine-3'-phosphate
  modified_base 11: mod_base = OTHER; note = 2'-fluoroguanosine-3'-phosphate
  modified_base 12: mod_base = OTHER; note = 2'-O-methylguanosine-3'-phosphate
  modified_base 13: mod_base = OTHER; note = 2'-O-methyluridine-3'-phosphate
  modified_base 14: mod_base = OTHER; note = 2'-O-methylguanosine-3'-phosphate
  modified_base 15: mod_base = OTHER; note = 2'-O-methylguanosine-3'-phosphate
  modified_base 16: mod_base = OTHER; note = 2'-O-methylcytidine-3'-phosphate
  modified_base 17: mod_base = OTHER; note = 2'-O-methylguanosine-3'-phosphate
  modified_base 18: mod_base = OTHER; note = 2'-O-methylguanosine-3'-phosphate
  modified_base 19: mod_base = OTHER; note = 2'-O-methyluridine-3'-phosphate
  modified_base 20: mod_base = OTHER; note = 2'-O-methyladenosine-3'-phosphate
  modified_base 21: mod_base = OTHER; note = 2'-O-methyladenosine-3'-phosphate attached to N-[tris(N-acetylgalactosamine-alkyl)-amidodecanoyl)]-4-hydr oxyprolinol Hyp-(N-acetylgalactosamine-alkyl)3
aattggaatgggtggcggtaa

SEQ ID NO: 2505 - RNA, 23 nt, synthetic construct
  misc_feature 1..23: note = Description of Artificial Sequence: Synthetic oligonucleotide
  source 1..23: mol_type = other RNA
  modified_base 1: mod_base = OTHER; note = 2'-O-methyluridine-3'-phosphorothioate
  modified_base 2: mod_base = OTHER; note = 2'-fluorouridine -3'-phosphorothioate
  modified_base 3: mod_base = OTHER; note = 2'-O-methyladenosine-3'-phosphate
  modified_base 4: mod_base = OTHER; note = 2'-O-methylcytidine-3'-phosphate
  modified_base 5: mod_base = OTHER; note = 2'-O-methylcytidine-3'-phosphate
  modified_base 6: mod_base = OTHER; note = 2'-fluoroguanosine-3'-phosphate
  modified_base 7: mod_base = OTHER; note = 2'-O-methylcytidine-3'-phosphate
  modified_base 8: mod_base = OTHER; note = 2'-fluorocytidine-3'-phosphate
  modified_base 9: mod_base = OTHER; note = 2'-fluoroadenosine-3'-phosphate
  modified_base 10: mod_base = OTHER; note = 2'-O-methylcytidine-3'-phosphate
  modified_base 11: mod_base = OTHER; note = 2'-O-methylcytidine-3'-phosphate
  modified_base 12: mod_base = OTHER; note = 2'-O-methylcytidine-3'-phosphate
  modified_base 13: mod_base = OTHER; note = 2'-O-methyladenosine-3'-phosphate
  modified_base 14: mod_base = OTHER; note = 2'-fluorouridine-3'-phosphate
  modified_base 15: mod_base = OTHER; note = 2'-O-methyluridine-3'-phosphate
  modified_base 16: mod_base = OTHER; note = 2'-fluorocytidine-3'-phosphate
  modified_base 17: mod_base = OTHER; note = 2'-O-methylcytidine-3'-phosphate
  modified_base 18: mod_base = OTHER; note = 2'-O-methyladenosine-3'-phosphate
  modified_base 19: mod_base = OTHER; note = 2'-O-methyladenosine-3'-phosphate
  modified_base 20: mod_base = OTHER; note = 2'-O-methyluridine-3'-phosphate
  modified_base 21: mod_base = OTHER; note = 2'-O-methyluridine-3'-phosphorothioate
  modified_base 22: mod_base = OTHER; note = 2'-O-methylcytidine-3'- phosphorothioate
  modified_base 23: mod_base = OTHER; note = 2'-O-methyluridine-3'-phosphate
ttaccgccacccattccaattct

SEQ ID NO: 2506 - RNA, 21 nt, synthetic construct
  misc_feature 1..21: note = Description of Artificial Sequence: Synthetic oligonucleotide
  source 1..21: mol_type = other RNA
  modified_base 1: mod_base = OTHER; note = 2'-O-methyluridine-3'-phosphorothioate
  modified_base 2: mod_base = OTHER; note = 2'-O-methylcytidine-3'- phosphorothioate
  modified_base 3: mod_base = OTHER; note = 2'-O-methylcytidine-3'-phosphate
  modified_base 4: mod_base = OTHER; note = 2'-O-methylguanosine-3'-phosphate
  modified_base 5: mod_base = OTHER; note = 2'-O-methylguanosine-3'-phosphate
  modified_base 6: mod_base = OTHER; note = 2'-O-methyladenosine-3'-phosphate
  modified_base 7: mod_base = OTHER; note = 2'-fluoroadenosine-3'-phosphate
  modified_base 8: mod_base = OTHER; note = 2'-O-methyluridine-3'-phosphate
  modified_base 9: mod_base = OTHER; note = 2'-fluoroguanosine-3'-phosphate
  modified_base 10: mod_base = OTHER; note = 2'-fluorouridine-3'-phosphate
  modified_base 11: mod_base = OTHER; note = 2'-fluorouridine-3'-phosphate
  modified_base 12: mod_base = OTHER; note = 2'-O-methylguanosine-3'-phosphate
  modified_base 13: mod_base = OTHER; note = 2'-O-methylcytidine-3'-phosphate
  modified_base 14: mod_base = OTHER; note = 2'-O-methyluridine-3'-phosphate
  modified_base 15: mod_base = OTHER; note = 2'-O-methylguanosine-3'-phosphate
  modified_base 16: mod_base = OTHER; note = 2'-O-methyladenosine-3'-phosphate
  modified_base 17: mod_base = OTHER; note = 2'-O-methyladenosine-3'-phosphate
  modified_base 18: mod_base = OTHER; note = 2'-O-methyladenosine-3'-phosphate
  modified_base 19: mod_base = OTHER; note = 2'-O-methylcytidine-3'-phosphate
  modified_base 20: mod_base = OTHER; note = 2'-O-methyladenosine-3'-phosphate
  modified_base 21: mod_base = OTHER; note = 2'-O-methylguanosine-3'-phosphate attached to N-[tris(N-acetylgalactosamine-alkyl)-amidodecanoyl)]-4-hydr oxyprolinol Hyp-(N-acetylgalactosamine-alkyl)3
tccggaatgttgctgaaacag

SEQ ID NO: 2507 - RNA, 23 nt, synthetic construct
  misc_feature 1..23: note = Description of Artificial Sequence: Synthetic oligonucleotide
  source 1..23: mol_type = other RNA
  modified_base 1: mod_base = OTHER; note = 2'-O-methylcytidine-3'- phosphorothioate
  modified_base 2: mod_base = OTHER; note = 2'-fluorouridine -3'-phosphorothioate
  modified_base 3: mod_base = OTHER; note = 2'-O-methylguanosine-3'-phosphate
  modified_base 4: mod_base = OTHER; note = 2'-O-methyluridine-3'-phosphate
  modified_base 5: mod_base = OTHER; note = 2'-O-methyluridine-3'-phosphate
  modified_base 6: mod_base = OTHER; note = 2'-fluorouridine-3'-phosphate
  modified_base 7: mod_base = OTHER; note = 2'-O-methylcytidine-3'-phosphate
  modified_base 8: mod_base = OTHER; note = 2'-fluoroadenosine-3'-phosphate
  modified_base 9: mod_base = OTHER; note = 2'-fluoroguanosine-3'-phosphate
  modified_base 10: mod_base = OTHER; note = 2'-O-methylcytidine-3'-phosphate
  modified_base 11: mod_base = OTHER; note = 2'-O-methyladenosine-3'-phosphate
  modified_base 12: mod_base = OTHER; note = 2'-O-methyladenosine-3'-phosphate
  modified_base 13: mod_base = OTHER; note = 2'-O-methylcytidine-3'-phosphate
  modified_base 14: mod_base = OTHER; note = 2'-fluoroadenosine-3'-phosphate
  modified_base 15: mod_base = OTHER; note = 2'-O-methyluridine-3'-phosphate
  modified_base 16: mod_base = OTHER; note = 2'-fluorouridine-3'-phosphate
  modified_base 17: mod_base = OTHER; note = 2'-O-methylcytidine-3'-phosphate
  modified_base 18: mod_base = OTHER; note = 2'-O-methylcytidine-3'-phosphate
  modified_base 19: mod_base = OTHER; note = 2'-O-methylguanosine-3'-phosphate
  modified_base 20: mod_base = OTHER; note = 2'-O-methylguanosine-3'-phosphate
  modified_base 21: mod_base = OTHER; note = 2'-O-methyladenosine-3'- phosphorothioate
  modified_base 22: mod_base = OTHER; note = 2'-O-methylguanosine-3'- phosphorothioate
  modified_base 23: mod_base = OTHER; note = 2'-O-methylcytidine-3'-phosphate
ctgtttcagcaacattccggagc

SEQ ID NO: 2508 - RNA, 21 nt, synthetic construct
  misc_feature 1..21: note = Description of Artificial Sequence: Synthetic oligonucleotide
  source 1..21: mol_type = other RNA
  modified_base 1: mod_base = OTHER; note = 2'-O-methylcytidine-3'- phosphorothioate
  modified_base 2: mod_base = OTHER; note = 2'-O-methylcytidine-3'- phosphorothioate
  modified_base 3: mod_base = OTHER; note = 2'-O-methylguanosine-3'-phosphate
  modified_base 4: mod_base = OTHER; note = 2'-O-methylguanosine-3'-phosphate
  modified_base 5: mod_base = OTHER; note = 2'-O-methyladenosine-3'-phosphate
  modified_base 6: mod_base = OTHER; note = 2'-O-methyladenosine-3'-phosphate
  modified_base 7: mod_base = OTHER; note = 2'-fluorouridine-3'-phosphate
  modified_base 8: mod_base = OTHER; note = 2'-O-methylguanosine-3'-phosphate
  modified_base 9: mod_base = OTHER; note = 2'-fluorouridine-3'-phosphate
  modified_base 10: mod_base = OTHER; note = 2'-fluorouridine-3'-phosphate
  modified_base 11: mod_base = OTHER; note = 2'-fluoroguanosine-3'-phosphate
  modified_base 12: mod_base = OTHER; note = 2'-O-methylcytidine-3'-phosphate
  modified_base 13: mod_base = OTHER; note = 2'-O-methyluridine-3'-phosphate
  modified_base 14: mod_base = OTHER; note = 2'-O-methylguanosine-3'-phosphate
  modified_base 15: mod_base = OTHER; note = 2'-O-methyladenosine-3'-phosphate
  modified_base 16: mod_base = OTHER; note = 2'-O-methyladenosine-3'-phosphate
  modified_base 17: mod_base = OTHER; note = 2'-O-methyladenosine-3'-phosphate
  modified_base 18: mod_base = OTHER; note = 2'-O-methylcytidine-3'-phosphate
  modified_base 19: mod_base = OTHER; note = 2'-O-methyladenosine-3'-phosphate
  modified_base 20: mod_base = OTHER; note = 2'-O-methylguanosine-3'-phosphate
  modified_base 21: mod_base = OTHER; note = 2'-O-methyladenosine-3'-phosphate attached to N-[tris(N-acetylgalactosamine-alkyl)-amidodecanoyl)]-4-hydr oxyprolinol Hyp-(N-acetylgalactosamine-alkyl)3
ccggaatgttgctgaaacaga

SEQ ID NO: 2509 - RNA, 23 nt, synthetic construct
  misc_feature 1..23: note = Description of Artificial Sequence: Synthetic oligonucleotide
  source 1..23: mol_type = other RNA
  modified_base 1: mod_base = OTHER; note = 2'-O-methyluridine-3'-phosphorothioate
  modified_base 2: mod_base = OTHER; note = 2'-fluorocytidine-3'-phosphorothioate
  modified_base 3: mod_base = OTHER; note = 2'-O-methyluridine-3'-phosphate
  modified_base 4: mod_base = OTHER; note = 2'-O-methylguanosine-3'-phosphate
  modified_base 5: mod_base = OTHER; note = 2'-O-methyluridine-3'-phosphate
  modified_base 6: mod_base = OTHER; note = 2'-fluorouridine-3'-phosphate
  modified_base 7: mod_base = OTHER; note = 2'-O-methyluridine-3'-phosphate
  modified_base 8: mod_base = OTHER; note = 2'-fluorocytidine-3'-phosphate
  modified_base 9: mod_base = OTHER; note = 2'-fluoroadenosine-3'-phosphate
  modified_base 10: mod_base = OTHER; note = 2'-O-methylguanosine-3'-phosphate
  modified_base 11: mod_base = OTHER; note = 2'-O-methylcytidine-3'-phosphate
  modified_base 12: mod_base = OTHER; note = 2'-O-methyladenosine-3'-phosphate
  modified_base 13: mod_base = OTHER; note = 2'-O-methyladenosine-3'-phosphate
  modified_base 14: mod_base = OTHER; note = 2'-fluorocytidine-3'-phosphate
  modified_base 15: mod_base = OTHER; note = 2'-O-methyladenosine-3'-phosphate
  modified_base 16: mod_base = OTHER; note = 2'-fluorouridine-3'-phosphate
  modified_base 17: mod_base = OTHER; note = 2'-O-methyluridine-3'-phosphate
  modified_base 18: mod_base = OTHER; note = 2'-O-methylcytidine-3'-phosphate
  modified_base 19: mod_base = OTHER; note = 2'-O-methylcytidine-3'-phosphate
  modified_base 20: mod_base = OTHER; note = 2'-O-methylguanosine-3'-phosphate
  modified_base 21: mod_base = OTHER; note = 2'-O-methylguanosine-3'- phosphorothioate
  modified_base 22: mod_base = OTHER; note = 2'-O-methyladenosine-3'- phosphorothioate
  modified_base 23: mod_base = OTHER; note = 2'-O-methylguanosine-3'-phosphate
tctgtttcagcaacattccggag

SEQ ID NO: 2510 - RNA, 21 nt, synthetic construct
  misc_feature 1..21: note = Description of Artificial Sequence: Synthetic oligonucleotide
  source 1..21: mol_type = other RNA
  modified_base 1: mod_base = OTHER; note = 2'-O-methyladenosine-3'- phosphorothioate
  modified_base 2: mod_base = OTHER; note = 2'-O-methyluridine-3'-phosphorothioate
  modified_base 3: mod_base = OTHER; note = 2'-O-methylguanosine-3'-phosphate
  modified_base 4: mod_base = OTHER; note = 2'-O-methylcytidine-3'-phosphate
  modified_base 5: mod_base = OTHER; note = 2'-O-methyluridine-3'-phosphate
  modified_base 6: mod_base = OTHER; note = 2'-O-methylcytidine-3'-phosphate
  modified_base 7: mod_base = OTHER; note = 2'-fluorocytidine-3'-phosphate
  modified_base 8: mod_base = OTHER; note = 2'-O-methylguanosine-3'-phosphate
  modified_base 9: mod_base = OTHER; note = 2'-fluoroguanosine-3'-phosphate
  modified_base 10: mod_base = OTHER; note = 2'-fluoroadenosine-3'-phosphate
  modified_base 11: mod_base = OTHER; note = 2'-fluoroadenosine-3'-phosphate
  modified_base 12: mod_base = OTHER; note = 2'-O-methyluridine-3'-phosphate
  modified_base 13: mod_base = OTHER; note = 2'-O-methylguanosine-3'-phosphate
  modified_base 14: mod_base = OTHER; note = 2'-O-methyluridine-3'-phosphate
  modified_base 15: mod_base = OTHER; note = 2'-O-methyluridine-3'-phosphate
  modified_base 16: mod_base = OTHER; note = 2'-O-methylguanosine-3'-phosphate
  modified_base 17: mod_base = OTHER; note = 2'-O-methylcytidine-3'-phosphate
  modified_base 18: mod_base = OTHER; note = 2'-O-methyluridine-3'-phosphate
  modified_base 19: mod_base = OTHER; note = 2'-O-methylguanosine-3'-phosphate
  modified_base 20: mod_base = OTHER; note = 2'-O-methyladenosine-3'-phosphate
  modified_base 21: mod_base = OTHER; note = 2'-O-methyladenosine-3'-phosphate attached to N-[tris(N-acetylgalactosamine-alkyl)-amidodecanoyl)]-4-hydr oxyprolinol Hyp-(N-acetylgalactosamine-alkyl)3
atgctccggaatgttgctgaa

SEQ ID NO: 2511 - RNA, 23 nt, synthetic construct
  misc_feature 1..23: note = Description of Artificial Sequence: Synthetic oligonucleotide
  source 1..23: mol_type = other RNA
  modified_base 1: mod_base = OTHER; note = 2'-O-methyluridine-3'-phosphorothioate
  modified_base 2: mod_base = OTHER; note = 2'-fluorouridine -3'-phosphorothioate
  modified_base 3: mod_base = OTHER; note = 2'-O-methylcytidine-3'-phosphate
  modified_base 4: mod_base = OTHER; note = 2'-O-methyladenosine-3'-phosphate
  modified_base 5: mod_base = OTHER; note = 2'-O-methylguanosine-3'-phosphate
  modified_base 6: mod_base = OTHER; note = 2'-fluorocytidine-3'-phosphate
  modified_base 7: mod_base = OTHER; note = 2'-O-methyladenosine-3'-phosphate
  modified_base 8: mod_base = OTHER; note = 2'-fluoroadenosine-3'-phosphate
  modified_base 9: mod_base = OTHER; note = 2'-fluorocytidine-3'-phosphate
  modified_base 10: mod_base = OTHER; note = 2'-O-methyladenosine-3'-phosphate
  modified_base 11: mod_base = OTHER; note = 2'-O-methyluridine-3'-phosphate
  modified_base 12: mod_base = OTHER; note = 2'-O-methyluridine-3'-phosphate
  modified_base 13: mod_base = OTHER; note = 2'-O-methylcytidine-3'-phosphate
  modified_base 14: mod_base = OTHER; note = 2'-fluorocytidine-3'-phosphate
  modified_base 15: mod_base = OTHER; note = 2'-O-methylguanosine-3'-phosphate
  modified_base 16: mod_base = OTHER; note = 2'-fluoroguanosine-3'-phosphate
  modified_base 17: mod_base = OTHER; note = 2'-O-methyladenosine-3'-phosphate
  modified_base 18: mod_base = OTHER; note = 2'-O-methylguanosine-3'-phosphate
  modified_base 19: mod_base = OTHER; note = 2'-O-methylcytidine-3'-phosphate
  modified_base 20: mod_base = OTHER; note = 2'-O-methyladenosine-3'-phosphate
  modified_base 21: mod_base = OTHER; note = 2'-O-methyluridine-3'-phosphorothioate
  modified_base 22: mod_base = OTHER; note = 2'-O-methylcytidine-3'- phosphorothioate
  modified_base 23: mod_base = OTHER; note = 2'-O-methylcytidine-3'-phosphate
ttcagcaacattccggagcatcc

SEQ ID NO: 2512 - RNA, 21 nt, synthetic construct
  misc_feature 1..21: note = Description of Artificial Sequence: Synthetic oligonucleotide
  source 1..21: mol_type = other RNA
  modified_base 1: mod_base = OTHER; note = 2'-O-methylguanosine-3'- phosphorothioate
  modified_base 2: mod_base = OTHER; note = 2'-O-methyladenosine-3'- phosphorothioate
  modified_base 3: mod_base = OTHER; note = 2'-O-methyluridine-3'-phosphate
  modified_base 4: mod_base = OTHER; note = 2'-O-methylguanosine-3'-phosphate
  modified_base 5: mod_base = OTHER; note = 2'-O-methylcytidine-3'-phosphate
  modified_base 6: mod_base = OTHER; note = 2'-O-methyluridine-3'-phosphate
  modified_base 7: mod_base = OTHER; note = 2'-fluorocytidine-3'-phosphate
  modified_base 8: mod_base = OTHER; note = 2'-O-methylcytidine-3'-phosphate
  modified_base 9: mod_base = OTHER; note = 2'-fluoroguanosine-3'-phosphate
  modified_base 10: mod_base = OTHER; note = 2'-fluoroguanosine-3'-phosphate
  modified_base 11: mod_base = OTHER; note = 2'-fluoroadenosine-3'-phosphate
  modified_base 12: mod_base = OTHER; note = 2'-O-methyladenosine-3'-phosphate
  modified_base 13: mod_base = OTHER; note = 2'-O-methyluridine-3'-phosphate
  modified_base 14: mod_base = OTHER; note = 2'-O-methylguanosine-3'-phosphate
  modified_base 15: mod_base = OTHER; note = 2'-O-methyluridine-3'-phosphate
  modified_base 16: mod_base = OTHER; note = 2'-O-methyluridine-3'-phosphate
  modified_base 17: mod_base = OTHER; note = 2'-O-methylguanosine-3'-phosphate
  modified_base 18: mod_base = OTHER; note = 2'-O-methylcytidine-3'-phosphate
  modified_base 19: mod_base = OTHER; note = 2'-O-methyluridine-3'-phosphate
  modified_base 20: mod_base = OTHER; note = 2'-O-methylguanosine-3'-phosphate
  modified_base 21: mod_base = OTHER; note = 2'-O-methyladenosine-3'-phosphate attached to N-[tris(N-acetylgalactosamine-alkyl)-amidodecanoyl)]-4-hydr oxyprolinol Hyp-(N-acetylgalactosamine-alkyl)3
gatgctccggaatgttgctga

SEQ ID NO: 2513 - RNA, 23 nt, synthetic construct
  misc_feature 1..23: note = Description of Artificial Sequence: Synthetic oligonucleotide
  source 1..23: mol_type = other RNA
  modified_base 1: mod_base = OTHER; note = 2'-O-methyluridine-3'-phosphorothioate
  modified_base 2: mod_base = OTHER; note = 2'-fluorocytidine-3'-phosphorothioate
  modified_base 3: mod_base = OTHER; note = 2'-O-methyladenosine-3'-phosphate
  modified_base 4: mod_base = OTHER; note = 2'-O-methylguanosine-3'-phosphate
  modified_base 5: mod_base = OTHER; note = 2'-O-methylcytidine-3'-phosphate
  modified_base 6: mod_base = OTHER; note = 2'-fluoroadenosine-3'-phosphate
  modified_base 7: mod_base = OTHER; note = 2'-O-methyladenosine-3'-phosphate
  modified_base 8: mod_base = OTHER; note = 2'-fluorocytidine-3'-phosphate
  modified_base 9: mod_base = OTHER; note = 2'-fluoroadenosine-3'-phosphate
  modified_base 10: mod_base = OTHER; note = 2'-O-methyluridine-3'-phosphate
  modified_base 11: mod_base = OTHER; note = 2'-O-methyluridine-3'-phosphate
  modified_base 12: mod_base = OTHER; note = 2'-O-methylcytidine-3'-phosphate
  modified_base 13: mod_base = OTHER; note = 2'-O-methylcytidine-3'-phosphate
  modified_base 14: mod_base = OTHER; note = 2'-fluoroguanosine-3'-phosphate
  modified_base 15: mod_base = OTHER; note = 2'-O-methylguanosine-3'-phosphate
  modified_base 16: mod_base = OTHER; note = 2'-fluoroadenosine-3'-phosphate
  modified_base 17: mod_base = OTHER; note = 2'-O-methylguanosine-3'-phosphate
  modified_base 18: mod_base = OTHER; note = 2'-O-methylcytidine-3'-phosphate
  modified_base 19: mod_base = OTHER; note = 2'-O-methyladenosine-3'-phosphate
  modified_base 20: mod_base = OTHER; note = 2'-O-methyluridine-3'-phosphate
  modified_base 21: mod_base = OTHER; note = 2'-O-methylcytidine-3'- phosphorothioate
  modified_base 22: mod_base = OTHER; note = 2'-O-methylcytidine-3'- phosphorothioate
  modified_base 23: mod_base = OTHER; note = 2'-O-methyluridine-3'-phosphate
tcagcaacattccggagcatcct

SEQ ID NO: 2514 - RNA, 21 nt, synthetic construct
  misc_feature 1..21: note = Description of Artificial Sequence: Synthetic oligonucleotide
  source 1..21: mol_type = other RNA
  modified_base 1: mod_base = OTHER; note = 2'-O-methyluridine-3'-phosphorothioate
  modified_base 2: mod_base = OTHER; note = 2'-O-methylguanosine-3'- phosphorothioate
  modified_base 3: mod_base = OTHER; note = 2'-O-methyluridine-3'-phosphate
  modified_base 4: mod_base = OTHER; note = 2'-O-methylcytidine-3'-phosphate
  modified_base 5: mod_base = OTHER; note = 2'-O-methylcytidine-3'-phosphate
  modified_base 6: mod_base = OTHER; note = 2'-O-methyluridine-3'-phosphate
  modified_base 7: mod_base = OTHER; note = 2'-fluorocytidine-3'-phosphate
  modified_base 8: mod_base = OTHER; note = 2'-O-methylguanosine-3'-phosphate
  modified_base 9: mod_base = OTHER; note = 2'-fluoroadenosine-3'-phosphate
  modified_base 10: mod_base = OTHER; note = 2'-fluoroguanosine-3'-phosphate
  modified_base 11: mod_base = OTHER; note = 2'-fluoroadenosine-3'-phosphate
  modified_base 12: mod_base = OTHER; note = 2'-O-methyluridine-3'-phosphate
  modified_base 13: mod_base = OTHER; note = 2'-O-methyladenosine-3'-phosphate
  modified_base 14: mod_base = OTHER; note = 2'-O-methylcytidine-3'-phosphate
  modified_base 15: mod_base = OTHER; note = 2'-O-methyluridine-3'-phosphate
  modified_base 16: mod_base = OTHER; note = 2'-O-methyladenosine-3'-phosphate
  modified_base 17: mod_base = OTHER; note = 2'-O-methyladenosine-3'-phosphate
  modified_base 18: mod_base = OTHER; note = 2'-O-methyladenosine-3'-phosphate
  modified_base 19: mod_base = OTHER; note = 2'-O-methylguanosine-3'-phosphate
  modified_base 20: mod_base = OTHER; note = 2'-O-methylguanosine-3'-phosphate
  modified_base 21: mod_base = OTHER; note = 2'-O-methyladenosine-3'-phosphate attached to N-[tris(N-acetylgalactosamine-alkyl)-amidodecanoyl)]-4-hydr oxyprolinol Hyp-(N-acetylgalactosamine-alkyl)3
tgtcctcgagatactaaagga

SEQ ID NO: 2515 - RNA, 23 nt, synthetic construct
  misc_feature 1..23: note = Description of Artificial Sequence: Synthetic oligonucleotide
  source 1..23: mol_type = other RNA
  modified_base 1: mod_base = OTHER; note = 2'-O-methyluridine-3'-phosphorothioate
  modified_base 2: mod_base = OTHER; note = 2'-fluorocytidine-3'-phosphorothioate
  modified_base 3: mod_base = OTHER; note = 2'-O-methylcytidine-3'-phosphate
  modified_base 4: mod_base = OTHER; note = 2'-O-methyluridine-3'-phosphate
  modified_base 5: mod_base = OTHER; note = 2'-O-methyluridine-3'-phosphate
  modified_base 6: mod_base = OTHER; note = 2'-fluorouridine-3'-phosphate
  modified_base 7: mod_base = OTHER; note = 2'-O-methyladenosine-3'-phosphate
  modified_base 8: mod_base = OTHER; note = 2'-fluoroguanosine-3'-phosphate
  modified_base 9: mod_base = OTHER; note = 2'-fluorouridine-3'-phosphate
  modified_base 10: mod_base = OTHER; note = 2'-O-methyladenosine-3'-phosphate
  modified_base 11: mod_base = OTHER; note = 2'-O-methyluridine-3'-phosphate
  modified_base 12: mod_base = OTHER; note = 2'-O-methylcytidine-3'-phosphate
  modified_base 13: mod_base = OTHER; note = 2'-O-methyluridine-3'-phosphate
  modified_base 14: mod_base = OTHER; note = 2'-fluorocytidine-3'-phosphate
  modified_base 15: mod_base = OTHER; note = 2'-O-methylguanosine-3'-phosphate
  modified_base 16: mod_base = OTHER; note = 2'-fluoroadenosine-3'-phosphate
  modified_base 17: mod_base = OTHER; note = 2'-O-methylguanosine-3'-phosphate
  modified_base 18: mod_base = OTHER; note = 2'-O-methylguanosine-3'-phosphate
  modified_base 19: mod_base = OTHER; note = 2'-O-methyladenosine-3'-phosphate
  modified_base 20: mod_base = OTHER; note = 2'-O-methylcytidine-3'-phosphate
  modified_base 21: mod_base = OTHER; note = 2'-O-methyladenosine-3'- phosphorothioate
  modified_base 22: mod_base = OTHER; note = 2'-O-methyluridine-3'-phosphorothioate
  modified_base 23: mod_base = OTHER; note = 2'-O-methylcytidine-3'-phosphate
tcctttagtatctcgaggacatc

SEQ ID NO: 2516 - RNA, 21 nt, synthetic construct
  misc_feature 1..21: note = Description of Artificial Sequence: Synthetic oligonucleotide
  source 1..21: mol_type = other RNA
  modified_base 1: mod_base = OTHER; note = 2'-O-methylguanosine-3'- phosphorothioate
  modified_base 2: mod_base = OTHER; note = 2'-O-methyluridine-3'-phosphorothioate
  modified_base 3: mod_base = OTHER; note = 2'-O-methylcytidine-3'-phosphate
  modified_base 4: mod_base = OTHER; note = 2'-O-methylcytidine-3'-phosphate
  modified_base 5: mod_base = OTHER; note = 2'-O-methyluridine-3'-phosphate
  modified_base 6: mod_base = OTHER; note = 2'-O-methylcytidine-3'-phosphate
  modified_base 7: mod_base = OTHER; note = 2'-fluoroguanosine-3'-phosphate
  modified_base 8: mod_base = OTHER; note = 2'-O-methyladenosine-3'-phosphate
  modified_base 9: mod_base = OTHER; note = 2'-fluoroguanosine-3'-phosphate
  modified_base 10: mod_base = OTHER; note = 2'-fluoroadenosine-3'-phosphate
  modified_base 11: mod_base = OTHER; note = 2'-fluorouridine-3'-phosphate
  modified_base 12: mod_base = OTHER; note = 2'-O-methyladenosine-3'-phosphate
  modified_base 13: mod_base = OTHER; note = 2'-O-methylcytidine-3'-phosphate
  modified_base 14: mod_base = OTHER; note = 2'-O-methyluridine-3'-phosphate
  modified_base 15: mod_base = OTHER; note = 2'-O-methyladenosine-3'-phosphate
  modified_base 16: mod_base = OTHER; note = 2'-O-methyladenosine-3'-phosphate
  modified_base 17: mod_base = OTHER; note = 2'-O-methyladenosine-3'-phosphate
  modified_base 18: mod_base = OTHER; note = 2'-O-methylguanosine-3'-phosphate
  modified_base 19: mod_base = OTHER; note = 2'-O-methylguanosine-3'-phosphate
  modified_base 20: mod_base = OTHER; note = 2'-O-methyladenosine-3'-phosphate
  modified_base 21: mod_base = OTHER; note = 2'-O-methyladenosine-3'-phosphate attached to N-[tris(N-acetylgalactosamine-alkyl)-amidodecanoyl)]-4-hydr oxyprolinol Hyp-(N-acetylgalactosamine-alkyl)3
gtcctcgagatactaaaggaa

SEQ ID NO: 2517 - RNA, 23 nt, synthetic construct
  misc_feature 1..23: note = Description of Artificial Sequence: Synthetic oligonucleotide
  source 1..23: mol_type = other RNA
  modified_base 1: mod_base = OTHER; note = 2'-O-methyluridine-3'-phosphorothioate
  modified_base 2: mod_base = OTHER; note = 2'-fluorouridine -3'-phosphorothioate
  modified_base 3: mod_base = OTHER; note = 2'-O-methylcytidine-3'-phosphate
  modified_base 4: mod_base = OTHER; note = 2'-O-methylcytidine-3'-phosphate
  modified_base 5: mod_base = OTHER; note = 2'-O-methyluridine-3'-phosphate
  modified_base 6: mod_base = OTHER; note = 2'-fluorouridine-3'-phosphate
  modified_base 7: mod_base = OTHER; note = 2'-O-methyluridine-3'-phosphate
  modified_base 8: mod_base = OTHER; note = 2'-fluoroadenosine-3'-phosphate
  modified_base 9: mod_base = OTHER; note = 2'-fluoroguanosine-3'-phosphate
  modified_base 10: mod_base = OTHER; note = 2'-O-methyluridine-3'-phosphate
  modified_base 11: mod_base = OTHER; note = 2'-O-methyladenosine-3'-phosphate
  modified_base 12: mod_base = OTHER; note = 2'-O-methyluridine-3'-phosphate
  modified_base 13: mod_base = OTHER; note = 2'-O-methylcytidine-3'-phosphate
  modified_base 14: mod_base = OTHER; note = 2'-fluorouridine-3'-phosphate
  modified_base 15: mod_base = OTHER; note = 2'-O-methylcytidine-3'-phosphate
  modified_base 16: mod_base = OTHER; note = 2'-fluoroguanosine-3'-phosphate
  modified_base 17: mod_base = OTHER; note = 2'-O-methyladenosine-3'-phosphate
  modified_base 18: mod_base = OTHER; note = 2'-O-methylguanosine-3'-phosphate
  modified_base 19: mod_base = OTHER; note = 2'-O-methylguanosine-3'-phosphate
  modified_base 20: mod_base = OTHER; note = 2'-O-methyladenosine-3'-phosphate
  modified_base 21: mod_base = OTHER; note = 2'-O-methylcytidine-3'- phosphorothioate
  modified_base 22: mod_base = OTHER; note = 2'-O-methyladenosine-3'- phosphorothioate
  modified_base 23: mod_base = OTHER; note = 2'-O-methyluridine-3'-phosphate
ttcctttagtatctcgaggacat

SEQ ID NO: 2518 - RNA, 21 nt, synthetic construct
  misc_feature 1..21: note = Description of Artificial Sequence: Synthetic oligonucleotide
  source 1..21: mol_type = other RNA
  modified_base 1: mod_base = OTHER; note = 2'-O-methyladenosine-3'- phosphorothioate
  modified_base 2: mod_base = OTHER; note = 2'-O-methyladenosine-3'- phosphorothioate
  modified_base 3: mod_base = OTHER; note = 2'-O-methylguanosine-3'-phosphate
  modified_base 4: mod_base = OTHER; note = 2'-O-methyladenosine-3'-phosphate
  modified_base 5: mod_base = OTHER; note = 2'-O-methyluridine-3'-phosphate
  modified_base 6: mod_base = OTHER; note = 2'-O-methylguanosine-3'-phosphate
  modified_base 7: mod_base = OTHER; note = 2'-fluorouridine-3'-phosphate
  modified_base 8: mod_base = OTHER; note = 2'-O-methylcytidine-3'-phosphate
  modified_base 9: mod_base = OTHER; note = 2'-fluorocytidine-3'-phosphate
  modified_base 10: mod_base = OTHER; note = 2'-fluorouridine-3'-phosphate
  modified_base 11: mod_base = OTHER; note = 2'-fluorocytidine-3'-phosphate
  modified_base 12: mod_base = OTHER; note = 2'-O-methylguanosine-3'-phosphate
  modified_base 13: mod_base = OTHER; note = 2'-O-methyladenosine-3'-phosphate
  modified_base 14: mod_base = OTHER; note = 2'-O-methylguanosine-3'-phosphate
  modified_base 15: mod_base = OTHER; note = 2'-O-methyladenosine-3'-phosphate
  modified_base 16: mod_base = OTHER; note = 2'-O-methyluridine-3'-phosphate
  modified_base 17: mod_base = OTHER; note = 2'-O-methyladenosine-3'-phosphate
  modified_base 18: mod_base = OTHER; note = 2'-O-methylcytidine-3'-phosphate
  modified_base 19: mod_base = OTHER; note = 2'-O-methyluridine-3'-phosphate
  modified_base 20: mod_base = OTHER; note = 2'-O-methyladenosine-3'-phosphate
  modified_base 21: mod_base = OTHER; note = 2'-O-methyladenosine-3'-phosphate attached to N-[tris(N-acetylgalactosamine-alkyl)-amidodecanoyl)]-4-hydr oxyprolinol Hyp-(N-acetylgalactosamine-alkyl)3
aagatgtcctcgagatactaa

SEQ ID NO: 2519 - RNA, 23 nt, synthetic construct
  misc_feature 1..23: note = Description of Artificial Sequence: Synthetic oligonucleotide
  source 1..23: mol_type = other RNA
  modified_base 1: mod_base = OTHER; note = 2'-O-methyluridine-3'-phosphorothioate
  modified_base 2: mod_base = OTHER; note = 2'-fluorouridine -3'-phosphorothioate
  modified_base 3: mod_base = OTHER; note = 2'-O-methyladenosine-3'-phosphate
  modified_base 4: mod_base = OTHER; note = 2'-O-methylguanosine-3'-phosphate
  modified_base 5: mod_base = OTHER; note = 2'-O-methyluridine-3'-phosphate
  modified_base 6: mod_base = OTHER; note = 2'-fluoroadenosine-3'-phosphate
  modified_base 7: mod_base = OTHER; note = 2'-O-methyluridine-3'-phosphate
  modified_base 8: mod_base = OTHER; note = 2'-fluorocytidine-3'-phosphate
  modified_base 9: mod_base = OTHER; note = 2'-fluorouridine-3'-phosphate
  modified_base 10: mod_base = OTHER; note = 2'-O-methylcytidine-3'-phosphate
  modified_base 11: mod_base = OTHER; note = 2'-O-methylguanosine-3'-phosphate
  modified_base 12: mod_base = OTHER; note = 2'-O-methyladenosine-3'-phosphate
  modified_base 13: mod_base = OTHER; note = 2'-O-methylguanosine-3'-phosphate
  modified_base 14: mod_base = OTHER; note = 2'-fluoroguanosine-3'-phosphate
  modified_base 15: mod_base = OTHER; note = 2'-O-methyladenosine-3'-phosphate
  modified_base 16: mod_base = OTHER; note = 2'-fluorocytidine-3'-phosphate
  modified_base 17: mod_base = OTHER; note = 2'-O-methyladenosine-3'-phosphate
  modified_base 18: mod_base = OTHER; note = 2'-O-methyluridine-3'-phosphate
  modified_base 19: mod_base = OTHER; note = 2'-O-methylcytidine-3'-phosphate
  modified_base 20: mod_base = OTHER; note = 2'-O-methyluridine-3'-phosphate
  modified_base 21: mod_base = OTHER; note = 2'-O-methyluridine-3'-phosphorothioate
  modified_base 22: mod_base = OTHER; note = 2'-O-methylguanosine-3'- phosphorothioate
  modified_base 23: mod_base = OTHER; note = 2'-O-methyladenosine-3'-phosphate
ttagtatctcgaggacatcttga

SEQ ID NO: 2520 - RNA, 21 nt, synthetic construct
  misc_feature 1..21: note = Description of Artificial Sequence: Synthetic oligonucleotide
  source 1..21: mol_type = other RNA
  modified_base 1: mod_base = OTHER; note = 2'-O-methylcytidine-3'- phosphorothioate
  modified_base 2: mod_base = OTHER; note = 2'-O-methyladenosine-3'- phosphorothioate
  modified_base 3: mod_base = OTHER; note = 2'-O-methyladenosine-3'-phosphate
  modified_base 4: mod_base = OTHER; note = 2'-O-methylguanosine-3'-phosphate
  modified_base 5: mod_base = OTHER; note = 2'-O-methyladenosine-3'-phosphate
  modified_base 6: mod_base = OTHER; note = 2'-O-methyluridine-3'-phosphate
  modified_base 7: mod_base = OTHER; note = 2'-fluoroguanosine-3'-phosphate
  modified_base 8: mod_base = OTHER; note = 2'-O-methyluridine-3'-phosphate
  modified_base 9: mod_base = OTHER; note = 2'-fluorocytidine-3'-phosphate
  modified_base 10: mod_base = OTHER; note = 2'-fluorocytidine-3'-phosphate
  modified_base 11: mod_base = OTHER; note = 2'-fluorouridine-3'-phosphate
  modified_base 12: mod_base = OTHER; note = 2'-O-methylcytidine-3'-phosphate
  modified_base 13: mod_base = OTHER; note = 2'-O-methylguanosine-3'-phosphate
  modified_base 14: mod_base = OTHER; note = 2'-O-methyladenosine-3'-phosphate
  modified_base 15: mod_base = OTHER; note = 2'-O-methylguanosine-3'-phosphate
  modified_base 16: mod_base = OTHER; note = 2'-O-methyladenosine-3'-phosphate
  modified_base 17: mod_base = OTHER; note = 2'-O-methyluridine-3'-phosphate
  modified_base 18: mod_base = OTHER; note = 2'-O-methyladenosine-3'-phosphate
  modified_base 19: mod_base = OTHER; note = 2'-O-methylcytidine-3'-phosphate
  modified_base 20: mod_base = OTHER; note = 2'-O-methyluridine-3'-phosphate
  modified_base 21: mod_base = OTHER; note = 2'-O-methyladenosine-3'-phosphate attached to N-[tris(N-acetylgalactosamine-alkyl)-amidodecanoyl)]-4-hydr oxyprolinol Hyp-(N-acetylgalactosamine-alkyl)3
caagatgtcctcgagatacta

SEQ ID NO: 2521 - RNA, 23 nt, synthetic construct
  misc_feature 1..23: note = Description of Artificial Sequence: Synthetic oligonucleotide
  source 1..23: mol_type = other RNA
  modified_base 1: mod_base = OTHER; note = 2'-O-methyluridine-3'-phosphorothioate
  modified_base 2: mod_base = OTHER; note = 2'-fluoroadenosine-3'-phosphorothioate
  modified_base 3: mod_base = OTHER; note = 2'-O-methylguanosine-3'-phosphate
  modified_base 4: mod_base = OTHER; note = 2'-O-methyluridine-3'-phosphate
  modified_base 5: mod_base = OTHER; note = 2'-O-methyladenosine-3'-phosphate
  modified_base 6: mod_base = OTHER; note = 2'-fluorouridine-3'-phosphate
  modified_base 7: mod_base = OTHER; note = 2'-O-methylcytidine-3'-phosphate
  modified_base 8: mod_base = OTHER; note = 2'-fluorouridine-3'-phosphate
  modified_base 9: mod_base = OTHER; note = 2'-fluorocytidine-3'-phosphate
  modified_base 10: mod_base = OTHER; note = 2'-O-methylguanosine-3'-phosphate
  modified_base 11: mod_base = OTHER; note = 2'-O-methyladenosine-3'-phosphate
  modified_base 12: mod_base = OTHER; note = 2'-O-methylguanosine-3'-phosphate
  modified_base 13: mod_base = OTHER; note = 2'-O-methylguanosine-3'-phosphate
  modified_base 14: mod_base = OTHER; note = 2'-fluoroadenosine-3'-phosphate
  modified_base 15: mod_base = OTHER; note = 2'-O-methylcytidine-3'-phosphate
  modified_base 16: mod_base = OTHER; note = 2'-fluoroadenosine-3'-phosphate
  modified_base 17: mod_base = OTHER; note = 2'-O-methyluridine-3'-phosphate
  modified_base 18: mod_base = OTHER; note = 2'-O-methylcytidine-3'-phosphate
  modified_base 19: mod_base = OTHER; note = 2'-O-methyluridine-3'-phosphate
  modified_base 20: mod_base = OTHER; note = 2'-O-methyluridine-3'-phosphate
  modified_base 21: mod_base = OTHER; note = 2'-O-methylguanosine-3'- phosphorothioate
  modified_base 22: mod_base = OTHER; note = 2'-O-methyladenosine-3'- phosphorothioate
  modified_base 23: mod_base = OTHER; note = 2'-O-methyladenosine-3'-phosphate
tagtatctcgaggacatcttgaa

SEQ ID NO: 2522 - RNA, 21 nt, synthetic construct
  misc_feature 1..21: note = Description of Artificial Sequence: Synthetic oligonucleotide
  source 1..21: mol_type = other RNA
  modified_base 1: mod_base = OTHER; note = 2'-O-methyladenosine-3'- phosphorothioate
  modified_base 2: mod_base = OTHER; note = 2'-O-methylcytidine-3'- phosphorothioate
  modified_base 3: mod_base = OTHER; note = 2'-O-methyladenosine-3'-phosphate
  modified_base 4: mod_base = OTHER; note = 2'-O-methyladenosine-3'-phosphate
  modified_base 5: mod_base = OTHER; note = 2'-O-methylcytidine-3'-phosphate
  modified_base 6: mod_base = OTHER; note = 2'-O-methyladenosine-3'-phosphate
  modified_base 7: mod_base = OTHER; note = 2'-fluorouridine-3'-phosphate
  modified_base 8: mod_base = OTHER; note = 2'-O-methylguanosine-3'-phosphate
  modified_base 9: mod_base = OTHER; note = 2'-fluorocytidine-3'-phosphate
  modified_base 10: mod_base = OTHER; note = 2'-fluorouridine-3'-phosphate
  modified_base 11: mod_base = OTHER; note = 2'-fluoroadenosine-3'-phosphate
  modified_base 12: mod_base = OTHER; note = 2'-O-methyladenosine-3'-phosphate
  modified_base 13: mod_base = OTHER; note = 2'-O-methyladenosine-3'-phosphate
  modified_base 14: mod_base = OTHER; note = 2'-O-methyluridine-3'-phosphate
  modified_base 15: mod_base = OTHER; note = 2'-O-methylcytidine-3'-phosphate
  modified_base 16: mod_base = OTHER; note = 2'-O-methyladenosine-3'-phosphate
  modified_base 17: mod_base = OTHER; note = 2'-O-methylguanosine-3'-phosphate
  modified_base 18: mod_base = OTHER; note = 2'-O-methyluridine-3'-phosphate
  modified_base 19: mod_base = OTHER; note = 2'-O-methyladenosine-3'-phosphate
  modified_base 20: mod_base = OTHER; note = 2'-O-methylcytidine-3'-phosphate
  modified_base 21: mod_base = OTHER; note = 2'-O-methyluridine-3'-phosphate attached to N-[tris(N-acetylgalactosamine-alkyl)-amidodecanoyl)]-4-hydr oxyprolinol Hyp-(N-acetylgalactosamine-alkyl)3
acaacatgctaaatcagtact

SEQ ID NO: 2523 - RNA, 23 nt, synthetic construct
  misc_feature 1..23: note = Description of Artificial Sequence: Synthetic oligonucleotide
  source 1..23: mol_type = other RNA
  modified_base 1: mod_base = OTHER; note = 2'-O-methyladenosine-3'- phosphorothioate
  modified_base 2: mod_base = OTHER; note = 2'-fluoroguanosine-3'-phosphorothioate
  modified_base 3: mod_base = OTHER; note = 2'-O-methyluridine-3'-phosphate
  modified_base 4: mod_base = OTHER; note = 2'-O-methyladenosine-3'-phosphate
  modified_base 5: mod_base = OTHER; note = 2'-O-methylcytidine-3'-phosphate
  modified_base 6: mod_base = OTHER; note = 2'-fluorouridine-3'-phosphate
  modified_base 7: mod_base = OTHER; note = 2'-O-methylguanosine-3'-phosphate
  modified_base 8: mod_base = OTHER; note = 2'-fluoroadenosine-3'-phosphate
  modified_base 9: mod_base = OTHER; note = 2'-fluorouridine-3'-phosphate
  modified_base 10: mod_base = OTHER; note = 2'-O-methyluridine-3'-phosphate
  modified_base 11: mod_base = OTHER; note = 2'-O-methyluridine-3'-phosphate
  modified_base 12: mod_base = OTHER; note = 2'-O-methyladenosine-3'-phosphate
  modified_base 13: mod_base = OTHER; note = 2'-O-methylguanosine-3'-phosphate
  modified_base 14: mod_base = OTHER; note = 2'-fluorocytidine-3'-phosphate
  modified_base 15: mod_base = OTHER; note = 2'-O-methyladenosine-3'-phosphate
  modified_base 16: mod_base = OTHER; note = 2'-fluorouridine-3'-phosphate
  modified_base 17: mod_base = OTHER; note = 2'-O-methylguanosine-3'-phosphate
  modified_base 18: mod_base = OTHER; note = 2'-O-methyluridine-3'-phosphate
  modified_base 19: mod_base = OTHER; note = 2'-O-methyluridine-3'-phosphate
  modified_base 20: mod_base = OTHER; note = 2'-O-methylguanosine-3'-phosphate
  modified_base 21: mod_base = OTHER; note = 2'-O-methyluridine-3'-phosphorothioate
  modified_base 22: mod_base = OTHER; note = 2'-O-methyluridine-3'-phosphorothioate
  modified_base 23: mod_base = OTHER; note = 2'-O-methylcytidine-3'-phosphate
agtactgatttagcatgttgttc

SEQ ID NO: 2524 - RNA, 21 nt, synthetic construct
  misc_feature 1..21: note = Description of Artificial Sequence: Synthetic oligonucleotide
  source 1..21: mol_type = other RNA
  modified_base 1: mod_base = OTHER; note = 2'-O-methylcytidine-3'- phosphorothioate
  modified_base 2: mod_base = OTHER; note = 2'-O-methyladenosine-3'- phosphorothioate
  modified_base 3: mod_base = OTHER; note = 2'-O-methyladenosine-3'-phosphate
  modified_base 4: mod_base = OTHER; note = 2'-O-methylcytidine-3'-phosphate
  modified_base 5: mod_base = OTHER; note = 2'-O-methyladenosine-3'-phosphate
  modified_base 6: mod_base = OTHER; note = 2'-O-methyluridine-3'-phosphate
  modified_base 7: mod_base = OTHER; note = 2'-fluoroguanosine-3'-phosphate
  modified_base 8: mod_base = OTHER; note = 2'-O-methylcytidine-3'-phosphate
  modified_base 9: mod_base = OTHER; note = 2'-fluorouridine-3'-phosphate
  modified_base 10: mod_base = OTHER; note = 2'-fluoroadenosine-3'-phosphate
  modified_base 11: mod_base = OTHER; note = 2'-fluoroadenosine-3'-phosphate
  modified_base 12: mod_base = OTHER; note = 2'-O-methyladenosine-3'-phosphate
  modified_base 13: mod_base = OTHER; note = 2'-O-methyluridine-3'-phosphate
  modified_base 14: mod_base = OTHER; note = 2'-O-methylcytidine-3'-phosphate
  modified_base 15: mod_base = OTHER; note = 2'-O-methyladenosine-3'-phosphate
  modified_base 16: mod_base = OTHER; note = 2'-O-methylguanosine-3'-phosphate
  modified_base 17: mod_base = OTHER; note = 2'-O-methyluridine-3'-phosphate
  modified_base 18: mod_base = OTHER; note = 2'-O-methyladenosine-3'-phosphate
  modified_base 19: mod_base = OTHER; note = 2'-O-methylcytidine-3'-phosphate
  modified_base 20: mod_base = OTHER; note = 2'-O-methyluridine-3'-phosphate
  modified_base 21: mod_base = OTHER; note = 2'-O-methyluridine-3'-phosphate attached to N-[tris(N-acetylgalactosamine-alkyl)-amidodecanoyl)]-4-hydr oxyprolinol Hyp-(N-acetylgalactosamine-alkyl)3
caacatgctaaatcagtactt

SEQ ID NO: 2525 - RNA, 23 nt, synthetic construct
  misc_feature 1..23: note = Description of Artificial Sequence: Synthetic oligonucleotide
  source 1..23: mol_type = other RNA
  modified_base 1: mod_base = OTHER; note = 2'-O-methyladenosine-3'- phosphorothioate
  modified_base 2: mod_base = OTHER; note = 2'-fluoroadenosine-3'-phosphorothioate
  modified_base 3: mod_base = OTHER; note = 2'-O-methylguanosine-3'-phosphate
  modified_base 4: mod_base = OTHER; note = 2'-O-methyluridine-3'-phosphate
  modified_base 5: mod_base = OTHER; note = 2'-O-methyladenosine-3'-phosphate
  modified_base 6: mod_base = OTHER; note = 2'-fluorocytidine-3'-phosphate
  modified_base 7: mod_base = OTHER; note = 2'-O-methyluridine-3'-phosphate
  modified_base 8: mod_base = OTHER; note = 2'-fluoroguanosine-3'-phosphate
  modified_base 9: mod_base = OTHER; note = 2'-fluoroadenosine-3'-phosphate
  modified_base 10: mod_base = OTHER; note = 2'-O-methyluridine-3'-phosphate
  modified_base 11: mod_base = OTHER; note = 2'-O-methyluridine-3'-phosphate
  modified_base 12: mod_base = OTHER; note = 2'-O-methyluridine-3'-phosphate
  modified_base 13: mod_base = OTHER; note = 2'-O-methyladenosine-3'-phosphate
  modified_base 14: mod_base = OTHER; note = 2'-fluoroguanosine-3'-phosphate
  modified_base 15: mod_base = OTHER; note = 2'-O-methylcytidine-3'-phosphate
  modified_base 16: mod_base = OTHER; note = 2'-fluoroadenosine-3'-phosphate
  modified_base 17: mod_base = OTHER; note = 2'-O-methyluridine-3'-phosphate
  modified_base 18: mod_base = OTHER; note = 2'-O-methylguanosine-3'-phosphate
  modified_base 19: mod_base = OTHER; note = 2'-O-methyluridine-3'-phosphate
  modified_base 20: mod_base = OTHER; note = 2'-O-methyluridine-3'-phosphate
  modified_base 21: mod_base = OTHER; note = 2'-O-methylguanosine-3'- phosphorothioate
  modified_base 22: mod_base = OTHER; note = 2'-O-methyluridine-3'-phosphorothioate
  modified_base 23: mod_base = OTHER; note = 2'-O-methyluridine-3'-phosphate
aagtactgatttagcatgttgtt

SEQ ID NO: 2526 - RNA, 21 nt, synthetic construct
  misc_feature 1..21: note = Description of Artificial Sequence: Synthetic oligonucleotide
  source 1..21: mol_type = other RNA
  modified_base 1: mod_base = OTHER; note = 2'-O-methyladenosine-3'- phosphorothioate
  modified_base 2: mod_base = OTHER; note = 2'-O-methyluridine-3'-phosphorothioate
  modified_base 3: mod_base = OTHER; note = 2'-O-methylguanosine-3'-phosphate
  modified_base 4: mod_base = OTHER; note = 2'-O-methyladenosine-3'-phosphate
  modified_base 5: mod_base = OTHER; note = 2'-O-methyladenosine-3'-phosphate
  modified_base 6: mod_base = OTHER; note = 2'-O-methylcytidine-3'-phosphate
  modified_base 7: mod_base = OTHER; note = 2'-fluoroadenosine-3'-phosphate
  modified_base 8: mod_base = OTHER; note = 2'-O-methyladenosine-3'-phosphate
  modified_base 9: mod_base = OTHER; note = 2'-fluorocytidine-3'-phosphate
  modified_base 10: mod_base = OTHER; note = 2'-fluoroadenosine-3'-phosphate
  modified_base 11: mod_base = OTHER; note = 2'-fluorouridine-3'-phosphate
  modified_base 12: mod_base = OTHER; note = 2'-O-methylguanosine-3'-phosphate
  modified_base 13: mod_base = OTHER; note = 2'-O-methylcytidine-3'-phosphate
  modified_base 14: mod_base = OTHER; note = 2'-O-methyluridine-3'-phosphate
  modified_base 15: mod_base = OTHER; note = 2'-O-methyladenosine-3'-phosphate
  modified_base 16: mod_base = OTHER; note = 2'-O-methyladenosine-3'-phosphate
  modified_base 17: mod_base = OTHER; note = 2'-O-methyladenosine-3'-phosphate
  modified_base 18: mod_base = OTHER; note = 2'-O-methyluridine-3'-phosphate
  modified_base 19: mod_base = OTHER; note = 2'-O-methylcytidine-3'-phosphate
  modified_base 20: mod_base = OTHER; note = 2'-O-methyladenosine-3'-phosphate
  modified_base 21: mod_base = OTHER; note = 2'-O-methylguanosine-3'-phosphate attached to N-[tris(N-acetylgalactosamine-alkyl)-amidodecanoyl)]-4-hydr oxyprolinol Hyp-(N-acetylgalactosamine-alkyl)3
atgaacaacatgctaaatcag

SEQ ID NO: 2527 - RNA, 23 nt, synthetic construct
  misc_feature 1..23: note = Description of Artificial Sequence: Synthetic oligonucleotide
  source 1..23: mol_type = other RNA
  modified_base 1: mod_base = OTHER; note = 2'-O-methylcytidine-3'- phosphorothioate
  modified_base 2: mod_base = OTHER; note = 2'-fluorouridine -3'-phosphorothioate
  modified_base 3: mod_base = OTHER; note = 2'-O-methylguanosine-3'-phosphate
  modified_base 4: mod_base = OTHER; note = 2'-O-methyladenosine-3'-phosphate
  modified_base 5: mod_base = OTHER; note = 2'-O-methyluridine-3'-phosphate
  modified_base 6: mod_base = OTHER; note = 2'-fluorouridine-3'-phosphate
  modified_base 7: mod_base = OTHER; note = 2'-O-methyluridine-3'-phosphate
  modified_base 8: mod_base = OTHER; note = 2'-fluoroadenosine-3'-phosphate
  modified_base 9: mod_base = OTHER; note = 2'-fluoroguanosine-3'-phosphate
  modified_base 10: mod_base = OTHER; note = 2'-O-methylcytidine-3'-phosphate
  modified_base 11: mod_base = OTHER; note = 2'-O-methyladenosine-3'-phosphate
  modified_base 12: mod_base = OTHER; note = 2'-O-methyluridine-3'-phosphate
  modified_base 13: mod_base = OTHER; note = 2'-O-methylguanosine-3'-phosphate
  modified_base 14: mod_base = OTHER; note = 2'-fluorouridine-3'-phosphate
  modified_base 15: mod_base = OTHER; note = 2'-O-methyluridine-3'-phosphate
  modified_base 16: mod_base = OTHER; note = 2'-fluoroguanosine-3'-phosphate
  modified_base 17: mod_base = OTHER; note = 2'-O-methyluridine-3'-phosphate
  modified_base 18: mod_base = OTHER; note = 2'-O-methyluridine-3'-phosphate
  modified_base 19: mod_base = OTHER; note = 2'-O-methylcytidine-3'-phosphate
  modified_base 20: mod_base = OTHER; note = 2'-O-methyladenosine-3'-phosphate
  modified_base 21: mod_base = OTHER; note = 2'-O-methyluridine-3'-phosphorothioate
  modified_base 22: mod_base = OTHER; note = 2'-O-methyladenosine-3'- phosphorothioate
  modified_base 23: mod_base = OTHER; note = 2'-O-methyladenosine-3'-phosphate
ctgatttagcatgttgttcataa

SEQ ID NO: 2528 - RNA, 21 nt, synthetic construct
  misc_feature 1..21: note = Description of Artificial Sequence: Synthetic oligonucleotide
  source 1..21: mol_type = other RNA
  modified_base 1: mod_base = OTHER; note = 2'-O-methyluridine-3'-phosphorothioate
  modified_base 2: mod_base = OTHER; note = 2'-O-methyladenosine-3'- phosphorothioate
  modified_base 3: mod_base = OTHER; note = 2'-O-methyluridine-3'-phosphate
  modified_base 4: mod_base = OTHER; note = 2'-O-methylguanosine-3'-phosphate
  modified_base 5: mod_base = OTHER; note = 2'-O-methyladenosine-3'-phosphate
  modified_base 6: mod_base = OTHER; note = 2'-O-methyladenosine-3'-phosphate
  modified_base 7: mod_base = OTHER; note = 2'-fluorocytidine-3'-phosphate
  modified_base 8: mod_base = OTHER; note = 2'-O-methyladenosine-3'-phosphate
  modified_base 9: mod_base = OTHER; note = 2'-fluoroadenosine-3'-phosphate
  modified_base 10: mod_base = OTHER; note = 2'-fluorocytidine-3'-phosphate
  modified_base 11: mod_base = OTHER; note = 2'-fluoroadenosine-3'-phosphate
  modified_base 12: mod_base = OTHER; note = 2'-O-methyluridine-3'-phosphate
  modified_base 13: mod_base = OTHER; note = 2'-O-methylguanosine-3'-phosphate
  modified_base 14: mod_base = OTHER; note = 2'-O-methylcytidine-3'-phosphate
  modified_base 15: mod_base = OTHER; note = 2'-O-methyluridine-3'-phosphate
  modified_base 16: mod_base = OTHER; note = 2'-O-methyladenosine-3'-phosphate
  modified_base 17: mod_base = OTHER; note = 2'-O-methyladenosine-3'-phosphate
  modified_base 18: mod_base = OTHER; note = 2'-O-methyladenosine-3'-phosphate
  modified_base 19: mod_base = OTHER; note = 2'-O-methyluridine-3'-phosphate
  modified_base 20: mod_base = OTHER; note = 2'-O-methylcytidine-3'-phosphate
  modified_base 21: mod_base = OTHER; note = 2'-O-methyladenosine-3'-phosphate attached to N-[tris(N-acetylgalactosamine-alkyl)-amidodecanoyl)]-4-hydr oxyprolinol Hyp-(N-acetylgalactosamine-alkyl)3
tatgaacaacatgctaaatca

SEQ ID NO: 2529 - RNA, 23 nt, synthetic construct
  misc_feature 1..23: note = Description of Artificial Sequence: Synthetic oligonucleotide
  source 1..23: mol_type = other RNA
  modified_base 1: mod_base = OTHER; note = 2'-O-methyluridine-3'-phosphorothioate
  modified_base 2: mod_base = OTHER; note = 2'-fluoroguanosine-3'-phosphorothioate
  modified_base 3: mod_base = OTHER; note = 2'-O-methyladenosine-3'-phosphate
  modified_base 4: mod_base = OTHER; note = 2'-O-methyluridine-3'-phosphate
  modified_base 5: mod_base = OTHER; note = 2'-O-methyluridine-3'-phosphate
  modified_base 6: mod_base = OTHER; note = 2'-fluorouridine-3'-phosphate
  modified_base 7: mod_base = OTHER; note = 2'-O-methyladenosine-3'-phosphate
  modified_base 8: mod_base = OTHER; note = 2'-fluoroguanosine-3'-phosphate
  modified_base 9: mod_base = OTHER; note = 2'-fluorocytidine-3'-phosphate
  modified_base 10: mod_base = OTHER; note = 2'-O-methyladenosine-3'-phosphate
  modified_base 11: mod_base = OTHER; note = 2'-O-methyluridine-3'-phosphate
  modified_base 12: mod_base = OTHER; note = 2'-O-methylguanosine-3'-phosphate
  modified_base 13: mod_base = OTHER; note = 2'-O-methyluridine-3'-phosphate
  modified_base 14: mod_base = OTHER; note = 2'-fluorouridine-3'-phosphate
  modified_base 15: mod_base = OTHER; note = 2'-O-methylguanosine-3'-phosphate
  modified_base 16: mod_base = OTHER; note = 2'-fluorouridine-3'-phosphate
  modified_base 17: mod_base = OTHER; note = 2'-O-methyluridine-3'-phosphate
  modified_base 18: mod_base = OTHER; note = 2'-O-methylcytidine-3'-phosphate
  modified_base 19: mod_base = OTHER; note = 2'-O-methyladenosine-3'-phosphate
  modified_base 20: mod_base = OTHER; note = 2'-O-methyluridine-3'-phosphate
  modified_base 21: mod_base = OTHER; note = 2'-O-methyladenosine-3'- phosphorothioate
  modified_base 22: mod_base = OTHER; note = 2'-O-methyladenosine-3'- phosphorothioate
  modified_base 23: mod_base = OTHER; note = 2'-O-methyluridine-3'-phosphate
tgatttagcatgttgttcataat

SEQ ID NO: 2530 - RNA, 21 nt, synthetic construct
  misc_feature 1..21: note = Description of Artificial Sequence: Synthetic oligonucleotide
  source 1..21: mol_type = other RNA
  modified_base 1: mod_base = OTHER; note = 2'-O-methylguanosine-3'- phosphorothioate
  modified_base 2: mod_base = OTHER; note = 2'-O-methylcytidine-3'- phosphorothioate
  modified_base 3: mod_base = OTHER; note = 2'-O-methylcytidine-3'-phosphate
  modified_base 4: mod_base = OTHER; note = 2'-O-methyladenosine-3'-phosphate
  modified_base 5: mod_base = OTHER; note = 2'-O-methyladenosine-3'-phosphate
  modified_base 6: mod_base = OTHER; note = 2'-O-methylguanosine-3'-phosphate
  modified_base 7: mod_base = OTHER; note = 2'-fluoroguanosine-3'-phosphate
  modified_base 8: mod_base = OTHER; note = 2'-O-methylcytidine-3'-phosphate
  modified_base 9: mod_base = OTHER; note = 2'-fluorouridine-3'-phosphate
  modified_base 10: mod_base = OTHER; note = 2'-fluoroguanosine-3'-phosphate
  modified_base 11: mod_base = OTHER; note = 2'-fluorouridine-3'-phosphate
  modified_base 12: mod_base = OTHER; note = 2'-O-methylguanosine-3'-phosphate
  modified_base 13: mod_base = OTHER; note = 2'-O-methyluridine-3'-phosphate
  modified_base 14: mod_base = OTHER; note = 2'-O-methyluridine-3'-phosphate
  modified_base 15: mod_base = OTHER; note = 2'-O-methyluridine-3'-phosphate
  modified_base 16: mod_base = OTHER; note = 2'-O-methylguanosine-3'-phosphate
  modified_base 17: mod_base = OTHER; note = 2'-O-methyluridine-3'-phosphate
  modified_base 18: mod_base = OTHER; note = 2'-O-methylguanosine-3'-phosphate
  modified_base 19: mod_base = OTHER; note = 2'-O-methylguanosine-3'-phosphate
  modified_base 20: mod_base = OTHER; note = 2'-O-methylguanosine-3'-phosphate
  modified_base 21: mod_base = OTHER; note = 2'-O-methylguanosine-3'-phosphate attached to N-[tris(N-acetylgalactosamine-alkyl)-amidodecanoyl)]-4-hydr oxyprolinol Hyp-(N-acetylgalactosamine-alkyl)3
gccaaggctgtgtttgtgggg

SEQ ID NO: 2531 - RNA, 23 nt, synthetic construct
  misc_feature 1..23: note = Description of Artificial Sequence: Synthetic oligonucleotide
  source 1..23: mol_type = other RNA
  modified_base 1: mod_base = OTHER; note = 2'-O-methylcytidine-3'- phosphorothioate
  modified_base 2: mod_base = OTHER; note = 2'-fluorocytidine-3'-phosphorothioate
  modified_base 3: mod_base = OTHER; note = 2'-O-methylcytidine-3'-phosphate
  modified_base 4: mod_base = OTHER; note = 2'-O-methylcytidine-3'-phosphate
  modified_base 5: mod_base = OTHER; note = 2'-O-methyladenosine-3'-phosphate
  modified_base 6: mod_base = OTHER; note = 2'-fluorocytidine-3'-phosphate
  modified_base 7: mod_base = OTHER; note = 2'-O-methyladenosine-3'-phosphate
  modified_base 8: mod_base = OTHER; note = 2'-fluoroadenosine-3'-phosphate
  modified_base 9: mod_base = OTHER; note = 2'-fluoroadenosine-3'-phosphate
  modified_base 10: mod_base = OTHER; note = 2'-O-methylcytidine-3'-phosphate
  modified_base 11: mod_base = OTHER; note = 2'-O-methyladenosine-3'-phosphate
  modified_base 12: mod_base = OTHER; note = 2'-O-methylcytidine-3'-phosphate
  modified_base 13: mod_base = OTHER; note = 2'-O-methyladenosine-3'-phosphate
  modified_base 14: mod_base = OTHER; note = 2'-fluoroguanosine-3'-phosphate
  modified_base 15: mod_base = OTHER; note = 2'-O-methylcytidine-3'-phosphate
  modified_base 16: mod_base = OTHER; note = 2'-fluorocytidine-3'-phosphate
  modified_base 17: mod_base = OTHER; note = 2'-O-methyluridine-3'-phosphate
  modified_base 18: mod_base = OTHER; note = 2'-O-methyluridine-3'-phosphate
  modified_base 19: mod_base = OTHER; note = 2'-O-methylguanosine-3'-phosphate
  modified_base 20: mod_base = OTHER; note = 2'-O-methylguanosine-3'-phosphate
  modified_base 21: mod_base = OTHER; note = 2'-O-methylcytidine-3'- phosphorothioate
  modified_base 22: mod_base = OTHER; note = 2'-O-methylguanosine-3'- phosphorothioate
  modified_base 23: mod_base = OTHER; note = 2'-O-methylcytidine-3'-phosphate
ccccacaaacacagccttggcgc

SEQ ID NO: 2532 - RNA, 21 nt, synthetic construct
  misc_feature 1..21: note = Description of Artificial Sequence: Synthetic oligonucleotide
  source 1..21: mol_type = other RNA
  modified_base 1: mod_base = OTHER; note = 2'-O-methylcytidine-3'- phosphorothioate
  modified_base 2: mod_base = OTHER; note = 2'-O-methylcytidine-3'- phosphorothioate
  modified_base 3: mod_base = OTHER; note = 2'-O-methyladenosine-3'-phosphate
  modified_base 4: mod_base = OTHER; note = 2'-O-methyladenosine-3'-phosphate
  modified_base 5: mod_base = OTHER; note = 2'-O-methylguanosine-3'-phosphate
  modified_base 6: mod_base = OTHER; note = 2'-O-methylguanosine-3'-phosphate
  modified_base 7: mod_base = OTHER; note = 2'-fluorocytidine-3'-phosphate
  modified_base 8: mod_base = OTHER; note = 2'-O-methyluridine-3'-phosphate
  modified_base 9: mod_base = OTHER; note = 2'-fluoroguanosine-3'-phosphate
  modified_base 10: mod_base = OTHER; note = 2'-fluorouridine-3'-phosphate
  modified_base 11: mod_base = OTHER; note = 2'-fluoroguanosine-3'-phosphate
  modified_base 12: mod_base = OTHER; note = 2'-O-methyluridine-3'-phosphate
  modified_base 13: mod_base = OTHER; note = 2'-O-methyluridine-3'-phosphate
  modified_base 14: mod_base = OTHER; note = 2'-O-methyluridine-3'-phosphate
  modified_base 15: mod_base = OTHER; note = 2'-O-methylguanosine-3'-phosphate
  modified_base 16: mod_base = OTHER; note = 2'-O-methyluridine-3'-phosphate
  modified_base 17: mod_base = OTHER; note = 2'-O-methylguanosine-3'-phosphate
  modified_base 18: mod_base = OTHER; note = 2'-O-methylguanosine-3'-phosphate
  modified_base 19: mod_base = OTHER; note = 2'-O-methylguanosine-3'-phosphate
  modified_base 20: mod_base = OTHER; note = 2'-O-methylguanosine-3'-phosphate
  modified_base 21: mod_base = OTHER; note = 2'-O-methyladenosine-3'-phosphate attached to N-[tris(N-acetylgalactosamine-alkyl)-amidodecanoyl)]-4-hydr oxyprolinol Hyp-(N-acetylgalactosamine-alkyl)3
ccaaggctgtgtttgtgggga

SEQ ID NO: 2533 - RNA, 23 nt, synthetic construct
  misc_feature 1..23: note = Description of Artificial Sequence: Synthetic oligonucleotide
  source 1..23: mol_type = other RNA
  modified_base 1: mod_base = OTHER; note = 2'-O-methyluridine-3'-phosphorothioate
  modified_base 2: mod_base = OTHER; note = 2'-fluorocytidine-3'-phosphorothioate
  modified_base 3: mod_base = OTHER; note = 2'-O-methylcytidine-3'-phosphate
  modified_base 4: mod_base = OTHER; note = 2'-O-methylcytidine-3'-phosphate
  modified_base 5: mod_base = OTHER; note = 2'-O-methylcytidine-3'-phosphate
  modified_base 6: mod_base = OTHER; note = 2'-fluoroadenosine-3'-phosphate
  modified_base 7: mod_base = OTHER; note = 2'-O-methylcytidine-3'-phosphate
  modified_base 8: mod_base = OTHER; note = 2'-fluoroadenosine-3'-phosphate
  modified_base 9: mod_base = OTHER; note = 2'-fluoroadenosine-3'-phosphate
  modified_base 10: mod_base = OTHER; note = 2'-O-methyladenosine-3'-phosphate
  modified_base 11: mod_base = OTHER; note = 2'-O-methylcytidine-3'-phosphate
  modified_base 12: mod_base = OTHER; note = 2'-O-methyladenosine-3'-phosphate
  modified_base 13: mod_base = OTHER; note = 2'-O-methylcytidine-3'-phosphate
  modified_base 14: mod_base = OTHER; note = 2'-fluoroadenosine-3'-phosphate
  modified_base 15: mod_base = OTHER; note = 2'-O-methylguanosine-3'-phosphate
  modified_base 16: mod_base = OTHER; note = 2'-fluorocytidine-3'-phosphate
  modified_base 17: mod_base = OTHER; note = 2'-O-methylcytidine-3'-phosphate
  modified_base 18: mod_base = OTHER; note = 2'-O-methyluridine-3'-phosphate
  modified_base 19: mod_base = OTHER; note = 2'-O-methyluridine-3'-phosphate
  modified_base 20: mod_base = OTHER; note = 2'-O-methylguanosine-3'-phosphate
  modified_base 21: mod_base = OTHER; note = 2'-O-methylguanosine-3'- phosphorothioate
  modified_base 22: mod_base = OTHER; note = 2'-O-methylcytidine-3'- phosphorothioate
  modified_base 23: mod_base = OTHER; note = 2'-O-methylguanosine-3'-phosphate
tccccacaaacacagccttggcg

SEQ ID NO: 2534 - RNA, 21 nt, synthetic construct
  misc_feature 1..21: note = Description of Artificial Sequence: Synthetic oligonucleotide
  source 1..21: mol_type = other RNA
  modified_base 1: mod_base = OTHER; note = 2'-O-methyluridine-3'-phosphorothioate
  modified_base 2: mod_base = OTHER; note = 2'-O-methylguanosine-3'- phosphorothioate
  modified_base 3: mod_base = OTHER; note = 2'-O-methylguanosine-3'-phosphate
  modified_base 4: mod_base = OTHER; note = 2'-O-methylcytidine-3'-phosphate
  modified_base 5: mod_base = OTHER; note = 2'-O-methylguanosine-3'-phosphate
  modified_base 6: mod_base = OTHER; note = 2'-O-methylcytidine-3'-phosphate
  modified_base 7: mod_base = OTHER; note = 2'-fluorocytidine-3'-phosphate
  modified_base 8: mod_base = OTHER; note = 2'-O-methyladenosine-3'-phosphate
  modified_base 9: mod_base = OTHER; note = 2'-fluoroadenosine-3'-phosphate
  modified_base 10: mod_base = OTHER; note = 2'-fluoroguanosine-3'-phosphate
  modified_base 11: mod_base = OTHER; note = 2'-fluoroguanosine-3'-phosphate
  modified_base 12: mod_base = OTHER; note = 2'-O-methylcytidine-3'-phosphate
  modified_base 13: mod_base = OTHER; note = 2'-O-methyluridine-3'-phosphate
  modified_base 14: mod_base = OTHER; note = 2'-O-methylguanosine-3'-phosphate
  modified_base 15: mod_base = OTHER; note = 2'-O-methyluridine-3'-phosphate
  modified_base 16: mod_base = OTHER; note = 2'-O-methylguanosine-3'-phosphate
  modified_base 17: mod_base = OTHER; note = 2'-O-methyluridine-3'-phosphate
  modified_base 18: mod_base = OTHER; note = 2'-O-methyluridine-3'-phosphate
  modified_base 19: mod_base = OTHER; note = 2'-O-methyluridine-3'-phosphate
  modified_base 20: mod_base = OTHER; note = 2'-O-methylguanosine-3'-phosphate
  modified_base 21: mod_base = OTHER; note = 2'-O-methyluridine-3'-phosphate attached to N-[tris(N-acetylgalactosamine-alkyl)-amidodecanoyl)]-4-hydr oxyprolinol Hyp-(N-acetylgalactosamine-alkyl)3
tggcgccaaggctgtgtttgt

SEQ ID NO: 2535 - RNA, 23 nt, synthetic construct
  misc_feature 1..23: note = Description of Artificial Sequence: Synthetic oligonucleotide
  source 1..23: mol_type = other RNA
  modified_base 1: mod_base = OTHER; note = 2'-O-methyladenosine-3'- phosphorothioate
  modified_base 2: mod_base = OTHER; note = 2'-fluorocytidine-3'-phosphorothioate
  modified_base 3: mod_base = OTHER; note = 2'-O-methyladenosine-3'-phosphate
  modified_base 4: mod_base = OTHER; note = 2'-O-methyladenosine-3'-phosphate
  modified_base 5: mod_base = OTHER; note = 2'-O-methyladenosine-3'-phosphate
  modified_base 6: mod_base = OTHER; note = 2'-fluorocytidine-3'-phosphate
  modified_base 7: mod_base = OTHER; note = 2'-O-methyladenosine-3'-phosphate
  modified_base 8: mod_base = OTHER; note = 2'-fluorocytidine-3'-phosphate
  modified_base 9: mod_base = OTHER; note = 2'-fluoroadenosine-3'-phosphate
  modified_base 10: mod_base = OTHER; note = 2'-O-methylguanosine-3'-phosphate
  modified_base 11: mod_base = OTHER; note = 2'-O-methylcytidine-3'-phosphate
  modified_base 12: mod_base = OTHER; note = 2'-O-methylcytidine-3'-phosphate
  modified_base 13: mod_base = OTHER; note = 2'-O-methyluridine-3'-phosphate
  modified_base 14: mod_base = OTHER; note = 2'-fluorouridine-3'-phosphate
  modified_base 15: mod_base = OTHER; note = 2'-O-methylguanosine-3'-phosphate
  modified_base 16: mod_base = OTHER; note = 2'-fluoroguanosine-3'-phosphate
  modified_base 17: mod_base = OTHER; note = 2'-O-methylcytidine-3'-phosphate
  modified_base 18: mod_base = OTHER; note = 2'-O-methylguanosine-3'-phosphate
  modified_base 19: mod_base = OTHER; note = 2'-O-methylcytidine-3'-phosphate
  modified_base 20: mod_base = OTHER; note = 2'-O-methylcytidine-3'-phosphate
  modified_base 21: mod_base = OTHER; note = 2'-O-methyladenosine-3'- phosphorothioate
  modified_base 22: mod_base = OTHER; note = 2'-O-methyladenosine-3'- phosphorothioate
  modified_base 23: mod_base = OTHER; note = 2'-O-methylguanosine-3'-phosphate
acaaacacagccttggcgccaag

SEQ ID NO: 2536 - RNA, 21 nt, synthetic construct
  misc_feature 1..21: note = Description of Artificial Sequence: Synthetic oligonucleotide
  source 1..21: mol_type = other RNA
  modified_base 1: mod_base = OTHER; note = 2'-O-methyluridine-3'-phosphorothioate
  modified_base 2: mod_base = OTHER; note = 2'-O-methyluridine-3'-phosphorothioate
  modified_base 3: mod_base = OTHER; note = 2'-O-methylguanosine-3'-phosphate
  modified_base 4: mod_base = OTHER; note = 2'-O-methylguanosine-3'-phosphate
  modified_base 5: mod_base = OTHER; note = 2'-O-methylcytidine-3'-phosphate
  modified_base 6: mod_base = OTHER; note = 2'-O-methylguanosine-3'-phosphate
  modified_base 7: mod_base = OTHER; note = 2'-fluorocytidine-3'-phosphate
  modified_base 8: mod_base = OTHER; note = 2'-O-methylcytidine-3'-phosphate
  modified_base 9: mod_base = OTHER; note = 2'-fluoroadenosine-3'-phosphate
  modified_base 10: mod_base = OTHER; note = 2'-fluoroadenosine-3'-phosphate
  modified_base 11: mod_base = OTHER; note = 2'-fluoroguanosine-3'-phosphate
  modified_base 12: mod_base = OTHER; note = 2'-O-methylguanosine-3'-phosphate
  modified_base 13: mod_base = OTHER; note = 2'-O-methylcytidine-3'-phosphate
  modified_base 14: mod_base = OTHER; note = 2'-O-methyluridine-3'-phosphate
  modified_base 15: mod_base = OTHER; note = 2'-O-methylguanosine-3'-phosphate
  modified_base 16: mod_base = OTHER; note = 2'-O-methyluridine-3'-phosphate
  modified_base 17: mod_base = OTHER; note = 2'-O-methylguanosine-3'-phosphate
  modified_base 18: mod_base = OTHER; note = 2'-O-methyluridine-3'-phosphate
  modified_base 19: mod_base = OTHER; note = 2'-O-methyluridine-3'-phosphate
  modified_base 20: mod_base = OTHER; note = 2'-O-methyluridine-3'-phosphate
  modified_base 21: mod_base = OTHER; note = 2'-O-methylguanosine-3'-phosphate attached to N-[tris(N-acetylgalactosamine-alkyl)-amidodecanoyl)]-4-hydr oxyprolinol Hyp-(N-acetylgalactosamine-alkyl)3
ttggcgccaaggctgtgtttg

SEQ ID NO: 2537 - RNA, 23 nt, synthetic construct
  misc_feature 1..23: note = Description of Artificial Sequence: Synthetic oligonucleotide
  source 1..23: mol_type = other RNA
  modified_base 1: mod_base = OTHER; note = 2'-O-methylcytidine-3'- phosphorothioate
  modified_base 2: mod_base = OTHER; note = 2'-fluoroadenosine-3'-phosphorothioate
  modified_base 3: mod_base = OTHER; note = 2'-O-methyladenosine-3'-phosphate
  modified_base 4: mod_base = OTHER; note = 2'-O-methyladenosine-3'-phosphate
  modified_base 5: mod_base = OTHER; note = 2'-O-methylcytidine-3'-phosphate
  modified_base 6: mod_base = OTHER; note = 2'-fluoroadenosine-3'-phosphate
  modified_base 7: mod_base = OTHER; note = 2'-O-methylcytidine-3'-phosphate
  modified_base 8: mod_base = OTHER; note = 2'-fluoroadenosine-3'-phosphate
  modified_base 9: mod_base = OTHER; note = 2'-fluoroguanosine-3'-phosphate
  modified_base 10: mod_base = OTHER; note = 2'-O-methylcytidine-3'-phosphate
  modified_base 11: mod_base = OTHER; note = 2'-O-methylcytidine-3'-phosphate
  modified_base 12: mod_base = OTHER; note = 2'-O-methyluridine-3'-phosphate
  modified_base 13: mod_base = OTHER; note = 2'-O-methyluridine-3'-phosphate
  modified_base 14: mod_base = OTHER; note = 2'-fluoroguanosine-3'-phosphate
  modified_base 15: mod_base = OTHER; note = 2'-O-methylguanosine-3'-phosphate
  modified_base 16: mod_base = OTHER; note = 2'-fluorocytidine-3'-phosphate
  modified_base 17: mod_base = OTHER; note = 2'-O-methylguanosine-3'-phosphate
  modified_base 18: mod_base = OTHER; note = 2'-O-methylcytidine-3'-phosphate
  modified_base 19: mod_base = OTHER; note = 2'-O-methylcytidine-3'-phosphate
  modified_base 20: mod_base = OTHER; note = 2'-O-methyladenosine-3'-phosphate
  modified_base 21: mod_base = OTHER; note = 2'-O-methyladenosine-3'- phosphorothioate
  modified_base 22: mod_base = OTHER; note = 2'-O-methylguanosine-3'- phosphorothioate
  modified_base 23: mod_base = OTHER; note = 2'-O-methyladenosine-3'-phosphate
caaacacagccttggcgccaaga

SEQ ID NO: 2538 - RNA, 21 nt, synthetic construct
  misc_feature 1..21: note = Description of Artificial Sequence: Synthetic oligonucleotide
  source 1..21: mol_type = other RNA
  modified_base 1: mod_base = OTHER; note = 2'-O-methyluridine-3'-phosphorothioate
  modified_base 2: mod_base = OTHER; note = 2'-O-methylguanosine-3'- phosphorothioate
  modified_base 3: mod_base = OTHER; note = 2'-O-methyladenosine-3'-phosphate
  modified_base 4: mod_base = OTHER; note = 2'-O-methyladenosine-3'-phosphate
  modified_base 5: mod_base = OTHER; note = 2'-O-methyladenosine-3'-phosphate
  modified_base 6: mod_base = OTHER; note = 2'-O-methylguanosine-3'-phosphate
  modified_base 7: mod_base = OTHER; note = 2'-fluorocytidine-3'-phosphate
  modified_base 8: mod_base = OTHER; note = 2'-O-methyluridine-3'-phosphate
  modified_base 9: mod_base = OTHER; note = 2'-fluorocytidine-3'-phosphate
  modified_base 10: mod_base = OTHER; note = 2'-fluorouridine-3'-phosphate
  modified_base 11: mod_base = OTHER; note = 2'-fluoroguanosine-3'-phosphate
  modified_base 12: mod_base = OTHER; note = 2'-O-methylguanosine-3'-phosphate
  modified_base 13: mod_base = OTHER; note = 2'-O-methylcytidine-3'-phosphate
  modified_base 14: mod_base = OTHER; note = 2'-O-methyluridine-3'-phosphate
  modified_base 15: mod_base = OTHER; note = 2'-O-methylcytidine-3'-phosphate
  modified_base 16: mod_base = OTHER; note = 2'-O-methyluridine-3'-phosphate
  modified_base 17: mod_base = OTHER; note = 2'-O-methyluridine-3'-phosphate
  modified_base 18: mod_base = OTHER; note = 2'-O-methylguanosine-3'-phosphate
  modified_base 19: mod_base = OTHER; note = 2'-O-methylguanosine-3'-phosphate
  modified_base 20: mod_base = OTHER; note = 2'-O-methylcytidine-3'-phosphate
  modified_base 21: mod_base = OTHER; note = 2'-O-methylguanosine-3'-phosphate attached to N-[tris(N-acetylgalactosamine-alkyl)-amidodecanoyl)]-4-hydr oxyprolinol Hyp-(N-acetylgalactosamine-alkyl)3
tgaaagctctggctcttggcg

SEQ ID NO: 2539 - RNA, 23 nt, synthetic construct
  misc_feature 1..23: note = Description of Artificial Sequence: Synthetic oligonucleotide
  source 1..23: mol_type = other RNA
  modified_base 1: mod_base = OTHER; note = 2'-O-methylcytidine-3'- phosphorothioate
  modified_base 2: mod_base = OTHER; note = 2'-fluoroguanosine-3'-phosphorothioate
  modified_base 3: mod_base = OTHER; note = 2'-O-methylcytidine-3'-phosphate
  modified_base 4: mod_base = OTHER; note = 2'-O-methylcytidine-3'-phosphate
  modified_base 5: mod_base = OTHER; note = 2'-O-methyladenosine-3'-phosphate
  modified_base 6: mod_base = OTHER; note = 2'-fluoroadenosine-3'-phosphate
  modified_base 7: mod_base = OTHER; note = 2'-O-methylguanosine-3'-phosphate
  modified_base 8: mod_base = OTHER; note = 2'-fluoroadenosine-3'-phosphate
  modified_base 9: mod_base = OTHER; note = 2'-fluoroguanosine-3'-phosphate
  modified_base 10: mod_base = OTHER; note = 2'-O-methylcytidine-3'-phosphate
  modified_base 11: mod_base = OTHER; note = 2'-O-methylcytidine-3'-phosphate
  modified_base 12: mod_base = OTHER; note = 2'-O-methyladenosine-3'-phosphate
  modified_base 13: mod_base = OTHER; note = 2'-O-methylguanosine-3'-phosphate
  modified_base 14: mod_base = OTHER; note = 2'-fluoroadenosine-3'-phosphate
  modified_base 15: mod_base = OTHER; note = 2'-O-methylguanosine-3'-phosphate
  modified_base 16: mod_base = OTHER; note = 2'-fluorocytidine-3'-phosphate
  modified_base 17: mod_base = OTHER; note = 2'-O-methyluridine-3'-phosphate
  modified_base 18: mod_base = OTHER; note = 2'-O-methyluridine-3'-phosphate
  modified_base 19: mod_base = OTHER; note = 2'-O-methyluridine-3'-phosphate
  modified_base 20: mod_base = OTHER; note = 2'-O-methylcytidine-3'-phosphate
  modified_base 21: mod_base = OTHER; note = 2'-O-methyladenosine-3'- phosphorothioate
  modified_base 22: mod_base = OTHER; note = 2'-O-methylguanosine-3'- phosphorothioate
  modified_base 23: mod_base = OTHER; note = 2'-O-methyladenosine-3'-phosphate
cgccaagagccagagctttcaga

SEQ ID NO: 2540 - RNA, 21 nt, synthetic construct
  misc_feature 1..21: note = Description of Artificial Sequence: Synthetic oligonucleotide
  source 1..21: mol_type = other RNA
  modified_base 1: mod_base = OTHER; note = 2'-O-methylguanosine-3'- phosphorothioate
  modified_base 2: mod_base = OTHER; note = 2'-O-methyladenosine-3'- phosphorothioate
  modified_base 3: mod_base = OTHER; note = 2'-O-methyladenosine-3'-phosphate
  modified_base 4: mod_base = OTHER; note = 2'-O-methyladenosine-3'-phosphate
  modified_base 5: mod_base = OTHER; note = 2'-O-methylguanosine-3'-phosphate
  modified_base 6: mod_base = OTHER; note = 2'-O-methylcytidine-3'-phosphate
  modified_base 7: mod_base = OTHER; note = 2'-fluorouridine-3'-phosphate
  modified_base 8: mod_base = OTHER; note = 2'-O-methylcytidine-3'-phosphate
  modified_base 9: mod_base = OTHER; note = 2'-fluorouridine-3'-phosphate
  modified_base 10: mod_base = OTHER; note = 2'-fluoroguanosine-3'-phosphate
  modified_base 11: mod_base = OTHER; note = 2'-fluoroguanosine-3'-phosphate
  modified_base 12: mod_base = OTHER; note = 2'-O-methylcytidine-3'-phosphate
  modified_base 13: mod_base = OTHER; note = 2'-O-methyluridine-3'-phosphate
  modified_base 14: mod_base = OTHER; note = 2'-O-methylcytidine-3'-phosphate
  modified_base 15: mod_base = OTHER; note = 2'-O-methyluridine-3'-phosphate
  modified_base 16: mod_base = OTHER; note = 2'-O-methyluridine-3'-phosphate
  modified_base 17: mod_base = OTHER; note = 2'-O-methylguanosine-3'-phosphate
  modified_base 18: mod_base = OTHER; note = 2'-O-methylguanosine-3'-phosphate
  modified_base 19: mod_base = OTHER; note = 2'-O-methylcytidine-3'-phosphate
  modified_base 20: mod_base = OTHER; note = 2'-O-methylguanosine-3'-phosphate
  modified_base 21: mod_base = OTHER; note = 2'-O-methylcytidine-3'-phosphate attached to N-[tris(N-acetylgalactosamine-alkyl)-amidodecanoyl)]-4-hydr oxyprolinol Hyp-(N-acetylgalactosamine-alkyl)3
gaaagctctggctcttggcgc

SEQ ID NO: 2541 - RNA, 23 nt, synthetic construct
  misc_feature 1..23: note = Description of Artificial Sequence: Synthetic oligonucleotide
  source 1..23: mol_type = other RNA
  modified_base 1: mod_base = OTHER; note = 2'-O-methylguanosine-3'- phosphorothioate
  modified_base 2: mod_base = OTHER; note = 2'-fluorocytidine-3'-phosphorothioate
  modified_base 3: mod_base = OTHER; note = 2'-O-methylguanosine-3'-phosphate
  modified_base 4: mod_base = OTHER; note = 2'-O-methylcytidine-3'-phosphate
  modified_base 5: mod_base = OTHER; note = 2'-O-methylcytidine-3'-phosphate
  modified_base 6: mod_base = OTHER; note = 2'-fluoroadenosine-3'-phosphate
  modified_base 7: mod_base = OTHER; note = 2'-O-methyladenosine-3'-phosphate
  modified_base 8: mod_base = OTHER; note = 2'-fluoroguanosine-3'-phosphate
  modified_base 9: mod_base = OTHER; note = 2'-fluoroadenosine-3'-phosphate
  modified_base 10: mod_base = OTHER; note = 2'-O-methylguanosine-3'-phosphate
  modified_base 11: mod_base = OTHER; note = 2'-O-methylcytidine-3'-phosphate
  modified_base 12: mod_base = OTHER; note = 2'-O-methylcytidine-3'-phosphate
  modified_base 13: mod_base = OTHER; note = 2'-O-methyladenosine-3'-phosphate
  modified_base 14: mod_base = OTHER; note = 2'-fluoroguanosine-3'-phosphate
  modified_base 15: mod_base = OTHER; note = 2'-O-methyladenosine-3'-phosphate
  modified_base 16: mod_base = OTHER; note = 2'-fluoroguanosine-3'-phosphate
  modified_base 17: mod_base = OTHER; note = 2'-O-methylcytidine-3'-phosphate
  modified_base 18: mod_base = OTHER; note = 2'-O-methyluridine-3'-phosphate
  modified_base 19: mod_base = OTHER; note = 2'-O-methyluridine-3'-phosphate
  modified_base 20: mod_base = OTHER; note = 2'-O-methyluridine-3'-phosphate
  modified_base 21: mod_base = OTHER; note = 2'-O-methylcytidine-3'- phosphorothioate
  modified_base 22: mod_base = OTHER; note = 2'-O-methyladenosine-3'- phosphorothioate
  modified_base 23: mod_base = OTHER; note = 2'-O-methylguanosine-3'-phosphate
gcgccaagagccagagctttcag

SEQ ID NO: 2542 - RNA, 21 nt, synthetic construct
  misc_feature 1..21: note = Description of Artificial Sequence: Synthetic oligonucleotide
  source 1..21: mol_type = other RNA
  modified_base 1: mod_base = OTHER; note = 2'-O-methylguanosine-3'- phosphorothioate
  modified_base 2: mod_base = OTHER; note = 2'-O-methyluridine-3'-phosphorothioate
  modified_base 3: mod_base = OTHER; note = 2'-O-methyluridine-3'-phosphate
  modified_base 4: mod_base = OTHER; note = 2'-O-methylcytidine-3'-phosphate
  modified_base 5: mod_base = OTHER; note = 2'-O-methyluridine-3'-phosphate
  modified_base 6: mod_base = OTHER; note = 2'-O-methylguanosine-3'-phosphate
  modified_base 7: mod_base = OTHER; note = 2'-fluoroadenosine-3'-phosphate
  modified_base 8: mod_base = OTHER; note = 2'-O-methyladenosine-3'-phosphate
  modified_base 9: mod_base = OTHER; note = 2'-fluoroadenosine-3'-phosphate
  modified_base 10: mod_base = OTHER; note = 2'-fluoroguanosine-3'-phosphate
  modified_base 11: mod_base = OTHER; note = 2'-fluorocytidine-3'-phosphate
  modified_base 12: mod_base = OTHER; note = 2'-O-methyluridine-3'-phosphate
  modified_base 13: mod_base = OTHER; note = 2'-O-methylcytidine-3'-phosphate
  modified_base 14: mod_base = OTHER; note = 2'-O-methyluridine-3'-phosphate
  modified_base 15: mod_base = OTHER; note = 2'-O-methylguanosine-3'-phosphate
  modified_base 16: mod_base = OTHER; note = 2'-O-methylguanosine-3'-phosphate
  modified_base 17: mod_base = OTHER; note = 2'-O-methylcytidine-3'-phosphate
  modified_base 18: mod_base = OTHER; note = 2'-O-methyluridine-3'-phosphate
  modified_base 19: mod_base = OTHER; note = 2'-O-methylcytidine-3'-phosphate
  modified_base 20: mod_base = OTHER; note = 2'-O-methyluridine-3'-phosphate
  modified_base 21: mod_base = OTHER; note = 2'-O-methyluridine-3'-phosphate attached to N-[tris(N-acetylgalactosamine-alkyl)-amidodecanoyl)]-4-hydr oxyprolinol Hyp-(N-acetylgalactosamine-alkyl)3
gttctgaaagctctggctctt

SEQ ID NO: 2543 - RNA, 23 nt, synthetic construct
  misc_feature 1..23: note = Description of Artificial Sequence: Synthetic oligonucleotide
  source 1..23: mol_type = other RNA
  modified_base 1: mod_base = OTHER; note = 2'-O-methyladenosine-3'- phosphorothioate
  modified_base 2: mod_base = OTHER; note = 2'-fluoroadenosine-3'-phosphorothioate
  modified_base 3: mod_base = OTHER; note = 2'-O-methylguanosine-3'-phosphate
  modified_base 4: mod_base = OTHER; note = 2'-O-methyladenosine-3'-phosphate
  modified_base 5: mod_base = OTHER; note = 2'-O-methylguanosine-3'-phosphate
  modified_base 6: mod_base = OTHER; note = 2'-fluorocytidine-3'-phosphate
  modified_base 7: mod_base = OTHER; note = 2'-O-methylcytidine-3'-phosphate
  modified_base 8: mod_base = OTHER; note = 2'-fluoroadenosine-3'-phosphate
  modified_base 9: mod_base = OTHER; note = 2'-fluoroguanosine-3'-phosphate
  modified_base 10: mod_base = OTHER; note = 2'-O-methyladenosine-3'-phosphate
  modified_base 11: mod_base = OTHER; note = 2'-O-methylguanosine-3'-phosphate
  modified_base 12: mod_base = OTHER; note = 2'-O-methylcytidine-3'-phosphate
  modified_base 13: mod_base = OTHER; note = 2'-O-methyluridine-3'-phosphate
  modified_base 14: mod_base = OTHER; note = 2'-fluorouridine-3'-phosphate
  modified_base 15: mod_base = OTHER; note = 2'-O-methyluridine-3'-phosphate
  modified_base 16: mod_base = OTHER; note = 2'-fluorocytidine-3'-phosphate
  modified_base 17: mod_base = OTHER; note = 2'-O-methyladenosine-3'-phosphate
  modified_base 18: mod_base = OTHER; note = 2'-O-methylguanosine-3'-phosphate
  modified_base 19: mod_base = OTHER; note = 2'-O-methyladenosine-3'-phosphate
  modified_base 20: mod_base = OTHER; note = 2'-O-methyladenosine-3'-phosphate
  modified_base 21: mod_base = OTHER; note = 2'-O-methylcytidine-3'- phosphorothioate
  modified_base 22: mod_base = OTHER; note = 2'-O-methyladenosine-3'- phosphorothioate
  modified_base 23: mod_base = OTHER; note = 2'-O-methyluridine-3'-phosphate
aagagccagagctttcagaacat

SEQ ID NO: 2544 - RNA, 21 nt, synthetic construct
  misc_feature 1..21: note = Description of Artificial Sequence: Synthetic oligonucleotide
  source 1..21: mol_type = other RNA
  modified_base 1: mod_base = OTHER; note = 2'-O-methyluridine-3'-phosphorothioate
  modified_base 2: mod_base = OTHER; note = 2'-O-methylguanosine-3'- phosphorothioate
  modified_base 3: mod_base = OTHER; note = 2'-O-methyluridine-3'-phosphate
  modified_base 4: mod_base = OTHER; note = 2'-O-methyluridine-3'-phosphate
  modified_base 5: mod_base = OTHER; note = 2'-O-methylcytidine-3'-phosphate
  modified_base 6: mod_base = OTHER; note = 2'-O-methyluridine-3'-phosphate
  modified_base 7: mod_base = OTHER; note = 2'-fluoroguanosine-3'-phosphate
  modified_base 8: mod_base = OTHER; note = 2'-O-methyladenosine-3'-phosphate
  modified_base 9: mod_base = OTHER; note = 2'-fluoroadenosine-3'-phosphate
  modified_base 10: mod_base = OTHER; note = 2'-fluoroadenosine-3'-phosphate
  modified_base 11: mod_base = OTHER; note = 2'-fluoroguanosine-3'-phosphate
  modified_base 12: mod_base = OTHER; note = 2'-O-methylcytidine-3'-phosphate
  modified_base 13: mod_base = OTHER; note = 2'-O-methyluridine-3'-phosphate
  modified_base 14: mod_base = OTHER; note = 2'-O-methylcytidine-3'-phosphate
  modified_base 15: mod_base = OTHER; note = 2'-O-methyluridine-3'-phosphate
  modified_base 16: mod_base = OTHER; note = 2'-O-methylguanosine-3'-phosphate
  modified_base 17: mod_base = OTHER; note = 2'-O-methylguanosine-3'-phosphate
  modified_base 18: mod_base = OTHER; note = 2'-O-methylcytidine-3'-phosphate
  modified_base 19: mod_base = OTHER; note = 2'-O-methyluridine-3'-phosphate
  modified_base 20: mod_base = OTHER; note = 2'-O-methylcytidine-3'-phosphate
  modified_base 21: mod_base = OTHER; note = 2'-O-methyluridine-3'-phosphate attached to N-[tris(N-acetylgalactosamine-alkyl)-amidodecanoyl)]-4-hydr oxyprolinol Hyp-(N-acetylgalactosamine-alkyl)3
tgttctgaaagctctggctct

SEQ ID NO: 2545 - RNA, 23 nt, synthetic construct
  misc_feature 1..23: note = Description of Artificial Sequence: Synthetic oligonucleotide
  source 1..23: mol_type = other RNA
  modified_base 1: mod_base = OTHER; note = 2'-O-methyladenosine-3'- phosphorothioate
  modified_base 2: mod_base = OTHER; note = 2'-fluoroguanosine-3'-phosphorothioate
  modified_base 3: mod_base = OTHER; note = 2'-O-methyladenosine-3'-phosphate
  modified_base 4: mod_base = OTHER; note = 2'-O-methylguanosine-3'-phosphate
  modified_base 5: mod_base = OTHER; note = 2'-O-methylcytidine-3'-phosphate
  modified_base 6: mod_base = OTHER; note = 2'-fluorocytidine-3'-phosphate
  modified_base 7: mod_base = OTHER; note = 2'-O-methyladenosine-3'-phosphate
  modified_base 8: mod_base = OTHER; note = 2'-fluoroguanosine-3'-phosphate
  modified_base 9: mod_base = OTHER; note = 2'-fluoroadenosine-3'-phosphate
  modified_base 10: mod_base = OTHER; note = 2'-O-methylguanosine-3'-phosphate
  modified_base 11: mod_base = OTHER; note = 2'-O-methylcytidine-3'-phosphate
  modified_base 12: mod_base = OTHER; note = 2'-O-methyluridine-3'-phosphate
  modified_base 13: mod_base = OTHER; note = 2'-O-methyluridine-3'-phosphate
  modified_base 14: mod_base = OTHER; note = 2'-fluorouridine-3'-phosphate
  modified_base 15: mod_base = OTHER; note = 2'-O-methylcytidine-3'-phosphate
  modified_base 16: mod_base = OTHER; note = 2'-fluoroadenosine-3'-phosphate
  modified_base 17: mod_base = OTHER; note = 2'-O-methylguanosine-3'-phosphate
  modified_base 18: mod_base = OTHER; note = 2'-O-methyladenosine-3'-phosphate
  modified_base 19: mod_base = OTHER; note = 2'-O-methyladenosine-3'-phosphate
  modified_base 20: mod_base = OTHER; note = 2'-O-methylcytidine-3'-phosphate
  modified_base 21: mod_base = OTHER; note = 2'-O-methyladenosine-3'- phosphorothioate
  modified_base 22: mod_base = OTHER; note = 2'-O-methyluridine-3'-phosphorothioate
  modified_base 23: mod_base = OTHER; note = 2'-O-methylcytidine-3'-phosphate
agagccagagctttcagaacatc

SEQ ID NO: 2546 - RNA, 21 nt, synthetic construct
  misc_feature 1..21: note = Description of Artificial Sequence: Synthetic oligonucleotide
  source 1..21: mol_type = other RNA
  modified_base 1: mod_base = OTHER; note = 2'-O-methylcytidine-3'- phosphorothioate
  modified_base 2: mod_base = OTHER; note = 2'-O-methyladenosine-3'- phosphorothioate
  modified_base 3: mod_base = OTHER; note = 2'-O-methylguanosine-3'-phosphate
  modified_base 4: mod_base = OTHER; note = 2'-O-methylcytidine-3'-phosphate
  modified_base 5: mod_base = OTHER; note = 2'-O-methylcytidine-3'-phosphate
  modified_base 6: mod_base = OTHER; note = 2'-O-methyladenosine-3'-phosphate
  modified_base 7: mod_base = OTHER; note = 2'-fluorocytidine-3'-phosphate
  modified_base 8: mod_base = OTHER; note = 2'-O-methyluridine-3'-phosphate
  modified_base 9: mod_base = OTHER; note = 2'-fluoroadenosine-3'-phosphate
  modified_base 10: mod_base = OTHER; note = 2'-fluorouridine-3'-phosphate
  modified_base 11: mod_base = OTHER; note = 2'-fluorouridine-3'-phosphate
  modified_base 12: mod_base = OTHER; note = 2'-O-methylguanosine-3'-phosphate
  modified_base 13: mod_base = OTHER; note = 2'-O-methyladenosine-3'-phosphate
  modified_base 14: mod_base = OTHER; note = 2'-O-methyluridine-3'-phosphate
  modified_base 15: mod_base = OTHER; note = 2'-O-methylguanosine-3'-phosphate
  modified_base 16: mod_base = OTHER; note = 2'-O-methyluridine-3'-phosphate
  modified_base 17: mod_base = OTHER; note = 2'-O-methyluridine-3'-phosphate
  modified_base 18: mod_base = OTHER; note = 2'-O-methylcytidine-3'-phosphate
  modified_base 19: mod_base = OTHER; note = 2'-O-methyluridine-3'-phosphate
  modified_base 20: mod_base = OTHER; note = 2'-O-methylguanosine-3'-phosphate
  modified_base 21: mod_base = OTHER; note = 2'-O-methylcytidine-3'-phosphate attached to N-[tris(N-acetylgalactosamine-alkyl)-amidodecanoyl)]-4-hydr oxyprolinol Hyp-(N-acetylgalactosamine-alkyl)3
cagccactattgatgttctgc

SEQ ID NO: 2547 - RNA, 23 nt, synthetic construct
  misc_feature 1..23: note = Description of Artificial Sequence: Synthetic oligonucleotide
  source 1..23: mol_type = other RNA
  modified_base 1: mod_base = OTHER; note = 2'-O-methylguanosine-3'- phosphorothioate
  modified_base 2: mod_base = OTHER; note = 2'-fluorocytidine-3'-phosphorothioate
  modified_base 3: mod_base = OTHER; note = 2'-O-methyladenosine-3'-phosphate
  modified_base 4: mod_base = OTHER; note = 2'-O-methylguanosine-3'-phosphate
  modified_base 5: mod_base = OTHER; note = 2'-O-methyladenosine-3'-phosphate
  modified_base 6: mod_base = OTHER; note = 2'-fluoroadenosine-3'-phosphate
  modified_base 7: mod_base = OTHER; note = 2'-O-methylcytidine-3'-phosphate
  modified_base 8: mod_base = OTHER; note = 2'-fluoroadenosine-3'-phosphate
  modified_base 9: mod_base = OTHER; note = 2'-fluorouridine-3'-phosphate
  modified_base 10: mod_base = OTHER; note = 2'-O-methylcytidine-3'-phosphate
  modified_base 11: mod_base = OTHER; note = 2'-O-methyladenosine-3'-phosphate
  modified_base 12: mod_base = OTHER; note = 2'-O-methyladenosine-3'-phosphate
  modified_base 13: mod_base = OTHER; note = 2'-O-methyluridine-3'-phosphate
  modified_base 14: mod_base = OTHER; note = 2'-fluoroadenosine-3'-phosphate
  modified_base 15: mod_base = OTHER; note = 2'-O-methylguanosine-3'-phosphate
  modified_base 16: mod_base = OTHER; note = 2'-fluorouridine-3'-phosphate
  modified_base 17: mod_base = OTHER; note = 2'-O-methylguanosine-3'-phosphate
  modified_base 18: mod_base = OTHER; note = 2'-O-methylguanosine-3'-phosphate
  modified_base 19: mod_base = OTHER; note = 2'-O-methylcytidine-3'-phosphate
  modified_base 20: mod_base = OTHER; note = 2'-O-methyluridine-3'-phosphate
  modified_base 21: mod_base = OTHER; note = 2'-O-methylguanosine-3'- phosphorothioate
  modified_base 22: mod_base = OTHER; note = 2'-O-methylguanosine-3'- phosphorothioate
  modified_base 23: mod_base = OTHER; note = 2'-O-methylcytidine-3'-phosphate
gcagaacatcaatagtggctggc

SEQ ID NO: 2548 - RNA, 21 nt, synthetic construct
  misc_feature 1..21: note = Description of Artificial Sequence: Synthetic oligonucleotide
  source 1..21: mol_type = other RNA
  modified_base 1: mod_base = OTHER; note = 2'-O-methyladenosine-3'- phosphorothioate
  modified_base 2: mod_base = OTHER; note = 2'-O-methylguanosine-3'- phosphorothioate
  modified_base 3: mod_base = OTHER; note = 2'-O-methylcytidine-3'-phosphate
  modified_base 4: mod_base = OTHER; note = 2'-O-methylcytidine-3'-phosphate
  modified_base 5: mod_base = OTHER; note = 2'-O-methyladenosine-3'-phosphate
  modified_base 6: mod_base = OTHER; note = 2'-O-methylcytidine-3'-phosphate
  modified_base 7: mod_base = OTHER; note = 2'-fluorouridine-3'-phosphate
  modified_base 8: mod_base = OTHER; note = 2'-O-methyladenosine-3'-phosphate
  modified_base 9: mod_base = OTHER; note = 2'-fluorouridine-3'-phosphate
  modified_base 10: mod_base = OTHER; note = 2'-fluorouridine-3'-phosphate
  modified_base 11: mod_base = OTHER; note = 2'-fluoroguanosine-3'-phosphate
  modified_base 12: mod_base = OTHER; note = 2'-O-methyladenosine-3'-phosphate
  modified_base 13: mod_base = OTHER; note = 2'-O-methyluridine-3'-phosphate
  modified_base 14: mod_base = OTHER; note = 2'-O-methylguanosine-3'-phosphate
  modified_base 15: mod_base = OTHER; note = 2'-O-methyluridine-3'-phosphate
  modified_base 16: mod_base = OTHER; note = 2'-O-methyluridine-3'-phosphate
  modified_base 17: mod_base = OTHER; note = 2'-O-methylcytidine-3'-phosphate
  modified_base 18: mod_base = OTHER; note = 2'-O-methyluridine-3'-phosphate
  modified_base 19: mod_base = OTHER; note = 2'-O-methylguanosine-3'-phosphate
  modified_base 20: mod_base = OTHER; note = 2'-O-methylcytidine-3'-phosphate
  modified_base 21: mod_base = OTHER; note = 2'-O-methylcytidine-3'-phosphate attached to N-[tris(N-acetylgalactosamine-alkyl)-amidodecanoyl)]-4-hydr oxyprolinol Hyp-(N-acetylgalactosamine-alkyl)3
agccactattgatgttctgcc

SEQ ID NO: 2549 - RNA, 23 nt, synthetic construct
  misc_feature 1..23: note = Description of Artificial Sequence: Synthetic oligonucleotide
  source 1..23: mol_type = other RNA
  modified_base 1: mod_base = OTHER; note = 2'-O-methylguanosine-3'- phosphorothioate
  modified_base 2: mod_base = OTHER; note = 2'-fluoroguanosine-3'-phosphorothioate
  modified_base 3: mod_base = OTHER; note = 2'-O-methylcytidine-3'-phosphate
  modified_base 4: mod_base = OTHER; note = 2'-O-methyladenosine-3'-phosphate
  modified_base 5: mod_base = OTHER; note = 2'-O-methylguanosine-3'-phosphate
  modified_base 6: mod_base = OTHER; note = 2'-fluoroadenosine-3'-phosphate
  modified_base 7: mod_base = OTHER; note = 2'-O-methyladenosine-3'-phosphate
  modified_base 8: mod_base = OTHER; note = 2'-fluorocytidine-3'-phosphate
  modified_base 9: mod_base = OTHER; note = 2'-fluoroadenosine-3'-phosphate
  modified_base 10: mod_base = OTHER; note = 2'-O-methyluridine-3'-phosphate
  modified_base 11: mod_base = OTHER; note = 2'-O-methylcytidine-3'-phosphate
  modified_base 12: mod_base = OTHER; note = 2'-O-methyladenosine-3'-phosphate
  modified_base 13: mod_base = OTHER; note = 2'-O-methyladenosine-3'-phosphate
  modified_base 14: mod_base = OTHER; note = 2'-fluorouridine-3'-phosphate
  modified_base 15: mod_base = OTHER; note = 2'-O-methyladenosine-3'-phosphate
  modified_base 16: mod_base = OTHER; note = 2'-fluoroguanosine-3'-phosphate
  modified_base 17: mod_base = OTHER; note = 2'-O-methyluridine-3'-phosphate
  modified_base 18: mod_base = OTHER; note = 2'-O-methylguanosine-3'-phosphate
  modified_base 19: mod_base = OTHER; note = 2'-O-methylguanosine-3'-phosphate
  modified_base 20: mod_base = OTHER; note = 2'-O-methylcytidine-3'-phosphate
  modified_base 21: mod_base = OTHER; note = 2'-O-methyluridine-3'-phosphorothioate
  modified_base 22: mod_base = OTHER; note = 2'-O-methylguanosine-3'- phosphorothioate
  modified_base 23: mod_base = OTHER; note = 2'-O-methylguanosine-3'-phosphate
ggcagaacatcaatagtggctgg

SEQ ID NO: 2550 - RNA, 21 nt, synthetic construct
  misc_feature 1..21: note = Description of Artificial Sequence: Synthetic oligonucleotide
  source 1..21: mol_type = other RNA
  modified_base 1: mod_base = OTHER; note = 2'-O-methylguanosine-3'- phosphorothioate
  modified_base 2: mod_base = OTHER; note = 2'-O-methyluridine-3'-phosphorothioate
  modified_base 3: mod_base = OTHER; note = 2'-O-methylguanosine-3'-phosphate
  modified_base 4: mod_base = OTHER; note = 2'-O-methylcytidine-3'-phosphate
  modified_base 5: mod_base = OTHER; note = 2'-O-methylcytidine-3'-phosphate
  modified_base 6: mod_base = OTHER; note = 2'-O-methyladenosine-3'-phosphate
  modified_base 7: mod_base = OTHER; note = 2'-fluoroguanosine-3'-phosphate
  modified_base 8: mod_base = OTHER; note = 2'-O-methylcytidine-3'-phosphate
  modified_base 9: mod_base = OTHER; note = 2'-fluorocytidine-3'-phosphate
  modified_base 10: mod_base = OTHER; note = 2'-fluoroadenosine-3'-phosphate
  modified_base 11: mod_base = OTHER; note = 2'-fluorocytidine-3'-phosphate
  modified_base 12: mod_base = OTHER; note = 2'-O-methyluridine-3'-phosphate
  modified_base 13: mod_base = OTHER; note = 2'-O-methyladenosine-3'-phosphate
  modified_base 14: mod_base = OTHER; note = 2'-O-methyluridine-3'-phosphate
  modified_base 15: mod_base = OTHER; note = 2'-O-methyluridine-3'-phosphate
  modified_base 16: mod_base = OTHER; note = 2'-O-methylguanosine-3'-phosphate
  modified_base 17: mod_base = OTHER; note = 2'-O-methyladenosine-3'-phosphate
  modified_base 18: mod_base = OTHER; note = 2'-O-methyluridine-3'-phosphate
  modified_base 19: mod_base = OTHER; note = 2'-O-methylguanosine-3'-phosphate
  modified_base 20: mod_base = OTHER; note = 2'-O-methyluridine-3'-phosphate
  modified_base 21: mod_base = OTHER; note = 2'-O-methyluridine-3'-phosphate attached to N-[tris(N-acetylgalactosamine-alkyl)-amidodecanoyl)]-4-hydr oxyprolinol Hyp-(N-acetylgalactosamine-alkyl)3
gtgccagccactattgatgtt

SEQ ID NO: 2551 - RNA, 23 nt, synthetic construct
  misc_feature 1..23: note = Description of Artificial Sequence: Synthetic oligonucleotide
  source 1..23: mol_type = other RNA
  modified_base 1: mod_base = OTHER; note = 2'-O-methyladenosine-3'- phosphorothioate
  modified_base 2: mod_base = OTHER; note = 2'-fluoroadenosine-3'-phosphorothioate
  modified_base 3: mod_base = OTHER; note = 2'-O-methylcytidine-3'-phosphate
  modified_base 4: mod_base = OTHER; note = 2'-O-methyladenosine-3'-phosphate
  modified_base 5: mod_base = OTHER; note = 2'-O-methyluridine-3'-phosphate
  modified_base 6: mod_base = OTHER; note = 2'-fluorocytidine-3'-phosphate
  modified_base 7: mod_base = OTHER; note = 2'-O-methyladenosine-3'-phosphate
  modified_base 8: mod_base = OTHER; note = 2'-fluoroadenosine-3'-phosphate
  modified_base 9: mod_base = OTHER; note = 2'-fluorouridine-3'-phosphate
  modified_base 10: mod_base = OTHER; note = 2'-O-methyladenosine-3'-phosphate
  modified_base 11: mod_base = OTHER; note = 2'-O-methylguanosine-3'-phosphate
  modified_base 12: mod_base = OTHER; note = 2'-O-methyluridine-3'-phosphate
  modified_base 13: mod_base = OTHER; note = 2'-O-methylguanosine-3'-phosphate
  modified_base 14: mod_base = OTHER; note = 2'-fluoroguanosine-3'-phosphate
  modified_base 15: mod_base = OTHER; note = 2'-O-methylcytidine-3'-phosphate
  modified_base 16: mod_base = OTHER; note = 2'-fluorouridine-3'-phosphate
  modified_base 17: mod_base = OTHER; note = 2'-O-methylguanosine-3'-phosphate
  modified_base 18: mod_base = OTHER; note = 2'-O-methylguanosine-3'-phosphate
  modified_base 19: mod_base = OTHER; note = 2'-O-methylcytidine-3'-phosphate
  modified_base 20: mod_base = OTHER; note = 2'-O-methyladenosine-3'-phosphate
  modified_base 21: mod_base = OTHER; note = 2'-O-methylcytidine-3'- phosphorothioate
  modified_base 22: mod_base = OTHER; note = 2'-O-methylcytidine-3'- phosphorothioate
  modified_base 23: mod_base = OTHER; note = 2'-O-methylcytidine-3'-phosphate
aacatcaatagtggctggcaccc

SEQ ID NO: 2552 - RNA, 21 nt, synthetic construct
  misc_feature 1..21: note = Description of Artificial Sequence: Synthetic oligonucleotide
  source 1..21: mol_type = other RNA
  modified_base 1: mod_base = OTHER; note = 2'-O-methylguanosine-3'- phosphorothioate
  modified_base 2: mod_base = OTHER; note = 2'-O-methylguanosine-3'- phosphorothioate
  modified_base 3: mod_base = OTHER; note = 2'-O-methyluridine-3'-phosphate
  modified_base 4: mod_base = OTHER; note = 2'-O-methylguanosine-3'-phosphate
  modified_base 5: mod_base = OTHER; note = 2'-O-methylcytidine-3'-phosphate
  modified_base 6: mod_base = OTHER; note = 2'-O-methylcytidine-3'-phosphate
  modified_base 7: mod_base = OTHER; note = 2'-fluoroadenosine-3'-phosphate
  modified_base 8: mod_base = OTHER; note = 2'-O-methylguanosine-3'-phosphate
  modified_base 9: mod_base = OTHER; note = 2'-fluorocytidine-3'-phosphate
  modified_base 10: mod_base = OTHER; note = 2'-fluorocytidine-3'-phosphate
  modified_base 11: mod_base = OTHER; note = 2'-fluoroadenosine-3'-phosphate
  modified_base 12: mod_base = OTHER; note = 2'-O-methylcytidine-3'-phosphate
  modified_base 13: mod_base = OTHER; note = 2'-O-methyluridine-3'-phosphate
  modified_base 14: mod_base = OTHER; note = 2'-O-methyladenosine-3'-phosphate
  modified_base 15: mod_base = OTHER; note = 2'-O-methyluridine-3'-phosphate
  modified_base 16: mod_base = OTHER; note = 2'-O-methyluridine-3'-phosphate
  modified_base 17: mod_base = OTHER; note = 2'-O-methylguanosine-3'-phosphate
  modified_base 18: mod_base = OTHER; note = 2'-O-methyladenosine-3'-phosphate
  modified_base 19: mod_base = OTHER; note = 2'-O-methyluridine-3'-phosphate
  modified_base 20: mod_base = OTHER; note = 2'-O-methylguanosine-3'-phosphate
  modified_base 21: mod_base = OTHER; note = 2'-O-methyluridine-3'-phosphate attached to N-[tris(N-acetylgalactosamine-alkyl)-amidodecanoyl)]-4-hydr oxyprolinol Hyp-(N-acetylgalactosamine-alkyl)3
ggtgccagccactattgatgt

SEQ ID NO: 2553 - RNA, 23 nt, synthetic construct
  misc_feature 1..23: note = Description of Artificial Sequence: Synthetic oligonucleotide
  source 1..23: mol_type = other RNA
  modified_base 1: mod_base = OTHER; note = 2'-O-methyladenosine-3'- phosphorothioate
  modified_base 2: mod_base = OTHER; note = 2'-fluorocytidine-3'-phosphorothioate
  modified_base 3: mod_base = OTHER; note = 2'-O-methyladenosine-3'-phosphate
  modified_base 4: mod_base = OTHER; note = 2'-O-methyluridine-3'-phosphate
  modified_base 5: mod_base = OTHER; note = 2'-O-methylcytidine-3'-phosphate
  modified_base 6: mod_base = OTHER; note = 2'-fluoroadenosine-3'-phosphate
  modified_base 7: mod_base = OTHER; note = 2'-O-methyladenosine-3'-phosphate
  modified_base 8: mod_base = OTHER; note = 2'-fluorouridine-3'-phosphate
  modified_base 9: mod_base = OTHER; note = 2'-fluoroadenosine-3'-phosphate
  modified_base 10: mod_base = OTHER; note = 2'-O-methylguanosine-3'-phosphate
  modified_base 11: mod_base = OTHER; note = 2'-O-methyluridine-3'-phosphate
  modified_base 12: mod_base = OTHER; note = 2'-O-methylguanosine-3'-phosphate
  modified_base 13: mod_base = OTHER; note = 2'-O-methylguanosine-3'-phosphate
  modified_base 14: mod_base = OTHER; note = 2'-fluorocytidine-3'-phosphate
  modified_base 15: mod_base = OTHER; note = 2'-O-methyluridine-3'-phosphate
  modified_base 16: mod_base = OTHER; note = 2'-fluoroguanosine-3'-phosphate
  modified_base 17: mod_base = OTHER; note = 2'-O-methylguanosine-3'-phosphate
  modified_base 18: mod_base = OTHER; note = 2'-O-methylcytidine-3'-phosphate
  modified_base 19: mod_base = OTHER; note = 2'-O-methyladenosine-3'-phosphate
  modified_base 20: mod_base = OTHER; note = 2'-O-methylcytidine-3'-phosphate
  modified_base 21: mod_base = OTHER; note = 2'-O-methylcytidine-3'- phosphorothioate
  modified_base 22: mod_base = OTHER; note = 2'-O-methylcytidine-3'- phosphorothioate
  modified_base 23: mod_base = OTHER; note = 2'-O-methylcytidine-3'-phosphate
acatcaatagtggctggcacccc

SEQ ID NO: 2554 - RNA, 21 nt, synthetic construct
  misc_feature 1..21: note = Description of Artificial Sequence: Synthetic oligonucleotide
  source 1..21: mol_type = other RNA
  modified_base 1: mod_base = OTHER; note = 2'-O-methyladenosine-3'- phosphorothioate
  modified_base 2: mod_base = OTHER; note = 2'-O-methylcytidine-3'- phosphorothioate
  modified_base 3: mod_base = OTHER; note = 2'-O-methyladenosine-3'-phosphate
  modified_base 4: mod_base = OTHER; note = 2'-O-methyladenosine-3'-phosphate
  modified_base 5: mod_base = OTHER; note = 2'-O-methylguanosine-3'-phosphate
  modified_base 6: mod_base = OTHER; note = 2'-O-methylguanosine-3'-phosphate
  modified_base 7: mod_base = OTHER; note = 2'-fluoroadenosine-3'-phosphate
  modified_base 8: mod_base = OTHER; note = 2'-O-methylcytidine-3'-phosphate
  modified_base 9: mod_base = OTHER; note = 2'-fluorocytidine-3'-phosphate
  modified_base 10: mod_base = OTHER; note = 2'-fluoroguanosine-3'-phosphate
  modified_base 11: mod_base = OTHER; note = 2'-fluoroadenosine-3'-phosphate
  modified_base 12: mod_base = OTHER; note = 2'-O-methylguanosine-3'-phosphate
  modified_base 13: mod_base = OTHER; note = 2'-O-methyladenosine-3'-phosphate
  modified_base 14: mod_base = OTHER; note = 2'-O-methyladenosine-3'-phosphate
  modified_base 15: mod_base = OTHER; note = 2'-O-methylguanosine-3'-phosphate
  modified_base 16: mod_base = OTHER; note = 2'-O-methyluridine-3'-phosphate
  modified_base 17: mod_base = OTHER; note = 2'-O-methylcytidine-3'-phosphate
  modified_base 18: mod_base = OTHER; note = 2'-O-methyladenosine-3'-phosphate
  modified_base 19: mod_base = OTHER; note = 2'-O-methylcytidine-3'-phosphate
  modified_base 20: mod_base = OTHER; note = 2'-O-methylcytidine-3'-phosphate
  modified_base 21: mod_base = OTHER; note = 2'-O-methyladenosine-3'-phosphate attached to N-[tris(N-acetylgalactosamine-alkyl)-amidodecanoyl)]-4-hydr oxyprolinol Hyp-(N-acetylgalactosamine-alkyl)3
acaaggaccgagaagtcacca

SEQ ID NO: 2555 - RNA, 23 nt, synthetic construct
  misc_feature 1..23: note = Description of Artificial Sequence: Synthetic oligonucleotide
  source 1..23: mol_type = other RNA
  modified_base 1: mod_base = OTHER; note = 2'-O-methyluridine-3'-phosphorothioate
  modified_base 2: mod_base = OTHER; note = 2'-fluoroguanosine-3'-phosphorothioate
  modified_base 3: mod_base = OTHER; note = 2'-O-methylguanosine-3'-phosphate
  modified_base 4: mod_base = OTHER; note = 2'-O-methyluridine-3'-phosphate
  modified_base 5: mod_base = OTHER; note = 2'-O-methylguanosine-3'-phosphate
  modified_base 6: mod_base = OTHER; note = 2'-fluoroadenosine-3'-phosphate
  modified_base 7: mod_base = OTHER; note = 2'-O-methylcytidine-3'-phosphate
  modified_base 8: mod_base = OTHER; note = 2'-fluorouridine-3'-phosphate
  modified_base 9: mod_base = OTHER; note = 2'-fluorouridine-3'-phosphate
  modified_base 10: mod_base = OTHER; note = 2'-O-methylcytidine-3'-phosphate
  modified_base 11: mod_base = OTHER; note = 2'-O-methyluridine-3'-phosphate
  modified_base 12: mod_base = OTHER; note = 2'-O-methylcytidine-3'-phosphate
  modified_base 13: mod_base = OTHER; note = 2'-O-methylguanosine-3'-phosphate
  modified_base 14: mod_base = OTHER; note = 2'-fluoroguanosine-3'-phosphate
  modified_base 15: mod_base = OTHER; note = 2'-O-methyluridine-3'-phosphate
  modified_base 16: mod_base = OTHER; note = 2'-fluorocytidine-3'-phosphate
  modified_base 17: mod_base = OTHER; note = 2'-O-methylcytidine-3'-phosphate
  modified_base 18: mod_base = OTHER; note = 2'-O-methyluridine-3'-phosphate
  modified_base 19: mod_base = OTHER; note = 2'-O-methyluridine-3'-phosphate
  modified_base 20: mod_base = OTHER; note = 2'-O-methylguanosine-3'-phosphate
  modified_base 21: mod_base = OTHER; note = 2'-O-methyluridine-3'-phosphorothioate
  modified_base 22: mod_base = OTHER; note = 2'-O-methyladenosine-3'- phosphorothioate
  modified_base 23: mod_base = OTHER; note = 2'-O-methylguanosine-3'-phosphate
tggtgacttctcggtccttgtag

SEQ ID NO: 2556 - RNA, 21 nt, synthetic construct
  misc_feature 1..21: note = Description of Artificial Sequence: Synthetic oligonucleotide
  source 1..21: mol_type = other RNA
  modified_base 1: mod_base = OTHER; note = 2'-O-methylcytidine-3'- phosphorothioate
  modified_base 2: mod_base = OTHER; note = 2'-O-methyladenosine-3'- phosphorothioate
  modified_base 3: mod_base = OTHER; note = 2'-O-methyladenosine-3'-phosphate
  modified_base 4: mod_base = OTHER; note = 2'-O-methylguanosine-3'-phosphate
  modified_base 5: mod_base = OTHER; note = 2'-O-methylguanosine-3'-phosphate
  modified_base 6: mod_base = OTHER; note = 2'-O-methyladenosine-3'-phosphate
  modified_base 7: mod_base = OTHER; note = 2'-fluorocytidine-3'-phosphate
  modified_base 8: mod_base = OTHER; note = 2'-O-methylcytidine-3'-phosphate
  modified_base 9: mod_base = OTHER; note = 2'-fluoroguanosine-3'-phosphate
  modified_base 10: mod_base = OTHER; note = 2'-fluoroadenosine-3'-phosphate
  modified_base 11: mod_base = OTHER; note = 2'-fluoroguanosine-3'-phosphate
  modified_base 12: mod_base = OTHER; note = 2'-O-methyladenosine-3'-phosphate
  modified_base 13: mod_base = OTHER; note = 2'-O-methyladenosine-3'-phosphate
  modified_base 14: mod_base = OTHER; note = 2'-O-methylguanosine-3'-phosphate
  modified_base 15: mod_base = OTHER; note = 2'-O-methyluridine-3'-phosphate
  modified_base 16: mod_base = OTHER; note = 2'-O-methylcytidine-3'-phosphate
  modified_base 17: mod_base = OTHER; note = 2'-O-methyladenosine-3'-phosphate
  modified_base 18: mod_base = OTHER; note = 2'-O-methylcytidine-3'-phosphate
  modified_base 19: mod_base = OTHER; note = 2'-O-methylcytidine-3'-phosphate
  modified_base 20: mod_base = OTHER; note = 2'-O-methyladenosine-3'-phosphate
  modified_base 21: mod_base = OTHER; note = 2'-O-methyladenosine-3'-phosphate attached to N-[tris(N-acetylgalactosamine-alkyl)-amidodecanoyl)]-4-hydr oxyprolinol Hyp-(N-acetylgalactosamine-alkyl)3
caaggaccgagaagtcaccaa

SEQ ID NO: 2557 - RNA, 23 nt, synthetic construct
  misc_feature 1..23: note = Description of Artificial Sequence: Synthetic oligonucleotide
  source 1..23: mol_type = other RNA
  modified_base 1: mod_base = OTHER; note = 2'-O-methyluridine-3'-phosphorothioate
  modified_base 2: mod_base = OTHER; note = 2'-fluorouridine -3'-phosphorothioate
  modified_base 3: mod_base = OTHER; note = 2'-O-methylguanosine-3'-phosphate
  modified_base 4: mod_base = OTHER; note = 2'-O-methylguanosine-3'-phosphate
  modified_base 5: mod_base = OTHER; note = 2'-O-methyluridine-3'-phosphate
  modified_base 6: mod_base = OTHER; note = 2'-fluoroguanosine-3'-phosphate
  modified_base 7: mod_base = OTHER; note = 2'-O-methyladenosine-3'-phosphate
  modified_base 8: mod_base = OTHER; note = 2'-fluorocytidine-3'-phosphate
  modified_base 9: mod_base = OTHER; note = 2'-fluorouridine-3'-phosphate
  modified_base 10: mod_base = OTHER; note = 2'-O-methyluridine-3'-phosphate
  modified_base 11: mod_base = OTHER; note = 2'-O-methylcytidine-3'-phosphate
  modified_base 12: mod_base = OTHER; note = 2'-O-methyluridine-3'-phosphate
  modified_base 13: mod_base = OTHER; note = 2'-O-methylcytidine-3'-phosphate
  modified_base 14: mod_base = OTHER; note = 2'-fluoroguanosine-3'-phosphate
  modified_base 15: mod_base = OTHER; note = 2'-O-methylguanosine-3'-phosphate
  modified_base 16: mod_base = OTHER; note = 2'-fluorouridine-3'-phosphate
  modified_base 17: mod_base = OTHER; note = 2'-O-methylcytidine-3'-phosphate
  modified_base 18: mod_base = OTHER; note = 2'-O-methylcytidine-3'-phosphate
  modified_base 19: mod_base = OTHER; note = 2'-O-methyluridine-3'-phosphate
  modified_base 20: mod_base = OTHER; note = 2'-O-methyluridine-3'-phosphate
  modified_base 21: mod_base = OTHER; note = 2'-O-methylguanosine-3'- phosphorothioate
  modified_base 22: mod_base = OTHER; note = 2'-O-methyluridine-3'-phosphorothioate
  modified_base 23: mod_base = OTHER; note = 2'-O-methyladenosine-3'-phosphate
ttggtgacttctcggtccttgta

SEQ ID NO: 2558 - RNA, 21 nt, synthetic construct
  misc_feature 1..21: note = Description of Artificial Sequence: Synthetic oligonucleotide
  source 1..21: mol_type = other RNA
  modified_base 1: mod_base = OTHER; note = 2'-O-methyladenosine-3'- phosphorothioate
  modified_base 2: mod_base = OTHER; note = 2'-O-methyluridine-3'-phosphorothioate
  modified_base 3: mod_base = OTHER; note = 2'-O-methylcytidine-3'-phosphate
  modified_base 4: mod_base = OTHER; note = 2'-O-methyluridine-3'-phosphate
  modified_base 5: mod_base = OTHER; note = 2'-O-methyladenosine-3'-phosphate
  modified_base 6: mod_base = OTHER; note = 2'-O-methylcytidine-3'-phosphate
  modified_base 7: mod_base = OTHER; note = 2'-fluoroadenosine-3'-phosphate
  modified_base 8: mod_base = OTHER; note = 2'-O-methyladenosine-3'-phosphate
  modified_base 9: mod_base = OTHER; note = 2'-fluoroguanosine-3'-phosphate
  modified_base 10: mod_base = OTHER; note = 2'-fluoroguanosine-3'-phosphate
  modified_base 11: mod_base = OTHER; note = 2'-fluoroadenosine-3'-phosphate
  modified_base 12: mod_base = OTHER; note = 2'-O-methylcytidine-3'-phosphate
  modified_base 13: mod_base = OTHER; note = 2'-O-methylcytidine-3'-phosphate
  modified_base 14: mod_base = OTHER; note = 2'-O-methylguanosine-3'-phosphate
  modified_base 15: mod_base = OTHER; note = 2'-O-methyladenosine-3'-phosphate
  modified_base 16: mod_base = OTHER; note = 2'-O-methylguanosine-3'-phosphate
  modified_base 17: mod_base = OTHER; note = 2'-O-methyladenosine-3'-phosphate
  modified_base 18: mod_base = OTHER; note = 2'-O-methyladenosine-3'-phosphate
  modified_base 19: mod_base = OTHER; note = 2'-O-methylguanosine-3'-phosphate
  modified_base 20: mod_base = OTHER; note = 2'-O-methyluridine-3'-phosphate
  modified_base 21: mod_base = OTHER; note = 2'-O-methylcytidine-3'-phosphate attached to N-[tris(N-acetylgalactosamine-alkyl)-amidodecanoyl)]-4-hydr oxyprolinol Hyp-(N-acetylgalactosamine-alkyl)3
atctacaaggaccgagaagtc

SEQ ID NO: 2559 - RNA, 23 nt, synthetic construct
  misc_feature 1..23: note = Description of Artificial Sequence: Synthetic oligonucleotide
  source 1..23: mol_type = other RNA
  modified_base 1: mod_base = OTHER; note = 2'-O-methylguanosine-3'- phosphorothioate
  modified_base 2: mod_base = OTHER; note = 2'-fluoroadenosine-3'-phosphorothioate
  modified_base 3: mod_base = OTHER; note = 2'-O-methylcytidine-3'-phosphate
  modified_base 4: mod_base = OTHER; note = 2'-O-methyluridine-3'-phosphate
  modified_base 5: mod_base = OTHER; note = 2'-O-methyluridine-3'-phosphate
  modified_base 6: mod_base = OTHER; note = 2'-fluorocytidine-3'-phosphate
  modified_base 7: mod_base = OTHER; note = 2'-O-methyluridine-3'-phosphate
  modified_base 8: mod_base = OTHER; note = 2'-fluorocytidine-3'-phosphate
  modified_base 9: mod_base = OTHER; note = 2'-fluoroguanosine-3'-phosphate
  modified_base 10: mod_base = OTHER; note = 2'-O-methylguanosine-3'-phosphate
  modified_base 11: mod_base = OTHER; note = 2'-O-methyluridine-3'-phosphate
  modified_base 12: mod_base = OTHER; note = 2'-O-methylcytidine-3'-phosphate
  modified_base 13: mod_base = OTHER; note = 2'-O-methylcytidine-3'-phosphate
  modified_base 14: mod_base = OTHER; note = 2'-fluorouridine-3'-phosphate
  modified_base 15: mod_base = OTHER; note = 2'-O-methyluridine-3'-phosphate
  modified_base 16: mod_base = OTHER; note = 2'-fluoroguanosine-3'-phosphate
  modified_base 17: mod_base = OTHER; note = 2'-O-methyluridine-3'-phosphate
  modified_base 18: mod_base = OTHER; note = 2'-O-methyladenosine-3'-phosphate
  modified_base 19: mod_base = OTHER; note = 2'-O-methylguanosine-3'-phosphate
  modified_base 20: mod_base = OTHER; note = 2'-O-methyladenosine-3'-phosphate
  modified_base 21: mod_base = OTHER; note = 2'-O-methyluridine-3'-phosphorothioate
  modified_base 22: mod_base = OTHER; note = 2'-O-methyladenosine-3'- phosphorothioate
  modified_base 23: mod_base = OTHER; note = 2'-O-methyluridine-3'-phosphate
gacttctcggtccttgtagatat

SEQ ID NO: 2560 - RNA, 21 nt, synthetic construct
  misc_feature 1..21: note = Description of Artificial Sequence: Synthetic oligonucleotide
  source 1..21: mol_type = other RNA
  modified_base 1: mod_base = OTHER; note = 2'-O-methyluridine-3'-phosphorothioate
  modified_base 2: mod_base = OTHER; note = 2'-O-methyladenosine-3'- phosphorothioate
  modified_base 3: mod_base = OTHER; note = 2'-O-methyluridine-3'-phosphate
  modified_base 4: mod_base = OTHER; note = 2'-O-methylcytidine-3'-phosphate
  modified_base 5: mod_base = OTHER; note = 2'-O-methyluridine-3'-phosphate
  modified_base 6: mod_base = OTHER; note = 2'-O-methyladenosine-3'-phosphate
  modified_base 7: mod_base = OTHER; note = 2'-fluorocytidine-3'-phosphate
  modified_base 8: mod_base = OTHER; note = 2'-O-methyladenosine-3'-phosphate
  modified_base 9: mod_base = OTHER; note = 2'-fluoroadenosine-3'-phosphate
  modified_base 10: mod_base = OTHER; note = 2'-fluoroguanosine-3'-phosphate
  modified_base 11: mod_base = OTHER; note = 2'-fluoroguanosine-3'-phosphate
  modified_base 12: mod_base = OTHER; note = 2'-O-methyladenosine-3'-phosphate
  modified_base 13: mod_base = OTHER; note = 2'-O-methylcytidine-3'-phosphate
  modified_base 14: mod_base = OTHER; note = 2'-O-methylcytidine-3'-phosphate
  modified_base 15: mod_base = OTHER; note = 2'-O-methylguanosine-3'-phosphate
  modified_base 16: mod_base = OTHER; note = 2'-O-methyladenosine-3'-phosphate
  modified_base 17: mod_base = OTHER; note = 2'-O-methylguanosine-3'-phosphate
  modified_base 18: mod_base = OTHER; note = 2'-O-methyladenosine-3'-phosphate
  modified_base 19: mod_base = OTHER; note = 2'-O-methyladenosine-3'-phosphate
  modified_base 20: mod_base = OTHER; note = 2'-O-methylguanosine-3'-phosphate
  modified_base 21: mod_base = OTHER; note = 2'-O-methyluridine-3'-phosphate attached to N-[tris(N-acetylgalactosamine-alkyl)-amidodecanoyl)]-4-hydr oxyprolinol Hyp-(N-acetylgalactosamine-alkyl)3
tatctacaaggaccgagaagt

SEQ ID NO: 2561 - RNA, 23 nt, synthetic construct
  misc_feature 1..23: note = Description of Artificial Sequence: Synthetic oligonucleotide
  source 1..23: mol_type = other RNA
  modified_base 1: mod_base = OTHER; note = 2'-O-methyladenosine-3'- phosphorothioate
  modified_base 2: mod_base = OTHER; note = 2'-fluorocytidine-3'-phosphorothioate
  modified_base 3: mod_base = OTHER; note = 2'-O-methyluridine-3'-phosphate
  modified_base 4: mod_base = OTHER; note = 2'-O-methyluridine-3'-phosphate
  modified_base 5: mod_base = OTHER; note = 2'-O-methylcytidine-3'-phosphate
  modified_base 6: mod_base = OTHER; note = 2'-fluorouridine-3'-phosphate
  modified_base 7: mod_base = OTHER; note = 2'-O-methylcytidine-3'-phosphate
  modified_base 8: mod_base = OTHER; note = 2'-fluoroguanosine-3'-phosphate
  modified_base 9: mod_base = OTHER; note = 2'-fluoroguanosine-3'-phosphate
  modified_base 10: mod_base = OTHER; note = 2'-O-methyluridine-3'-phosphate
  modified_base 11: mod_base = OTHER; note = 2'-O-methylcytidine-3'-phosphate
  modified_base 12: mod_base = OTHER; note = 2'-O-methylcytidine-3'-phosphate
  modified_base 13: mod_base = OTHER; note = 2'-O-methyluridine-3'-phosphate
  modified_base 14: mod_base = OTHER; note = 2'-fluorouridine-3'-phosphate
  modified_base 15: mod_base = OTHER; note = 2'-O-methylguanosine-3'-phosphate
  modified_base 16: mod_base = OTHER; note = 2'-fluorouridine-3'-phosphate
  modified_base 17: mod_base = OTHER; note = 2'-O-methyladenosine-3'-phosphate
  modified_base 18: mod_base = OTHER; note = 2'-O-methylguanosine-3'-phosphate
  modified_base 19: mod_base = OTHER; note = 2'-O-methyladenosine-3'-phosphate
  modified_base 20: mod_base = OTHER; note = 2'-O-methyluridine-3'-phosphate
  modified_base 21: mod_base = OTHER; note = 2'-O-methyladenosine-3'- phosphorothioate
  modified_base 22: mod_base = OTHER; note = 2'-O-methyluridine-3'-phosphorothioate
  modified_base 23: mod_base = OTHER; note = 2'-O-methyladenosine-3'-phosphate
acttctcggtccttgtagatata

SEQ ID NO: 2562 - RNA, 21 nt, synthetic construct
  misc_feature 1..21: note = Description of Artificial Sequence: Synthetic oligonucleotide
  source 1..21: mol_type = other RNA
  modified_base 1: mod_base = OTHER; note = 2'-O-methylcytidine-3'- phosphorothioate
  modified_base 2: mod_base = OTHER; note = 2'-O-methyladenosine-3'- phosphorothioate
  modified_base 3: mod_base = OTHER; note = 2'-O-methylguanosine-3'-phosphate
  modified_base 4: mod_base = OTHER; note = 2'-O-methyladenosine-3'-phosphate
  modified_base 5: mod_base = OTHER; note = 2'-O-methyladenosine-3'-phosphate
  modified_base 6: mod_base = OTHER; note = 2'-O-methyluridine-3'-phosphate
  modified_base 7: mod_base = OTHER; note = 2'-fluoroguanosine-3'-phosphate
  modified_base 8: mod_base = OTHER; note = 2'-O-methyluridine-3'-phosphate
  modified_base 9: mod_base = OTHER; note = 2'-fluoroguanosine-3'-phosphate
  modified_base 10: mod_base = OTHER; note = 2'-fluoroadenosine-3'-phosphate
  modified_base 11: mod_base = OTHER; note = 2'-fluoroadenosine-3'-phosphate
  modified_base 12: mod_base = OTHER; note = 2'-O-methyladenosine-3'-phosphate
  modified_base 13: mod_base = OTHER; note = 2'-O-methylguanosine-3'-phosphate
  modified_base 14: mod_base = OTHER; note = 2'-O-methyluridine-3'-phosphate
  modified_base 15: mod_base = OTHER; note = 2'-O-methylcytidine-3'-phosphate
  modified_base 16: mod_base = OTHER; note = 2'-O-methyladenosine-3'-phosphate
  modified_base 17: mod_base = OTHER; note = 2'-O-methyluridine-3'-phosphate
  modified_base 18: mod_base = OTHER; note = 2'-O-methylcytidine-3'-phosphate
  modified_base 19: mod_base = OTHER; note = 2'-O-methylguanosine-3'-phosphate
  modified_base 20: mod_base = OTHER; note = 2'-O-methyladenosine-3'-phosphate
  modified_base 21: mod_base = OTHER; note = 2'-O-methylcytidine-3'-phosphate attached to N-[tris(N-acetylgalactosamine-alkyl)-amidodecanoyl)]-4-hydr oxyprolinol Hyp-(N-acetylgalactosamine-alkyl)3
cagaatgtgaaagtcatcgac

SEQ ID NO: 2563 - RNA, 23 nt, synthetic construct
  misc_feature 1..23: note = Description of Artificial Sequence: Synthetic oligonucleotide
  source 1..23: mol_type = other RNA
  modified_base 1: mod_base = OTHER; note = 2'-O-methylguanosine-3'- phosphorothioate
  modified_base 2: mod_base = OTHER; note = 2'-fluorouridine -3'-phosphorothioate
  modified_base 3: mod_base = OTHER; note = 2'-O-methylcytidine-3'-phosphate
  modified_base 4: mod_base = OTHER; note = 2'-O-methylguanosine-3'-phosphate
  modified_base 5: mod_base = OTHER; note = 2'-O-methyladenosine-3'-phosphate
  modified_base 6: mod_base = OTHER; note = 2'-fluorouridine-3'-phosphate
  modified_base 7: mod_base = OTHER; note = 2'-O-methylguanosine-3'-phosphate
  modified_base 8: mod_base = OTHER; note = 2'-fluoroadenosine-3'-phosphate
  modified_base 9: mod_base = OTHER; note = 2'-fluorocytidine-3'-phosphate
  modified_base 10: mod_base = OTHER; note = 2'-O-methyluridine-3'-phosphate
  modified_base 11: mod_base = OTHER; note = 2'-O-methyluridine-3'-phosphate
  modified_base 12: mod_base = OTHER; note = 2'-O-methyluridine-3'-phosphate
  modified_base 13: mod_base = OTHER; note = 2'-O-methylcytidine-3'-phosphate
  modified_base 14: mod_base = OTHER; note = 2'-fluoroadenosine-3'-phosphate
  modified_base 15: mod_base = OTHER; note = 2'-O-methylcytidine-3'-phosphate
  modified_base 16: mod_base = OTHER; note = 2'-fluoroadenosine-3'-phosphate
  modified_base 17: mod_base = OTHER; note = 2'-O-methyluridine-3'-phosphate
  modified_base 18: mod_base = OTHER; note = 2'-O-methyluridine-3'-phosphate
  modified_base 19: mod_base = OTHER; note = 2'-O-methylcytidine-3'-phosphate
  modified_base 20: mod_base = OTHER; note = 2'-O-methyluridine-3'-phosphate
  modified_base 21: mod_base = OTHER; note = 2'-O-methylguanosine-3'- phosphorothioate
  modified_base 22: mod_base = OTHER; note = 2'-O-methylguanosine-3'- phosphorothioate
  modified_base 23: mod_base = OTHER; note = 2'-O-methylcytidine-3'-phosphate
gtcgatgactttcacattctggc

SEQ ID NO: 2564 - RNA, 21 nt, synthetic construct
  misc_feature 1..21: note = Description of Artificial Sequence: Synthetic oligonucleotide
  source 1..21: mol_type = other RNA
  modified_base 1: mod_base = OTHER; note = 2'-O-methyladenosine-3'- phosphorothioate
  modified_base 2: mod_base = OTHER; note = 2'-O-methylguanosine-3'- phosphorothioate
  modified_base 3: mod_base = OTHER; note = 2'-O-methyladenosine-3'-phosphate
  modified_base 4: mod_base = OTHER; note = 2'-O-methyladenosine-3'-phosphate
  modified_base 5: mod_base = OTHER; note = 2'-O-methyluridine-3'-phosphate
  modified_base 6: mod_base = OTHER; note = 2'-O-methylguanosine-3'-phosphate
  modified_base 7: mod_base = OTHER; note = 2'-fluorouridine-3'-phosphate
  modified_base 8: mod_base = OTHER; note = 2'-O-methylguanosine-3'-phosphate
  modified_base 9: mod_base = OTHER; note = 2'-fluoroadenosine-3'-phosphate
  modified_base 10: mod_base = OTHER; note = 2'-fluoroadenosine-3'-phosphate
  modified_base 11: mod_base = OTHER; note = 2'-fluoroadenosine-3'-phosphate
  modified_base 12: mod_base = OTHER; note = 2'-O-methylguanosine-3'-phosphate
  modified_base 13: mod_base = OTHER; note = 2'-O-methyluridine-3'-phosphate
  modified_base 14: mod_base = OTHER; note = 2'-O-methylcytidine-3'-phosphate
  modified_base 15: mod_base = OTHER; note = 2'-O-methyladenosine-3'-phosphate
  modified_base 16: mod_base = OTHER; note = 2'-O-methyluridine-3'-phosphate
  modified_base 17: mod_base = OTHER; note = 2'-O-methylcytidine-3'-phosphate
  modified_base 18: mod_base = OTHER; note = 2'-O-methylguanosine-3'-phosphate
  modified_base 19: mod_base = OTHER; note = 2'-O-methyladenosine-3'-phosphate
  modified_base 20: mod_base = OTHER; note = 2'-O-methylcytidine-3'-phosphate
  modified_base 21: mod_base = OTHER; note = 2'-O-methyladenosine-3'-phosphate attached to N-[tris(N-acetylgalactosamine-alkyl)-amidodecanoyl)]-4-hydr oxyprolinol Hyp-(N-acetylgalactosamine-alkyl)3
agaatgtgaaagtcatcgaca

SEQ ID NO: 2565 - RNA, 23 nt, synthetic construct
  misc_feature 1..23: note = Description of Artificial Sequence: Synthetic oligonucleotide
  source 1..23: mol_type = other RNA
  modified_base 1: mod_base = OTHER; note = 2'-O-methyluridine-3'-phosphorothioate
  modified_base 2: mod_base = OTHER; note = 2'-fluoroguanosine-3'-phosphorothioate
  modified_base 3: mod_base = OTHER; note = 2'-O-methyluridine-3'-phosphate
  modified_base 4: mod_base = OTHER; note = 2'-O-methylcytidine-3'-phosphate
  modified_base 5: mod_base = OTHER; note = 2'-O-methylguanosine-3'-phosphate
  modified_base 6: mod_base = OTHER; note = 2'-fluoroadenosine-3'-phosphate
  modified_base 7: mod_base = OTHER; note = 2'-O-methyluridine-3'-phosphate
  modified_base 8: mod_base = OTHER; note = 2'-fluoroguanosine-3'-phosphate
  modified_base 9: mod_base = OTHER; note = 2'-fluoroadenosine-3'-phosphate
  modified_base 10: mod_base = OTHER; note = 2'-O-methylcytidine-3'-phosphate
  modified_base 11: mod_base = OTHER; note = 2'-O-methyluridine-3'-phosphate
  modified_base 12: mod_base = OTHER; note = 2'-O-methyluridine-3'-phosphate
  modified_base 13: mod_base = OTHER; note = 2'-O-methyluridine-3'-phosphate
  modified_base 14: mod_base = OTHER; note = 2'-fluorocytidine-3'-phosphate
  modified_base 15: mod_base = OTHER; note = 2'-O-methyladenosine-3'-phosphate
  modified_base 16: mod_base = OTHER; note = 2'-fluorocytidine-3'-phosphate
  modified_base 17: mod_base = OTHER; note = 2'-O-methyladenosine-3'-phosphate
  modified_base 18: mod_base = OTHER; note = 2'-O-methyluridine-3'-phosphate
  modified_base 19: mod_base = OTHER; note = 2'-O-methyluridine-3'-phosphate
  modified_base 20: mod_base = OTHER; note = 2'-O-methylcytidine-3'-phosphate
  modified_base 21: mod_base = OTHER; note = 2'-O-methyluridine-3'-phosphorothioate
  modified_base 22: mod_base = OTHER; note = 2'-O-methylguanosine-3'- phosphorothioate
  modified_base 23: mod_base = OTHER; note = 2'-O-methylguanosine-3'-phosphate
tgtcgatgactttcacattctgg

SEQ ID NO: 2566 - RNA, 21 nt, synthetic construct
  misc_feature 1..21: note = Description of Artificial Sequence: Synthetic oligonucleotide
  source 1..21: mol_type = other RNA
  modified_base 1: mod_base = OTHER; note = 2'-O-methylguanosine-3'- phosphorothioate
  modified_base 2: mod_base = OTHER; note = 2'-O-methyluridine-3'-phosphorothioate
  modified_base 3: mod_base = OTHER; note = 2'-O-methylguanosine-3'-phosphate
  modified_base 4: mod_base = OTHER; note = 2'-O-methylcytidine-3'-phosphate
  modified_base 5: mod_base = OTHER; note = 2'-O-methylcytidine-3'-phosphate
  modified_base 6: mod_base = OTHER; note = 2'-O-methyladenosine-3'-phosphate
  modified_base 7: mod_base = OTHER; note = 2'-fluoroguanosine-3'-phosphate
  modified_base 8: mod_base = OTHER; note = 2'-O-methyladenosine-3'-phosphate
  modified_base 9: mod_base = OTHER; note = 2'-fluoroadenosine-3'-phosphate
  modified_base 10: mod_base = OTHER; note = 2'-fluorouridine-3'-phosphate
  modified_base 11: mod_base = OTHER; note = 2'-fluoroguanosine-3'-phosphate
  modified_base 12: mod_base = OTHER; note = 2'-O-methyluridine-3'-phosphate
  modified_base 13: mod_base = OTHER; note = 2'-O-methylguanosine-3'-phosphate
  modified_base 14: mod_base = OTHER; note = 2'-O-methyladenosine-3'-phosphate
  modified_base 15: mod_base = OTHER; note = 2'-O-methyladenosine-3'-phosphate
  modified_base 16: mod_base = OTHER; note = 2'-O-methyladenosine-3'-phosphate
  modified_base 17: mod_base = OTHER; note = 2'-O-methylguanosine-3'-phosphate
  modified_base 18: mod_base = OTHER; note = 2'-O-methyluridine-3'-phosphate
  modified_base 19: mod_base = OTHER; note = 2'-O-methylcytidine-3'-phosphate
  modified_base 20: mod_base = OTHER; note = 2'-O-methyladenosine-3'-phosphate
  modified_base 21: mod_base = OTHER; note = 2'-O-methyluridine-3'-phosphate attached to N-[tris(N-acetylgalactosamine-alkyl)-amidodecanoyl)]-4-hydr oxyprolinol Hyp-(N-acetylgalactosamine-alkyl)3
gtgccagaatgtgaaagtcat

SEQ ID NO: 2567 - RNA, 23 nt, synthetic construct
  misc_feature 1..23: note = Description of Artificial Sequence: Synthetic oligonucleotide
  source 1..23: mol_type = other RNA
  modified_base 1: mod_base = OTHER; note = 2'-O-methyladenosine-3'- phosphorothioate
  modified_base 2: mod_base = OTHER; note = 2'-fluorouridine -3'-phosphorothioate
  modified_base 3: mod_base = OTHER; note = 2'-O-methylguanosine-3'-phosphate
  modified_base 4: mod_base = OTHER; note = 2'-O-methyladenosine-3'-phosphate
  modified_base 5: mod_base = OTHER; note = 2'-O-methylcytidine-3'-phosphate
  modified_base 6: mod_base = OTHER; note = 2'-fluorouridine-3'-phosphate
  modified_base 7: mod_base = OTHER; note = 2'-O-methyluridine-3'-phosphate
  modified_base 8: mod_base = OTHER; note = 2'-fluorouridine-3'-phosphate
  modified_base 9: mod_base = OTHER; note = 2'-fluorocytidine-3'-phosphate
  modified_base 10: mod_base = OTHER; note = 2'-O-methyladenosine-3'-phosphate
  modified_base 11: mod_base = OTHER; note = 2'-O-methylcytidine-3'-phosphate
  modified_base 12: mod_base = OTHER; note = 2'-O-methyladenosine-3'-phosphate
  modified_base 13: mod_base = OTHER; note = 2'-O-methyluridine-3'-phosphate
  modified_base 14: mod_base = OTHER; note = 2'-fluorouridine-3'-phosphate
  modified_base 15: mod_base = OTHER; note = 2'-O-methylcytidine-3'-phosphate
  modified_base 16: mod_base = OTHER; note = 2'-fluorouridine-3'-phosphate
  modified_base 17: mod_base = OTHER; note = 2'-O-methylguanosine-3'-phosphate
  modified_base 18: mod_base = OTHER; note = 2'-O-methylguanosine-3'-phosphate
  modified_base 19: mod_base = OTHER; note = 2'-O-methylcytidine-3'-phosphate
  modified_base 20: mod_base = OTHER; note = 2'-O-methyladenosine-3'-phosphate
  modified_base 21: mod_base = OTHER; note = 2'-O-methylcytidine-3'- phosphorothioate
  modified_base 22: mod_base = OTHER; note = 2'-O-methylcytidine-3'- phosphorothioate
  modified_base 23: mod_base = OTHER; note = 2'-O-methylcytidine-3'-phosphate
atgactttcacattctggcaccc

SEQ ID NO: 2568 - RNA, 21 nt, synthetic construct
  misc_feature 1..21: note = Description of Artificial Sequence: Synthetic oligonucleotide
  source 1..21: mol_type = other RNA
  modified_base 1: mod_base = OTHER; note = 2'-O-methylguanosine-3'- phosphorothioate
  modified_base 2: mod_base = OTHER; note = 2'-O-methylguanosine-3'- phosphorothioate
  modified_base 3: mod_base = OTHER; note = 2'-O-methyluridine-3'-phosphate
  modified_base 4: mod_base = OTHER; note = 2'-O-methylguanosine-3'-phosphate
  modified_base 5: mod_base = OTHER; note = 2'-O-methylcytidine-3'-phosphate
  modified_base 6: mod_base = OTHER; note = 2'-O-methylcytidine-3'-phosphate
  modified_base 7: mod_base = OTHER; note = 2'-fluoroadenosine-3'-phosphate
  modified_base 8: mod_base = OTHER; note = 2'-O-methylguanosine-3'-phosphate
  modified_base 9: mod_base = OTHER; note = 2'-fluoroadenosine-3'-phosphate
  modified_base 10: mod_base = OTHER; note = 2'-fluoroadenosine-3'-phosphate
  modified_base 11: mod_base = OTHER; note = 2'-fluorouridine-3'-phosphate
  modified_base 12: mod_base = OTHER; note = 2'-O-methylguanosine-3'-phosphate
  modified_base 13: mod_base = OTHER; note = 2'-O-methyluridine-3'-phosphate
  modified_base 14: mod_base = OTHER; note = 2'-O-methylguanosine-3'-phosphate
  modified_base 15: mod_base = OTHER; note = 2'-O-methyladenosine-3'-phosphate
  modified_base 16: mod_base = OTHER; note = 2'-O-methyladenosine-3'-phosphate
  modified_base 17: mod_base = OTHER; note = 2'-O-methyladenosine-3'-phosphate
  modified_base 18: mod_base = OTHER; note = 2'-O-methylguanosine-3'-phosphate
  modified_base 19: mod_base = OTHER; note = 2'-O-methyluridine-3'-phosphate
  modified_base 20: mod_base = OTHER; note = 2'-O-methylcytidine-3'-phosphate
  modified_base 21: mod_base = OTHER; note = 2'-O-methyladenosine-3'-phosphate attached to N-[tris(N-acetylgalactosamine-alkyl)-amidodecanoyl)]-4-hydr oxyprolinol Hyp-(N-acetylgalactosamine-alkyl)3
ggtgccagaatgtgaaagtca

SEQ ID NO: 2569 - RNA, 23 nt, synthetic construct
  misc_feature 1..23: note = Description of Artificial Sequence: Synthetic oligonucleotide
  source 1..23: mol_type = other RNA
  modified_base 1: mod_base = OTHER; note = 2'-O-methyluridine-3'-phosphorothioate
  modified_base 2: mod_base = OTHER; note = 2'-fluoroguanosine-3'-phosphorothioate
  modified_base 3: mod_base = OTHER; note = 2'-O-methyladenosine-3'-phosphate
  modified_base 4: mod_base = OTHER; note = 2'-O-methylcytidine-3'-phosphate
  modified_base 5: mod_base = OTHER; note = 2'-O-methyluridine-3'-phosphate
  modified_base 6: mod_base = OTHER; note = 2'-fluorouridine-3'-phosphate
  modified_base 7: mod_base = OTHER; note = 2'-O-methyluridine-3'-phosphate
  modified_base 8: mod_base = OTHER; note = 2'-fluorocytidine-3'-phosphate
  modified_base 9: mod_base = OTHER; note = 2'-fluoroadenosine-3'-phosphate
  modified_base 10: mod_base = OTHER; note = 2'-O-methylcytidine-3'-phosphate
  modified_base 11: mod_base = OTHER; note = 2'-O-methyladenosine-3'-phosphate
  modified_base 12: mod_base = OTHER; note = 2'-O-methyluridine-3'-phosphate
  modified_base 13: mod_base = OTHER; note = 2'-O-methyluridine-3'-phosphate
  modified_base 14: mod_base = OTHER; note = 2'-fluorocytidine-3'-phosphate
  modified_base 15: mod_base = OTHER; note = 2'-O-methyluridine-3'-phosphate
  modified_base 16: mod_base = OTHER; note = 2'-fluoroguanosine-3'-phosphate
  modified_base 17: mod_base = OTHER; note = 2'-O-methylguanosine-3'-phosphate
  modified_base 18: mod_base = OTHER; note = 2'-O-methylcytidine-3'-phosphate
  modified_base 19: mod_base = OTHER; note = 2'-O-methyladenosine-3'-phosphate
  modified_base 20: mod_base = OTHER; note = 2'-O-methylcytidine-3'-phosphate
  modified_base 21: mod_base = OTHER; note = 2'-O-methylcytidine-3'- phosphorothioate
  modified_base 22: mod_base = OTHER; note = 2'-O-methylcytidine-3'- phosphorothioate
  modified_base 23: mod_base = OTHER; note = 2'-O-methyladenosine-3'-phosphate
tgactttcacattctggcaccca

SEQ ID NO: 2570 - RNA, 21 nt, synthetic construct
  misc_feature 1..21: note = Description of Artificial Sequence: Synthetic oligonucleotide
  source 1..21: mol_type = other RNA
  modified_base 1: mod_base = OTHER; note = 2'-O-methyladenosine-3'- phosphorothioate
  modified_base 2: mod_base = OTHER; note = 2'-O-methylguanosine-3'- phosphorothioate
  modified_base 3: mod_base = OTHER; note = 2'-O-methyladenosine-3'-phosphate
  modified_base 4: mod_base = OTHER; note = 2'-O-methyluridine-3'-phosphate
  modified_base 5: mod_base = OTHER; note = 2'-O-methylguanosine-3'-phosphate
  modified_base 6: mod_base = OTHER; note = 2'-O-methyluridine-3'-phosphate
  modified_base 7: mod_base = OTHER; note = 2'-fluorocytidine-3'-phosphate
  modified_base 8: mod_base = OTHER; note = 2'-O-methylcytidine-3'-phosphate
  modified_base 9: mod_base = OTHER; note = 2'-fluorouridine-3'-phosphate
  modified_base 10: mod_base = OTHER; note = 2'-fluorocytidine-3'-phosphate
  modified_base 11: mod_base = OTHER; note = 2'-fluoroguanosine-3'-phosphate
  modified_base 12: mod_base = OTHER; note = 2'-O-methyladenosine-3'-phosphate
  modified_base 13: mod_base = OTHER; note = 2'-O-methylguanosine-3'-phosphate
  modified_base 14: mod_base = OTHER; note = 2'-O-methyladenosine-3'-phosphate
  modified_base 15: mod_base = OTHER; note = 2'-O-methyluridine-3'-phosphate
  modified_base 16: mod_base = OTHER; note = 2'-O-methyladenosine-3'-phosphate
  modified_base 17: mod_base = OTHER; note = 2'-O-methylcytidine-3'-phosphate
  modified_base 18: mod_base = OTHER; note = 2'-O-methyluridine-3'-phosphate
  modified_base 19: mod_base = OTHER; note = 2'-O-methyladenosine-3'-phosphate
  modified_base 20: mod_base = OTHER; note = 2'-O-methyladenosine-3'-phosphate
  modified_base 21: mod_base = OTHER; note = 2'-O-methyladenosine-3'-phosphate attached to N-[tris(N-acetylgalactosamine-alkyl)-amidodecanoyl)]-4-hydr oxyprolinol Hyp-(N-acetylgalactosamine-alkyl)3
agatgtcctcgagatactaaa

SEQ ID NO: 2571 - RNA, 23 nt, synthetic construct
  misc_feature 1..23: note = Description of Artificial Sequence: Synthetic oligonucleotide
  source 1..23: mol_type = other RNA
  modified_base 1: mod_base = OTHER; note = 2'-O-methyluridine-3'-phosphorothioate
  modified_base 2: mod_base = OTHER; note = 2'-fluorouridine -3'-phosphorothioate
  modified_base 3: mod_base = OTHER; note = 2'-O-methyluridine-3'-phosphate
  modified_base 4: mod_base = OTHER; note = 2'-O-methyladenosine-3'-phosphate
  modified_base 5: mod_base = OTHER; note = 2'-O-methylguanosine-3'-phosphate
  modified_base 6: mod_base = OTHER; note = 2'-fluorouridine-3'-phosphate
  modified_base 7: mod_base = OTHER; note = 2'-O-methyladenosine-3'-phosphate
  modified_base 8: mod_base = OTHER; note = 2'-fluorouridine-3'-phosphate
  modified_base 9: mod_base = OTHER; note = 2'-fluorocytidine-3'-phosphate
  modified_base 10: mod_base = OTHER; note = 2'-O-methyluridine-3'-phosphate
  modified_base 11: mod_base = OTHER; note = 2'-O-methylcytidine-3'-phosphate
  modified_base 12: mod_base = OTHER; note = 2'-O-methylguanosine-3'-phosphate
  modified_base 13: mod_base = OTHER; note = 2'-O-methyladenosine-3'-phosphate
  modified_base 14: mod_base = OTHER; note = 2'-fluoroguanosine-3'-phosphate
  modified_base 15: mod_base = OTHER; note = 2'-O-methylguanosine-3'-phosphate
  modified_base 16: mod_base = OTHER; note = 2'-fluoroadenosine-3'-phosphate
  modified_base 17: mod_base = OTHER; note = 2'-O-methylcytidine-3'-phosphate
  modified_base 18: mod_base = OTHER; note = 2'-O-methyladenosine-3'-phosphate
  modified_base 19: mod_base = OTHER; note = 2'-O-methyluridine-3'-phosphate
  modified_base 20: mod_base = OTHER; note = 2'-O-methylcytidine-3'-phosphate
  modified_base 21: mod_base = OTHER; note = 2'-O-methyluridine-3'-phosphorothioate
  modified_base 22: mod_base = OTHER; note = 2'-O-methyluridine-3'-phosphorothioate
  modified_base 23: mod_base = OTHER; note = 2'-O-methylguanosine-3'-phosphate
tttagtatctcgaggacatcttg

SEQ ID NO: 2572 - RNA, 21 nt, synthetic construct
  misc_feature 1..21: note = Description of Artificial Sequence: Synthetic oligonucleotide
  source 1..21: mol_type = other RNA
  modified_base 1: mod_base = OTHER; note = 2'-O-methylguanosine-3'- phosphorothioate
  modified_base 2: mod_base = OTHER; note = 2'-O-methyladenosine-3'- phosphorothioate
  modified_base 3: mod_base = OTHER; note = 2'-O-methyluridine-3'-phosphate
  modified_base 4: mod_base = OTHER; note = 2'-O-methylguanosine-3'-phosphate
  modified_base 5: mod_base = OTHER; note = 2'-O-methyluridine-3'-phosphate
  modified_base 6: mod_base = OTHER; note = 2'-O-methylcytidine-3'-phosphate
  modified_base 7: mod_base = OTHER; note = 2'-fluorocytidine-3'-phosphate
  modified_base 8: mod_base = OTHER; note = 2'-O-methyluridine-3'-phosphate
  modified_base 9: mod_base = OTHER; note = 2'-fluorocytidine-3'-phosphate
  modified_base 10: mod_base = OTHER; note = 2'-fluoroguanosine-3'-phosphate
  modified_base 11: mod_base = OTHER; note = 2'-fluoroadenosine-3'-phosphate
  modified_base 12: mod_base = OTHER; note = 2'-O-methylguanosine-3'-phosphate
  modified_base 13: mod_base = OTHER; note = 2'-O-methyladenosine-3'-phosphate
  modified_base 14: mod_base = OTHER; note = 2'-O-methyluridine-3'-phosphate
  modified_base 15: mod_base = OTHER; note = 2'-O-methyladenosine-3'-phosphate
  modified_base 16: mod_base = OTHER; note = 2'-O-methylcytidine-3'-phosphate
  modified_base 17: mod_base = OTHER; note = 2'-O-methyluridine-3'-phosphate
  modified_base 18: mod_base = OTHER; note = 2'-O-methyladenosine-3'-phosphate
  modified_base 19: mod_base = OTHER; note = 2'-O-methyladenosine-3'-phosphate
  modified_base 20: mod_base = OTHER; note = 2'-O-methyladenosine-3'-phosphate
  modified_base 21: mod_base = OTHER; note = 2'-O-methylguanosine-3'-phosphate attached to N-[tris(N-acetylgalactosamine-alkyl)-amidodecanoyl)]-4-hydr oxyprolinol Hyp-(N-acetylgalactosamine-alkyl)3
gatgtcctcgagatactaaag

SEQ ID NO: 2573 - RNA, 23 nt, synthetic construct
  misc_feature 1..23: note = Description of Artificial Sequence: Synthetic oligonucleotide
  source 1..23: mol_type = other RNA
  modified_base 1: mod_base = OTHER; note = 2'-O-methylcytidine-3'- phosphorothioate
  modified_base 2: mod_base = OTHER; note = 2'-fluorouridine -3'-phosphorothioate
  modified_base 3: mod_base = OTHER; note = 2'-O-methyluridine-3'-phosphate
  modified_base 4: mod_base = OTHER; note = 2'-O-methyluridine-3'-phosphate
  modified_base 5: mod_base = OTHER; note = 2'-O-methyladenosine-3'-phosphate
  modified_base 6: mod_base = OTHER; note = 2'-fluoroguanosine-3'-phosphate
  modified_base 7: mod_base = OTHER; note = 2'-O-methyluridine-3'-phosphate
  modified_base 8: mod_base = OTHER; note = 2'-fluoroadenosine-3'-phosphate
  modified_base 9: mod_base = OTHER; note = 2'-fluorouridine-3'-phosphate
  modified_base 10: mod_base = OTHER; note = 2'-O-methylcytidine-3'-phosphate
  modified_base 11: mod_base = OTHER; note = 2'-O-methyluridine-3'-phosphate
  modified_base 12: mod_base = OTHER; note = 2'-O-methylcytidine-3'-phosphate
  modified_base 13: mod_base = OTHER; note = 2'-O-methylguanosine-3'-phosphate
  modified_base 14: mod_base = OTHER; note = 2'-fluoroadenosine-3'-phosphate
  modified_base 15: mod_base = OTHER; note = 2'-O-methylguanosine-3'-phosphate
  modified_base 16: mod_base = OTHER; note = 2'-fluoroguanosine-3'-phosphate
  modified_base 17: mod_base = OTHER; note = 2'-O-methyladenosine-3'-phosphate
  modified_base 18: mod_base = OTHER; note = 2'-O-methylcytidine-3'-phosphate
  modified_base 19: mod_base = OTHER; note = 2'-O-methyladenosine-3'-phosphate
  modified_base 20: mod_base = OTHER; note = 2'-O-methyluridine-3'-phosphate
  modified_base 21: mod_base = OTHER; note = 2'-O-methylcytidine-3'- phosphorothioate
  modified_base 22: mod_base = OTHER; note = 2'-O-methyluridine-3'-phosphorothioate
  modified_base 23: mod_base = OTHER; note = 2'-O-methyluridine-3'-phosphate
ctttagtatctcgaggacatctt

SEQ ID NO: 2574 - RNA, 21 nt, synthetic construct
  misc_feature 1..21: note = Description of Artificial Sequence: Synthetic oligonucleotide
  source 1..21: mol_type = other RNA
  modified_base 1: mod_base = OTHER; note = 2'-O-methyluridine-3'-phosphorothioate
  modified_base 2: mod_base = OTHER; note = 2'-O-methyluridine-3'-phosphorothioate
  modified_base 3: mod_base = OTHER; note = 2'-O-methylcytidine-3'-phosphate
  modified_base 4: mod_base = OTHER; note = 2'-O-methyladenosine-3'-phosphate
  modified_base 5: mod_base = OTHER; note = 2'-O-methyladenosine-3'-phosphate
  modified_base 6: mod_base = OTHER; note = 2'-O-methylguanosine-3'-phosphate
  modified_base 7: mod_base = OTHER; note = 2'-fluoroadenosine-3'-phosphate
  modified_base 8: mod_base = OTHER; note = 2'-O-methyluridine-3'-phosphate
  modified_base 9: mod_base = OTHER; note = 2'-fluoroguanosine-3'-phosphate
  modified_base 10: mod_base = OTHER; note = 2'-fluorouridine-3'-phosphate
  modified_base 11: mod_base = OTHER; note = 2'-fluorocytidine-3'-phosphate
  modified_base 12: mod_base = OTHER; note = 2'-O-methylcytidine-3'-phosphate
  modified_base 13: mod_base = OTHER; note = 2'-O-methyluridine-3'-phosphate
  modified_base 14: mod_base = OTHER; note = 2'-O-methylcytidine-3'-phosphate
  modified_base 15: mod_base = OTHER; note = 2'-O-methylguanosine-3'-phosphate
  modified_base 16: mod_base = OTHER; note = 2'-O-methyladenosine-3'-phosphate
  modified_base 17: mod_base = OTHER; note = 2'-O-methylguanosine-3'-phosphate
  modified_base 18: mod_base = OTHER; note = 2'-O-methyladenosine-3'-phosphate
  modified_base 19: mod_base = OTHER; note = 2'-O-methyluridine-3'-phosphate
  modified_base 20: mod_base = OTHER; note = 2'-O-methyladenosine-3'-phosphate
  modified_base 21: mod_base = OTHER; note = 2'-O-methylcytidine-3'-phosphate attached to N-[tris(N-acetylgalactosamine-alkyl)-amidodecanoyl)]-4-hydr oxyprolinol Hyp-(N-acetylgalactosamine-alkyl)3
ttcaagatgtcctcgagatac

SEQ ID NO: 2575 - RNA, 23 nt, synthetic construct
  misc_feature 1..23: note = Description of Artificial Sequence: Synthetic oligonucleotide
  source 1..23: mol_type = other RNA
  modified_base 1: mod_base = OTHER; note = 2'-O-methylguanosine-3'- phosphorothioate
  modified_base 2: mod_base = OTHER; note = 2'-fluorouridine -3'-phosphorothioate
  modified_base 3: mod_base = OTHER; note = 2'-O-methyladenosine-3'-phosphate
  modified_base 4: mod_base = OTHER; note = 2'-O-methyluridine-3'-phosphate
  modified_base 5: mod_base = OTHER; note = 2'-O-methylcytidine-3'-phosphate
  modified_base 6: mod_base = OTHER; note = 2'-fluorouridine-3'-phosphate
  modified_base 7: mod_base = OTHER; note = 2'-O-methylcytidine-3'-phosphate
  modified_base 8: mod_base = OTHER; note = 2'-fluoroguanosine-3'-phosphate
  modified_base 9: mod_base = OTHER; note = 2'-fluoroadenosine-3'-phosphate
  modified_base 10: mod_base = OTHER; note = 2'-O-methylguanosine-3'-phosphate
  modified_base 11: mod_base = OTHER; note = 2'-O-methylguanosine-3'-phosphate
  modified_base 12: mod_base = OTHER; note = 2'-O-methyladenosine-3'-phosphate
  modified_base 13: mod_base = OTHER; note = 2'-O-methylcytidine-3'-phosphate
  modified_base 14: mod_base = OTHER; note = 2'-fluoroadenosine-3'-phosphate
  modified_base 15: mod_base = OTHER; note = 2'-O-methyluridine-3'-phosphate
  modified_base 16: mod_base = OTHER; note = 2'-fluorocytidine-3'-phosphate
  modified_base 17: mod_base = OTHER; note = 2'-O-methyluridine-3'-phosphate
  modified_base 18: mod_base = OTHER; note = 2'-O-methyluridine-3'-phosphate
  modified_base 19: mod_base = OTHER; note = 2'-O-methylguanosine-3'-phosphate
  modified_base 20: mod_base = OTHER; note = 2'-O-methyladenosine-3'-phosphate
  modified_base 21: mod_base = OTHER; note = 2'-O-methyladenosine-3'- phosphorothioate
  modified_base 22: mod_base = OTHER; note = 2'-O-methylcytidine-3'- phosphorothioate
  modified_base 23: mod_base = OTHER; note = 2'-O-methyladenosine-3'-phosphate
gtatctcgaggacatcttgaaca

SEQ ID NO: 2576 - RNA, 21 nt, synthetic construct
  misc_feature 1..21: note = Description of Artificial Sequence: Synthetic oligonucleotide
  source 1..21: mol_type = other RNA
  modified_base 1: mod_base = OTHER; note = 2'-O-methylguanosine-3'- phosphorothioate
  modified_base 2: mod_base = OTHER; note = 2'-O-methyluridine-3'-phosphorothioate
  modified_base 3: mod_base = OTHER; note = 2'-O-methyluridine-3'-phosphate
  modified_base 4: mod_base = OTHER; note = 2'-O-methylcytidine-3'-phosphate
  modified_base 5: mod_base = OTHER; note = 2'-O-methyladenosine-3'-phosphate
  modified_base 6: mod_base = OTHER; note = 2'-O-methyladenosine-3'-phosphate
  modified_base 7: mod_base = OTHER; note = 2'-fluoroguanosine-3'-phosphate
  modified_base 8: mod_base = OTHER; note = 2'-O-methyladenosine-3'-phosphate
  modified_base 9: mod_base = OTHER; note = 2'-fluorouridine-3'-phosphate
  modified_base 10: mod_base = OTHER; note = 2'-fluoroguanosine-3'-phosphate
  modified_base 11: mod_base = OTHER; note = 2'-fluorouridine-3'-phosphate
  modified_base 12: mod_base = OTHER; note = 2'-O-methylcytidine-3'-phosphate
  modified_base 13: mod_base = OTHER; note = 2'-O-methylcytidine-3'-phosphate
  modified_base 14: mod_base = OTHER; note = 2'-O-methyluridine-3'-phosphate
  modified_base 15: mod_base = OTHER; note = 2'-O-methylcytidine-3'-phosphate
  modified_base 16: mod_base = OTHER; note = 2'-O-methylguanosine-3'-phosphate
  modified_base 17: mod_base = OTHER; note = 2'-O-methyladenosine-3'-phosphate
  modified_base 18: mod_base = OTHER; note = 2'-O-methylguanosine-3'-phosphate
  modified_base 19: mod_base = OTHER; note = 2'-O-methyladenosine-3'-phosphate
  modified_base 20: mod_base = OTHER; note = 2'-O-methyluridine-3'-phosphate
  modified_base 21: mod_base = OTHER; note = 2'-O-methyladenosine-3'-phosphate attached to N-[tris(N-acetylgalactosamine-alkyl)-amidodecanoyl)]-4-hydr oxyprolinol Hyp-(N-acetylgalactosamine-alkyl)3
gttcaagatgtcctcgagata

SEQ ID NO: 2577 - RNA, 23 nt, synthetic construct
  misc_feature 1..23: note = Description of Artificial Sequence: Synthetic oligonucleotide
  source 1..23: mol_type = other RNA
  modified_base 1: mod_base = OTHER; note = 2'-O-methyluridine-3'-phosphorothioate
  modified_base 2: mod_base = OTHER; note = 2'-fluoroadenosine-3'-phosphorothioate
  modified_base 3: mod_base = OTHER; note = 2'-O-methyluridine-3'-phosphate
  modified_base 4: mod_base = OTHER; note = 2'-O-methylcytidine-3'-phosphate
  modified_base 5: mod_base = OTHER; note = 2'-O-methyluridine-3'-phosphate
  modified_base 6: mod_base = OTHER; note = 2'-fluorocytidine-3'-phosphate
  modified_base 7: mod_base = OTHER; note = 2'-O-methylguanosine-3'-phosphate
  modified_base 8: mod_base = OTHER; note = 2'-fluoroadenosine-3'-phosphate
  modified_base 9: mod_base = OTHER; note = 2'-fluoroguanosine-3'-phosphate
  modified_base 10: mod_base = OTHER; note = 2'-O-methylguanosine-3'-phosphate
  modified_base 11: mod_base = OTHER; note = 2'-O-methyladenosine-3'-phosphate
  modified_base 12: mod_base = OTHER; note = 2'-O-methylcytidine-3'-phosphate
  modified_base 13: mod_base = OTHER; note = 2'-O-methyladenosine-3'-phosphate
  modified_base 14: mod_base = OTHER; note = 2'-fluorouridine-3'-phosphate
  modified_base 15: mod_base = OTHER; note = 2'-O-methylcytidine-3'-phosphate
  modified_base 16: mod_base = OTHER; note = 2'-fluorouridine-3'-phosphate
  modified_base 17: mod_base = OTHER; note = 2'-O-methyluridine-3'-phosphate
  modified_base 18: mod_base = OTHER; note = 2'-O-methylguanosine-3'-phosphate
  modified_base 19: mod_base = OTHER; note = 2'-O-methyladenosine-3'-phosphate
  modified_base 20: mod_base = OTHER; note = 2'-O-methyladenosine-3'-phosphate
  modified_base 21: mod_base = OTHER; note = 2'-O-methylcytidine-3'- phosphorothioate
  modified_base 22: mod_base = OTHER; note = 2'-O-methyladenosine-3'- phosphorothioate
  modified_base 23: mod_base = OTHER; note = 2'-O-methylcytidine-3'-phosphate
tatctcgaggacatcttgaacac

SEQ ID NO: 2578 - RNA, 21 nt, synthetic construct
  misc_feature 1..21: note = Description of Artificial Sequence: Synthetic oligonucleotide
  source 1..21: mol_type = other RNA
  modified_base 1: mod_base = OTHER; note = 2'-O-methylguanosine-3'- phosphorothioate
  modified_base 2: mod_base = OTHER; note = 2'-O-methyluridine-3'-phosphorothioate
  modified_base 3: mod_base = OTHER; note = 2'-O-methylguanosine-3'-phosphate
  modified_base 4: mod_base = OTHER; note = 2'-O-methylguanosine-3'-phosphate
  modified_base 5: mod_base = OTHER; note = 2'-O-methyladenosine-3'-phosphate
  modified_base 6: mod_base = OTHER; note = 2'-O-methylcytidine-3'-phosphate
  modified_base 7: mod_base = OTHER; note = 2'-fluorouridine-3'-phosphate
  modified_base 8: mod_base = OTHER; note = 2'-O-methyluridine-3'-phosphate
  modified_base 9: mod_base = OTHER; note = 2'-fluoroguanosine-3'-phosphate
  modified_base 10: mod_base = OTHER; note = 2'-fluorocytidine-3'-phosphate
  modified_base 11: mod_base = OTHER; note = 2'-fluorouridine-3'-phosphate
  modified_base 12: mod_base = OTHER; note = 2'-O-methylguanosine-3'-phosphate
  modified_base 13: mod_base = OTHER; note = 2'-O-methylcytidine-3'-phosphate
  modified_base 14: mod_base = OTHER; note = 2'-O-methyladenosine-3'-phosphate
  modified_base 15: mod_base = OTHER; note = 2'-O-methyluridine-3'-phosphate
  modified_base 16: mod_base = OTHER; note = 2'-O-methyladenosine-3'-phosphate
  modified_base 17: mod_base = OTHER; note = 2'-O-methyluridine-3'-phosphate
  modified_base 18: mod_base = OTHER; note = 2'-O-methylguanosine-3'-phosphate
  modified_base 19: mod_base = OTHER; note = 2'-O-methyluridine-3'-phosphate
  modified_base 20: mod_base = OTHER; note = 2'-O-methylguanosine-3'-phosphate
  modified_base 21: mod_base = OTHER; note = 2'-O-methylguanosine-3'-phosphate attached to N-[tris(N-acetylgalactosamine-alkyl)-amidodecanoyl)]-4-hydr oxyprolinol Hyp-(N-acetylgalactosamine-alkyl)3
gtggacttgctgcatatgtgg

SEQ ID NO: 2579 - RNA, 23 nt, synthetic construct
  misc_feature 1..23: note = Description of Artificial Sequence: Synthetic oligonucleotide
  source 1..23: mol_type = other RNA
  modified_base 1: mod_base = OTHER; note = 2'-O-methylcytidine-3'- phosphorothioate
  modified_base 2: mod_base = OTHER; note = 2'-fluorocytidine-3'-phosphorothioate
  modified_base 3: mod_base = OTHER; note = 2'-O-methyladenosine-3'-phosphate
  modified_base 4: mod_base = OTHER; note = 2'-O-methylcytidine-3'-phosphate
  modified_base 5: mod_base = OTHER; note = 2'-O-methyladenosine-3'-phosphate
  modified_base 6: mod_base = OTHER; note = 2'-fluorouridine-3'-phosphate
  modified_base 7: mod_base = OTHER; note = 2'-O-methyladenosine-3'-phosphate
  modified_base 8: mod_base = OTHER; note = 2'-fluorouridine-3'-phosphate
  modified_base 9: mod_base = OTHER; note = 2'-fluoroguanosine-3'-phosphate
  modified_base 10: mod_base = OTHER; note = 2'-O-methylcytidine-3'-phosphate
  modified_base 11: mod_base = OTHER; note = 2'-O-methyladenosine-3'-phosphate
  modified_base 12: mod_base = OTHER; note = 2'-O-methylguanosine-3'-phosphate
  modified_base 13: mod_base = OTHER; note = 2'-O-methylcytidine-3'-phosphate
  modified_base 14: mod_base = OTHER; note = 2'-fluoroadenosine-3'-phosphate
  modified_base 15: mod_base = OTHER; note = 2'-O-methyladenosine-3'-phosphate
  modified_base 16: mod_base = OTHER; note = 2'-fluoroguanosine-3'-phosphate
  modified_base 17: mod_base = OTHER; note = 2'-O-methyluridine-3'-phosphate
  modified_base 18: mod_base = OTHER; note = 2'-O-methylcytidine-3'-phosphate
  modified_base 19: mod_base = OTHER; note = 2'-O-methylcytidine-3'-phosphate
  modified_base 20: mod_base = OTHER; note = 2'-O-methyladenosine-3'-phosphate
  modified_base 21: mod_base = OTHER; note = 2'-O-methylcytidine-3'- phosphorothioate
  modified_base 22: mod_base = OTHER; note = 2'-O-methyluridine-3'-phosphorothioate
  modified_base 23: mod_base = OTHER; note = 2'-O-methylguanosine-3'-phosphate
ccacatatgcagcaagtccactg

SEQ ID NO: 2580 - RNA, 21 nt, synthetic construct
  misc_feature 1..21: note = Description of Artificial Sequence: Synthetic oligonucleotide
  source 1..21: mol_type = other RNA
  modified_base 1: mod_base = OTHER; note = 2'-O-methyluridine-3'-phosphorothioate
  modified_base 2: mod_base = OTHER; note = 2'-O-methylguanosine-3'- phosphorothioate
  modified_base 3: mod_base = OTHER; note = 2'-O-methylguanosine-3'-phosphate
  modified_base 4: mod_base = OTHER; note = 2'-O-methyladenosine-3'-phosphate
  modified_base 5: mod_base = OTHER; note = 2'-O-methylcytidine-3'-phosphate
  modified_base 6: mod_base = OTHER; note = 2'-O-methyluridine-3'-phosphate
  modified_base 7: mod_base = OTHER; note = 2'-fluorouridine-3'-phosphate
  modified_base 8: mod_base = OTHER; note = 2'-O-methylguanosine-3'-phosphate
  modified_base 9: mod_base = OTHER; note = 2'-fluorocytidine-3'-phosphate
  modified_base 10: mod_base = OTHER; note = 2'-fluorouridine-3'-phosphate
  modified_base 11: mod_base = OTHER; note = 2'-fluoroguanosine-3'-phosphate
  modified_base 12: mod_base = OTHER; note = 2'-O-methylcytidine-3'-phosphate
  modified_base 13: mod_base = OTHER; note = 2'-O-methyladenosine-3'-phosphate
  modified_base 14: mod_base = OTHER; note = 2'-O-methyluridine-3'-phosphate
  modified_base 15: mod_base = OTHER; note = 2'-O-methyladenosine-3'-phosphate
  modified_base 16: mod_base = OTHER; note = 2'-O-methyluridine-3'-phosphate
  modified_base 17: mod_base = OTHER; note = 2'-O-methylguanosine-3'-phosphate
  modified_base 18: mod_base = OTHER; note = 2'-O-methyluridine-3'-phosphate
  modified_base 19: mod_base = OTHER; note = 2'-O-methylguanosine-3'-phosphate
  modified_base 20: mod_base = OTHER; note = 2'-O-methylguanosine-3'-phosphate
  modified_base 21: mod_base = OTHER; note = 2'-O-methylcytidine-3'-phosphate attached to N-[tris(N-acetylgalactosamine-alkyl)-amidodecanoyl)]-4-hydr oxyprolinol Hyp-(N-acetylgalactosamine-alkyl)3
tggacttgctgcatatgtggc

SEQ ID NO: 2581 - RNA, 23 nt, synthetic construct
  misc_feature 1..23: note = Description of Artificial Sequence: Synthetic oligonucleotide
  source 1..23: mol_type = other RNA
  modified_base 1: mod_base = OTHER; note = 2'-O-methylguanosine-3'- phosphorothioate
  modified_base 2: mod_base = OTHER; note = 2'-fluorocytidine-3'-phosphorothioate
  modified_base 3: mod_base = OTHER; note = 2'-O-methylcytidine-3'-phosphate
  modified_base 4: mod_base = OTHER; note = 2'-O-methyladenosine-3'-phosphate
  modified_base 5: mod_base = OTHER; note = 2'-O-methylcytidine-3'-phosphate
  modified_base 6: mod_base = OTHER; note = 2'-fluoroadenosine-3'-phosphate
  modified_base 7: mod_base = OTHER; note = 2'-O-methyluridine-3'-phosphate
  modified_base 8: mod_base = OTHER; note = 2'-fluoroadenosine-3'-phosphate
  modified_base 9: mod_base = OTHER; note = 2'-fluorouridine-3'-phosphate
  modified_base 10: mod_base = OTHER; note = 2'-O-methylguanosine-3'-phosphate
  modified_base 11: mod_base = OTHER; note = 2'-O-methylcytidine-3'-phosphate
  modified_base 12: mod_base = OTHER; note = 2'-O-methyladenosine-3'-phosphate
  modified_base 13: mod_base = OTHER; note = 2'-O-methylguanosine-3'-phosphate
  modified_base 14: mod_base = OTHER; note = 2'-fluorocytidine-3'-phosphate
  modified_base 15: mod_base = OTHER; note = 2'-O-methyladenosine-3'-phosphate
  modified_base 16: mod_base = OTHER; note = 2'-fluoroadenosine-3'-phosphate
  modified_base 17: mod_base = OTHER; note = 2'-O-methylguanosine-3'-phosphate
  modified_base 18: mod_base = OTHER; note = 2'-O-methyluridine-3'-phosphate
  modified_base 19: mod_base = OTHER; note = 2'-O-methylcytidine-3'-phosphate
  modified_base 20: mod_base = OTHER; note = 2'-O-methylcytidine-3'-phosphate
  modified_base 21: mod_base = OTHER; note = 2'-O-methyladenosine-3'- phosphorothioate
  modified_base 22: mod_base = OTHER; note = 2'-O-methylcytidine-3'- phosphorothioate
  modified_base 23: mod_base = OTHER; note = 2'-O-methyluridine-3'-phosphate
gccacatatgcagcaagtccact

SEQ ID NO: 2582 - RNA, 21 nt, synthetic construct
  misc_feature 1..21: note = Description of Artificial Sequence: Synthetic oligonucleotide
  source 1..21: mol_type = other RNA
  modified_base 1: mod_base = OTHER; note = 2'-O-methylguanosine-3'- phosphorothioate
  modified_base 2: mod_base = OTHER; note = 2'-O-methyladenosine-3'- phosphorothioate
  modified_base 3: mod_base = OTHER; note = 2'-O-methylcytidine-3'-phosphate
  modified_base 4: mod_base = OTHER; note = 2'-O-methyladenosine-3'-phosphate
  modified_base 5: mod_base = OTHER; note = 2'-O-methylguanosine-3'-phosphate
  modified_base 6: mod_base = OTHER; note = 2'-O-methyluridine-3'-phosphate
  modified_base 7: mod_base = OTHER; note = 2'-fluoroguanosine-3'-phosphate
  modified_base 8: mod_base = OTHER; note = 2'-O-methylguanosine-3'-phosphate
  modified_base 9: mod_base = OTHER; note = 2'-fluoroadenosine-3'-phosphate
  modified_base 10: mod_base = OTHER; note = 2'-fluorocytidine-3'-phosphate
  modified_base 11: mod_base = OTHER; note = 2'-fluorouridine-3'-phosphate
  modified_base 12: mod_base = OTHER; note = 2'-O-methyluridine-3'-phosphate
  modified_base 13: mod_base = OTHER; note = 2'-O-methylguanosine-3'-phosphate
  modified_base 14: mod_base = OTHER; note = 2'-O-methylcytidine-3'-phosphate
  modified_base 15: mod_base = OTHER; note = 2'-O-methyluridine-3'-phosphate
  modified_base 16: mod_base = OTHER; note = 2'-O-methylguanosine-3'-phosphate
  modified_base 17: mod_base = OTHER; note = 2'-O-methylcytidine-3'-phosphate
  modified_base 18: mod_base = OTHER; note = 2'-O-methyladenosine-3'-phosphate
  modified_base 19: mod_base = OTHER; note = 2'-O-methyluridine-3'-phosphate
  modified_base 20: mod_base = OTHER; note = 2'-O-methyladenosine-3'-phosphate
  modified_base 21: mod_base = OTHER; note = 2'-O-methyluridine-3'-phosphate attached to N-[tris(N-acetylgalactosamine-alkyl)-amidodecanoyl)]-4-hydr oxyprolinol Hyp-(N-acetylgalactosamine-alkyl)3
gacagtggacttgctgcatat

SEQ ID NO: 2583 - RNA, 23 nt, synthetic construct
  misc_feature 1..23: note = Description of Artificial Sequence: Synthetic oligonucleotide
  source 1..23: mol_type = other RNA
  modified_base 1: mod_base = OTHER; note = 2'-O-methyladenosine-3'- phosphorothioate
  modified_base 2: mod_base = OTHER; note = 2'-fluorouridine -3'-phosphorothioate
  modified_base 3: mod_base = OTHER; note = 2'-O-methyladenosine-3'-phosphate
  modified_base 4: mod_base = OTHER; note = 2'-O-methyluridine-3'-phosphate
  modified_base 5: mod_base = OTHER; note = 2'-O-methylguanosine-3'-phosphate
  modified_base 6: mod_base = OTHER; note = 2'-fluorocytidine-3'-phosphate
  modified_base 7: mod_base = OTHER; note = 2'-O-methyladenosine-3'-phosphate
  modified_base 8: mod_base = OTHER; note = 2'-fluoroguanosine-3'-phosphate
  modified_base 9: mod_base = OTHER; note = 2'-fluorocytidine-3'-phosphate
  modified_base 10: mod_base = OTHER; note = 2'-O-methyladenosine-3'-phosphate
  modified_base 11: mod_base = OTHER; note = 2'-O-methyladenosine-3'-phosphate
  modified_base 12: mod_base = OTHER; note = 2'-O-methylguanosine-3'-phosphate
  modified_base 13: mod_base = OTHER; note = 2'-O-methyluridine-3'-phosphate
  modified_base 14: mod_base = OTHER; note = 2'-fluorocytidine-3'-phosphate
  modified_base 15: mod_base = OTHER; note = 2'-O-methylcytidine-3'-phosphate
  modified_base 16: mod_base = OTHER; note = 2'-fluoroadenosine-3'-phosphate
  modified_base 17: mod_base = OTHER; note = 2'-O-methylcytidine-3'-phosphate
  modified_base 18: mod_base = OTHER; note = 2'-O-methyluridine-3'-phosphate
  modified_base 19: mod_base = OTHER; note = 2'-O-methylguanosine-3'-phosphate
  modified_base 20: mod_base = OTHER; note = 2'-O-methyluridine-3'-phosphate
  modified_base 21: mod_base = OTHER; note = 2'-O-methylcytidine-3'- phosphorothioate
  modified_base 22: mod_base = OTHER; note = 2'-O-methylguanosine-3'- phosphorothioate
  modified_base 23: mod_base = OTHER; note = 2'-O-methyluridine-3'-phosphate
atatgcagcaagtccactgtcgt

SEQ ID NO: 2584 - RNA, 21 nt, synthetic construct
  misc_feature 1..21: note = Description of Artificial Sequence: Synthetic oligonucleotide
  source 1..21: mol_type = other RNA
  modified_base 1: mod_base = OTHER; note = 2'-O-methylcytidine-3'- phosphorothioate
  modified_base 2: mod_base = OTHER; note = 2'-O-methylguanosine-3'- phosphorothioate
  modified_base 3: mod_base = OTHER; note = 2'-O-methyladenosine-3'-phosphate
  modified_base 4: mod_base = OTHER; note = 2'-O-methylcytidine-3'-phosphate
  modified_base 5: mod_base = OTHER; note = 2'-O-methyladenosine-3'-phosphate
  modified_base 6: mod_base = OTHER; note = 2'-O-methylguanosine-3'-phosphate
  modified_base 7: mod_base = OTHER; note = 2'-fluorouridine-3'-phosphate
  modified_base 8: mod_base = OTHER; note = 2'-O-methylguanosine-3'-phosphate
  modified_base 9: mod_base = OTHER; note = 2'-fluoroguanosine-3'-phosphate
  modified_base 10: mod_base = OTHER; note = 2'-fluoroadenosine-3'-phosphate
  modified_base 11: mod_base = OTHER; note = 2'-fluorocytidine-3'-phosphate
  modified_base 12: mod_base = OTHER; note = 2'-O-methyluridine-3'-phosphate
  modified_base 13: mod_base = OTHER; note = 2'-O-methyluridine-3'-phosphate
  modified_base 14: mod_base = OTHER; note = 2'-O-methylguanosine-3'-phosphate
  modified_base 15: mod_base = OTHER; note = 2'-O-methylcytidine-3'-phosphate
  modified_base 16: mod_base = OTHER; note = 2'-O-methyluridine-3'-phosphate
  modified_base 17: mod_base = OTHER; note = 2'-O-methylguanosine-3'-phosphate
  modified_base 18: mod_base = OTHER; note = 2'-O-methylcytidine-3'-phosphate
  modified_base 19: mod_base = OTHER; note = 2'-O-methyladenosine-3'-phosphate
  modified_base 20: mod_base = OTHER; note = 2'-O-methyluridine-3'-phosphate
  modified_base 21: mod_base = OTHER; note = 2'-O-methyladenosine-3'-phosphate attached to N-[tris(N-acetylgalactosamine-alkyl)-amidodecanoyl)]-4-hydr oxyprolinol Hyp-(N-acetylgalactosamine-alkyl)3
cgacagtggacttgctgcata

SEQ ID NO: 2585 - RNA, 23 nt, synthetic construct
  misc_feature 1..23: note = Description of Artificial Sequence: Synthetic oligonucleotide
  source 1..23: mol_type = other RNA
  modified_base 1: mod_base = OTHER; note = 2'-O-methyluridine-3'-phosphorothioate
  modified_base 2: mod_base = OTHER; note = 2'-fluoroadenosine-3'-phosphorothioate
  modified_base 3: mod_base = OTHER; note = 2'-O-methyluridine-3'-phosphate
  modified_base 4: mod_base = OTHER; note = 2'-O-methylguanosine-3'-phosphate
  modified_base 5: mod_base = OTHER; note = 2'-O-methylcytidine-3'-phosphate
  modified_base 6: mod_base = OTHER; note = 2'-fluoroadenosine-3'-phosphate
  modified_base 7: mod_base = OTHER; note = 2'-O-methylguanosine-3'-phosphate
  modified_base 8: mod_base = OTHER; note = 2'-fluorocytidine-3'-phosphate
  modified_base 9: mod_base = OTHER; note = 2'-fluoroadenosine-3'-phosphate
  modified_base 10: mod_base = OTHER; note = 2'-O-methyladenosine-3'-phosphate
  modified_base 11: mod_base = OTHER; note = 2'-O-methylguanosine-3'-phosphate
  modified_base 12: mod_base = OTHER; note = 2'-O-methyluridine-3'-phosphate
  modified_base 13: mod_base = OTHER; note = 2'-O-methylcytidine-3'-phosphate
  modified_base 14: mod_base = OTHER; note = 2'-fluorocytidine-3'-phosphate
  modified_base 15: mod_base = OTHER; note = 2'-O-methyladenosine-3'-phosphate
  modified_base 16: mod_base = OTHER; note = 2'-fluorocytidine-3'-phosphate
  modified_base 17: mod_base = OTHER; note = 2'-O-methyluridine-3'-phosphate
  modified_base 18: mod_base = OTHER; note = 2'-O-methylguanosine-3'-phosphate
  modified_base 19: mod_base = OTHER; note = 2'-O-methyluridine-3'-phosphate
  modified_base 20: mod_base = OTHER; note = 2'-O-methylcytidine-3'-phosphate
  modified_base 21: mod_base = OTHER; note = 2'-O-methylguanosine-3'- phosphorothioate
  modified_base 22: mod_base = OTHER; note = 2'-O-methyluridine-3'-phosphorothioate
  modified_base 23: mod_base = OTHER; note = 2'-O-methylcytidine-3'-phosphate
tatgcagcaagtccactgtcgtc

SEQ ID NO: 2586 - RNA, 21 nt, synthetic construct
  misc_feature 1..21: note = Description of Artificial Sequence: Synthetic oligonucleotide
  source 1..21: mol_type = other RNA
  modified_base 1: mod_base = OTHER; note = 2'-O-methyladenosine-3'- phosphorothioate
  modified_base 2: mod_base = OTHER; note = 2'-O-methyladenosine-3'- phosphorothioate
  modified_base 3: mod_base = OTHER; note = 2'-O-methylcytidine-3'-phosphate
  modified_base 4: mod_base = OTHER; note = 2'-O-methylcytidine-3'-phosphate
  modified_base 5: mod_base = OTHER; note = 2'-O-methyladenosine-3'-phosphate
  modified_base 6: mod_base = OTHER; note = 2'-O-methylguanosine-3'-phosphate
  modified_base 7: mod_base = OTHER; note = 2'-fluorouridine-3'-phosphate
  modified_base 8: mod_base = OTHER; note = 2'-O-methyladenosine-3'-phosphate
  modified_base 9: mod_base = OTHER; note = 2'-fluorocytidine-3'-phosphate
  modified_base 10: mod_base = OTHER; note = 2'-fluorouridine-3'-phosphate
  modified_base 11: mod_base = OTHER; note = 2'-fluorouridine-3'-phosphate
  modified_base 12: mod_base = OTHER; note = 2'-O-methyluridine-3'-phosphate
  modified_base 13: mod_base = OTHER; note = 2'-O-methyladenosine-3'-phosphate
  modified_base 14: mod_base = OTHER; note = 2'-O-methyluridine-3'-phosphate
  modified_base 15: mod_base = OTHER; note = 2'-O-methylcytidine-3'-phosphate
  modified_base 16: mod_base = OTHER; note = 2'-O-methyladenosine-3'-phosphate
  modified_base 17: mod_base = OTHER; note = 2'-O-methyluridine-3'-phosphate
  modified_base 18: mod_base = OTHER; note = 2'-O-methyluridine-3'-phosphate
  modified_base 19: mod_base = OTHER; note = 2'-O-methyluridine-3'-phosphate
  modified_base 20: mod_base = OTHER; note = 2'-O-methyluridine-3'-phosphate
  modified_base 21: mod_base = OTHER; note = 2'-O-methylcytidine-3'-phosphate attached to N-[tris(N-acetylgalactosamine-alkyl)-amidodecanoyl)]-4-hydr oxyprolinol Hyp-(N-acetylgalactosamine-alkyl)3
aaccagtactttatcattttc

SEQ ID NO: 2587 - RNA, 23 nt, synthetic construct
  misc_feature 1..23: note = Description of Artificial Sequence: Synthetic oligonucleotide
  source 1..23: mol_type = other RNA
  modified_base 1: mod_base = OTHER; note = 2'-O-methylguanosine-3'- phosphorothioate
  modified_base 2: mod_base = OTHER; note = 2'-fluoroadenosine-3'-phosphorothioate
  modified_base 3: mod_base = OTHER; note = 2'-O-methyladenosine-3'-phosphate
  modified_base 4: mod_base = OTHER; note = 2'-O-methyladenosine-3'-phosphate
  modified_base 5: mod_base = OTHER; note = 2'-O-methyladenosine-3'-phosphate
  modified_base 6: mod_base = OTHER; note = 2'-fluorouridine-3'-phosphate
  modified_base 7: mod_base = OTHER; note = 2'-O-methylguanosine-3'-phosphate
  modified_base 8: mod_base = OTHER; note = 2'-fluoroadenosine-3'-phosphate
  modified_base 9: mod_base = OTHER; note = 2'-fluorouridine-3'-phosphate
  modified_base 10: mod_base = OTHER; note = 2'-O-methyladenosine-3'-phosphate
  modified_base 11: mod_base = OTHER; note = 2'-O-methyladenosine-3'-phosphate
  modified_base 12: mod_base = OTHER; note = 2'-O-methyladenosine-3'-phosphate
  modified_base 13: mod_base = OTHER; note = 2'-O-methylguanosine-3'-phosphate
  modified_base 14: mod_base = OTHER; note = 2'-fluorouridine-3'-phosphate
  modified_base 15: mod_base = OTHER; note = 2'-O-methyladenosine-3'-phosphate
  modified_base 16: mod_base = OTHER; note = 2'-fluorocytidine-3'-phosphate
  modified_base 17: mod_base = OTHER; note = 2'-O-methyluridine-3'-phosphate
  modified_base 18: mod_base = OTHER; note = 2'-O-methylguanosine-3'-phosphate
  modified_base 19: mod_base = OTHER; note = 2'-O-methylguanosine-3'-phosphate
  modified_base 20: mod_base = OTHER; note = 2'-O-methyluridine-3'-phosphate
  modified_base 21: mod_base = OTHER; note = 2'-O-methyluridine-3'-phosphorothioate
  modified_base 22: mod_base = OTHER; note = 2'-O-methyluridine-3'-phosphorothioate
  modified_base 23: mod_base = OTHER; note = 2'-O-methylcytidine-3'-phosphate
gaaaatgataaagtactggtttc

SEQ ID NO: 2588 - RNA, 21 nt, synthetic construct
  misc_feature 1..21: note = Description of Artificial Sequence: Synthetic oligonucleotide
  source 1..21: mol_type = other RNA
  modified_base 1: mod_base = OTHER; note = 2'-O-methyladenosine-3'- phosphorothioate
  modified_base 2: mod_base = OTHER; note = 2'-O-methylcytidine-3'- phosphorothioate
  modified_base 3: mod_base = OTHER; note = 2'-O-methylcytidine-3'-phosphate
  modified_base 4: mod_base = OTHER; note = 2'-O-methyladenosine-3'-phosphate
  modified_base 5: mod_base = OTHER; note = 2'-O-methylguanosine-3'-phosphate
  modified_base 6: mod_base = OTHER; note = 2'-O-methyluridine-3'-phosphate
  modified_base 7: mod_base = OTHER; note = 2'-fluoroadenosine-3'-phosphate
  modified_base 8: mod_base = OTHER; note = 2'-O-methylcytidine-3'-phosphate
  modified_base 9: mod_base = OTHER; note = 2'-fluorouridine-3'-phosphate
  modified_base 10: mod_base = OTHER; note = 2'-fluorouridine-3'-phosphate
  modified_base 11: mod_base = OTHER; note = 2'-fluorouridine-3'-phosphate
  modified_base 12: mod_base = OTHER; note = 2'-O-methyladenosine-3'-phosphate
  modified_base 13: mod_base = OTHER; note = 2'-O-methyluridine-3'-phosphate
  modified_base 14: mod_base = OTHER; note = 2'-O-methylcytidine-3'-phosphate
  modified_base 15: mod_base = OTHER; note = 2'-O-methyladenosine-3'-phosphate
  modified_base 16: mod_base = OTHER; note = 2'-O-methyluridine-3'-phosphate
  modified_base 17: mod_base = OTHER; note = 2'-O-methyluridine-3'-phosphate
  modified_base 18: mod_base = OTHER; note = 2'-O-methyluridine-3'-phosphate
  modified_base 19: mod_base = OTHER; note = 2'-O-methyluridine-3'-phosphate
  modified_base 20: mod_base = OTHER; note = 2'-O-methylcytidine-3'-phosphate
  modified_base 21: mod_base = OTHER; note = 2'-O-methyluridine-3'-phosphate attached to N-[tris(N-acetylgalactosamine-alkyl)-amidodecanoyl)]-4-hydr oxyprolinol Hyp-(N-acetylgalactosamine-alkyl)3
accagtactttatcattttct

SEQ ID NO: 2589 - RNA, 23 nt, synthetic construct
  misc_feature 1..23: note = Description of Artificial Sequence: Synthetic oligonucleotide
  source 1..23: mol_type = other RNA
  modified_base 1: mod_base = OTHER; note = 2'-O-methyladenosine-3'- phosphorothioate
  modified_base 2: mod_base = OTHER; note = 2'-fluoroguanosine-3'-phosphorothioate
  modified_base 3: mod_base = OTHER; note = 2'-O-methyladenosine-3'-phosphate
  modified_base 4: mod_base = OTHER; note = 2'-O-methyladenosine-3'-phosphate
  modified_base 5: mod_base = OTHER; note = 2'-O-methyladenosine-3'-phosphate
  modified_base 6: mod_base = OTHER; note = 2'-fluoroadenosine-3'-phosphate
  modified_base 7: mod_base = OTHER; note = 2'-O-methyluridine-3'-phosphate
  modified_base 8: mod_base = OTHER; note = 2'-fluoroguanosine-3'-phosphate
  modified_base 9: mod_base = OTHER; note = 2'-fluoroadenosine-3'-phosphate
  modified_base 10: mod_base = OTHER; note = 2'-O-methyluridine-3'-phosphate
  modified_base 11: mod_base = OTHER; note = 2'-O-methyladenosine-3'-phosphate
  modified_base 12: mod_base = OTHER; note = 2'-O-methyladenosine-3'-phosphate
  modified_base 13: mod_base = OTHER; note = 2'-O-methyladenosine-3'-phosphate
  modified_base 14: mod_base = OTHER; note = 2'-fluoroguanosine-3'-phosphate
  modified_base 15: mod_base = OTHER; note = 2'-O-methyluridine-3'-phosphate
  modified_base 16: mod_base = OTHER; note = 2'-fluoroadenosine-3'-phosphate
  modified_base 17: mod_base = OTHER; note = 2'-O-methylcytidine-3'-phosphate
  modified_base 18: mod_base = OTHER; note = 2'-O-methyluridine-3'-phosphate
  modified_base 19: mod_base = OTHER; note = 2'-O-methylguanosine-3'-phosphate
  modified_base 20: mod_base = OTHER; note = 2'-O-methylguanosine-3'-phosphate
  modified_base 21: mod_base = OTHER; note = 2'-O-methyluridine-3'-phosphorothioate
  modified_base 22: mod_base = OTHER; note = 2'-O-methyluridine-3'-phosphorothioate
  modified_base 23: mod_base = OTHER; note = 2'-O-methyluridine-3'-phosphate
agaaaatgataaagtactggttt

SEQ ID NO: 2590 - RNA, 21 nt, synthetic construct
  misc_feature 1..21: note = Description of Artificial Sequence: Synthetic oligonucleotide
  source 1..21: mol_type = other RNA
  modified_base 1: mod_base = OTHER; note = 2'-O-methyluridine-3'-phosphorothioate
  modified_base 2: mod_base = OTHER; note = 2'-O-methyluridine-3'-phosphorothioate
  modified_base 3: mod_base = OTHER; note = 2'-O-methylguanosine-3'-phosphate
  modified_base 4: mod_base = OTHER; note = 2'-O-methyladenosine-3'-phosphate
  modified_base 5: mod_base = OTHER; note = 2'-O-methyladenosine-3'-phosphate
  modified_base 6: mod_base = OTHER; note = 2'-O-methyladenosine-3'-phosphate
  modified_base 7: mod_base = OTHER; note = 2'-fluorocytidine-3'-phosphate
  modified_base 8: mod_base = OTHER; note = 2'-O-methylcytidine-3'-phosphate
  modified_base 9: mod_base = OTHER; note = 2'-fluoroadenosine-3'-phosphate
  modified_base 10: mod_base = OTHER; note = 2'-fluoroguanosine-3'-phosphate
  modified_base 11: mod_base = OTHER; note = 2'-fluorouridine-3'-phosphate
  modified_base 12: mod_base = OTHER; note = 2'-O-methyladenosine-3'-phosphate
  modified_base 13: mod_base = OTHER; note = 2'-O-methylcytidine-3'-phosphate
  modified_base 14: mod_base = OTHER; note = 2'-O-methyluridine-3'-phosphate
  modified_base 15: mod_base = OTHER; note = 2'-O-methyluridine-3'-phosphate
  modified_base 16: mod_base = OTHER; note = 2'-O-methyluridine-3'-phosphate
  modified_base 17: mod_base = OTHER; note = 2'-O-methyladenosine-3'-phosphate
  modified_base 18: mod_base = OTHER; note = 2'-O-methyluridine-3'-phosphate
  modified_base 19: mod_base = OTHER; note = 2'-O-methylcytidine-3'-phosphate
  modified_base 20: mod_base = OTHER; note = 2'-O-methyladenosine-3'-phosphate
  modified_base 21: mod_base = OTHER; note = 2'-O-methyluridine-3'-phosphate attached to N-[tris(N-acetylgalactosamine-alkyl)-amidodecanoyl)]-4-hydr oxyprolinol Hyp-(N-acetylgalactosamine-alkyl)3
ttgaaaccagtactttatcat

SEQ ID NO: 2591 - RNA, 23 nt, synthetic construct
  misc_feature 1..23: note = Description of Artificial Sequence: Synthetic oligonucleotide
  source 1..23: mol_type = other RNA
  modified_base 1: mod_base = OTHER; note = 2'-O-methyladenosine-3'- phosphorothioate
  modified_base 2: mod_base = OTHER; note = 2'-fluorouridine -3'-phosphorothioate
  modified_base 3: mod_base = OTHER; note = 2'-O-methylguanosine-3'-phosphate
  modified_base 4: mod_base = OTHER; note = 2'-O-methyladenosine-3'-phosphate
  modified_base 5: mod_base = OTHER; note = 2'-O-methyluridine-3'-phosphate
  modified_base 6: mod_base = OTHER; note = 2'-fluoroadenosine-3'-phosphate
  modified_base 7: mod_base = OTHER; note = 2'-O-methyladenosine-3'-phosphate
  modified_base 8: mod_base = OTHER; note = 2'-fluoroadenosine-3'-phosphate
  modified_base 9: mod_base = OTHER; note = 2'-fluoroguanosine-3'-phosphate
  modified_base 10: mod_base = OTHER; note = 2'-O-methyluridine-3'-phosphate
  modified_base 11: mod_base = OTHER; note = 2'-O-methyladenosine-3'-phosphate
  modified_base 12: mod_base = OTHER; note = 2'-O-methylcytidine-3'-phosphate
  modified_base 13: mod_base = OTHER; note = 2'-O-methyluridine-3'-phosphate
  modified_base 14: mod_base = OTHER; note = 2'-fluoroguanosine-3'-phosphate
  modified_base 15: mod_base = OTHER; note = 2'-O-methylguanosine-3'-phosphate
  modified_base 16: mod_base = OTHER; note = 2'-fluorouridine-3'-phosphate
  modified_base 17: mod_base = OTHER; note = 2'-O-methyluridine-3'-phosphate
  modified_base 18: mod_base = OTHER; note = 2'-O-methyluridine-3'-phosphate
  modified_base 19: mod_base = OTHER; note = 2'-O-methylcytidine-3'-phosphate
  modified_base 20: mod_base = OTHER; note = 2'-O-methyladenosine-3'-phosphate
  modified_base 21: mod_base = OTHER; note = 2'-O-methyladenosine-3'- phosphorothioate
  modified_base 22: mod_base = OTHER; note = 2'-O-methyladenosine-3'- phosphorothioate
  modified_base 23: mod_base = OTHER; note = 2'-O-methyladenosine-3'-phosphate
atgataaagtactggtttcaaaa

SEQ ID NO: 2592 - RNA, 21 nt, synthetic construct
  misc_feature 1..21: note = Description of Artificial Sequence: Synthetic oligonucleotide
  source 1..21: mol_type = other RNA
  modified_base 1: mod_base = OTHER; note = 2'-O-methyluridine-3'-phosphorothioate
  modified_base 2: mod_base = OTHER; note = 2'-O-methyluridine-3'-phosphorothioate
  modified_base 3: mod_base = OTHER; note = 2'-O-methyluridine-3'-phosphate
  modified_base 4: mod_base = OTHER; note = 2'-O-methylguanosine-3'-phosphate
  modified_base 5: mod_base = OTHER; note = 2'-O-methyladenosine-3'-phosphate
  modified_base 6: mod_base = OTHER; note = 2'-O-methyladenosine-3'-phosphate
  modified_base 7: mod_base = OTHER; note = 2'-fluoroadenosine-3'-phosphate
  modified_base 8: mod_base = OTHER; note = 2'-O-methylcytidine-3'-phosphate
  modified_base 9: mod_base = OTHER; note = 2'-fluorocytidine-3'-phosphate
  modified_base 10: mod_base = OTHER; note = 2'-fluoroadenosine-3'-phosphate
  modified_base 11: mod_base = OTHER; note = 2'-fluoroguanosine-3'-phosphate
  modified_base 12: mod_base = OTHER; note = 2'-O-methyluridine-3'-phosphate
  modified_base 13: mod_base = OTHER; note = 2'-O-methyladenosine-3'-phosphate
  modified_base 14: mod_base = OTHER; note = 2'-O-methylcytidine-3'-phosphate
  modified_base 15: mod_base = OTHER; note = 2'-O-methyluridine-3'-phosphate
  modified_base 16: mod_base = OTHER; note = 2'-O-methyluridine-3'-phosphate
  modified_base 17: mod_base = OTHER; note = 2'-O-methyluridine-3'-phosphate
  modified_base 18: mod_base = OTHER; note = 2'-O-methyladenosine-3'-phosphate
  modified_base 19: mod_base = OTHER; note = 2'-O-methyluridine-3'-phosphate
  modified_base 20: mod_base = OTHER; note = 2'-O-methylcytidine-3'-phosphate
  modified_base 21: mod_base = OTHER; note = 2'-O-methyladenosine-3'-phosphate attached to N-[tris(N-acetylgalactosamine-alkyl)-amidodecanoyl)]-4-hydr oxyprolinol Hyp-(N-acetylgalactosamine-alkyl)3
tttgaaaccagtactttatca

SEQ ID NO: 2593 - RNA, 23 nt, synthetic construct
  misc_feature 1..23: note = Description of Artificial Sequence: Synthetic oligonucleotide
  source 1..23: mol_type = other RNA
  modified_base 1: mod_base = OTHER; note = 2'-O-methyluridine-3'-phosphorothioate
  modified_base 2: mod_base = OTHER; note = 2'-fluoroguanosine-3'-phosphorothioate
  modified_base 3: mod_base = OTHER; note = 2'-O-methyladenosine-3'-phosphate
  modified_base 4: mod_base = OTHER; note = 2'-O-methyluridine-3'-phosphate
  modified_base 5: mod_base = OTHER; note = 2'-O-methyladenosine-3'-phosphate
  modified_base 6: mod_base = OTHER; note = 2'-fluoroadenosine-3'-phosphate
  modified_base 7: mod_base = OTHER; note = 2'-O-methyladenosine-3'-phosphate
  modified_base 8: mod_base = OTHER; note = 2'-fluoroguanosine-3'-phosphate
  modified_base 9: mod_base = OTHER; note = 2'-fluorouridine-3'-phosphate
  modified_base 10: mod_base = OTHER; note = 2'-O-methyladenosine-3'-phosphate
  modified_base 11: mod_base = OTHER; note = 2'-O-methylcytidine-3'-phosphate
  modified_base 12: mod_base = OTHER; note = 2'-O-methyluridine-3'-phosphate
  modified_base 13: mod_base = OTHER; note = 2'-O-methylguanosine-3'-phosphate
  modified_base 14: mod_base = OTHER; note = 2'-fluoroguanosine-3'-phosphate
  modified_base 15: mod_base = OTHER; note = 2'-O-methyluridine-3'-phosphate
  modified_base 16: mod_base = OTHER; note = 2'-fluorouridine-3'-phosphate
  modified_base 17: mod_base = OTHER; note = 2'-O-methyluridine-3'-phosphate
  modified_base 18: mod_base = OTHER; note = 2'-O-methylcytidine-3'-phosphate
  modified_base 19: mod_base = OTHER; note = 2'-O-methyladenosine-3'-phosphate
  modified_base 20: mod_base = OTHER; note = 2'-O-methyladenosine-3'-phosphate
  modified_base 21: mod_base = OTHER; note = 2'-O-methyladenosine-3'- phosphorothioate
  modified_base 22: mod_base = OTHER; note = 2'-O-methyladenosine-3'- phosphorothioate
  modified_base 23: mod_base = OTHER; note = 2'-O-methyluridine-3'-phosphate
tgataaagtactggtttcaaaat

SEQ ID NO: 2594 - RNA, 21 nt, synthetic construct
  misc_feature 1..21: note = Description of Artificial Sequence: Synthetic oligonucleotide
  source 1..21: mol_type = other RNA
  modified_base 1: mod_base = OTHER; note = 2'-O-methylcytidine-3'- phosphorothioate
  modified_base 2: mod_base = OTHER; note = 2'-O-methylguanosine-3'- phosphorothioate
  modified_base 3: mod_base = OTHER; note = 2'-O-methyladenosine-3'-phosphate
  modified_base 4: mod_base = OTHER; note = 2'-O-methylguanosine-3'-phosphate
  modified_base 5: mod_base = OTHER; note = 2'-O-methyladenosine-3'-phosphate
  modified_base 6: mod_base = OTHER; note = 2'-O-methyladenosine-3'-phosphate
  modified_base 7: mod_base = OTHER; note = 2'-fluoroguanosine-3'-phosphate
  modified_base 8: mod_base = OTHER; note = 2'-O-methyluridine-3'-phosphate
  modified_base 9: mod_base = OTHER; note = 2'-fluorocytidine-3'-phosphate
  modified_base 10: mod_base = OTHER; note = 2'-fluoroadenosine-3'-phosphate
  modified_base 11: mod_base = OTHER; note = 2'-fluorocytidine-3'-phosphate
  modified_base 12: mod_base = OTHER; note = 2'-O-methylcytidine-3'-phosphate
  modified_base 13: mod_base = OTHER; note = 2'-O-methyladenosine-3'-phosphate
  modified_base 14: mod_base = OTHER; note = 2'-O-methyladenosine-3'-phosphate
  modified_base 15: mod_base = OTHER; note = 2'-O-methylguanosine-3'-phosphate
  modified_base 16: mod_base = OTHER; note = 2'-O-methyladenosine-3'-phosphate
  modified_base 17: mod_base = OTHER; note = 2'-O-methyladenosine-3'-phosphate
  modified_base 18: mod_base = OTHER; note = 2'-O-methylguanosine-3'-phosphate
  modified_base 19: mod_base = OTHER; note = 2'-O-methylcytidine-3'-phosphate
  modified_base 20: mod_base = OTHER; note = 2'-O-methyluridine-3'-phosphate
  modified_base 21: mod_base = OTHER; note = 2'-O-methyladenosine-3'-phosphate attached to N-[tris(N-acetylgalactosamine-alkyl)-amidodecanoyl)]-4-hydr oxyprolinol Hyp-(N-acetylgalactosamine-alkyl)3
cgagaagtcaccaagaagcta

SEQ ID NO: 2595 - RNA, 23 nt, synthetic construct
  misc_feature 1..23: note = Description of Artificial Sequence: Synthetic oligonucleotide
  source 1..23: mol_type = other RNA
  modified_base 1: mod_base = OTHER; note = 2'-O-methyluridine-3'-phosphorothioate
  modified_base 2: mod_base = OTHER; note = 2'-fluoroadenosine-3'-phosphorothioate
  modified_base 3: mod_base = OTHER; note = 2'-O-methylguanosine-3'-phosphate
  modified_base 4: mod_base = OTHER; note = 2'-O-methylcytidine-3'-phosphate
  modified_base 5: mod_base = OTHER; note = 2'-O-methyluridine-3'-phosphate
  modified_base 6: mod_base = OTHER; note = 2'-fluorouridine-3'-phosphate
  modified_base 7: mod_base = OTHER; note = 2'-O-methylcytidine-3'-phosphate
  modified_base 8: mod_base = OTHER; note = 2'-fluorouridine-3'-phosphate
  modified_base 9: mod_base = OTHER; note = 2'-fluorouridine-3'-phosphate
  modified_base 10: mod_base = OTHER; note = 2'-O-methylguanosine-3'-phosphate
  modified_base 11: mod_base = OTHER; note = 2'-O-methylguanosine-3'-phosphate
  modified_base 12: mod_base = OTHER; note = 2'-O-methyluridine-3'-phosphate
  modified_base 13: mod_base = OTHER; note = 2'-O-methylguanosine-3'-phosphate
  modified_base 14: mod_base = OTHER; note = 2'-fluoroadenosine-3'-phosphate
  modified_base 15: mod_base = OTHER; note = 2'-O-methylcytidine-3'-phosphate
  modified_base 16: mod_base = OTHER; note = 2'-fluorouridine-3'-phosphate
  modified_base 17: mod_base = OTHER; note = 2'-O-methyluridine-3'-phosphate
  modified_base 18: mod_base = OTHER; note = 2'-O-methylcytidine-3'-phosphate
  modified_base 19: mod_base = OTHER; note = 2'-O-methyluridine-3'-phosphate
  modified_base 20: mod_base = OTHER; note = 2'-O-methylcytidine-3'-phosphate
  modified_base 21: mod_base = OTHER; note = 2'-O-methylguanosine-3'- phosphorothioate
  modified_base 22: mod_base = OTHER; note = 2'-O-methylguanosine-3'- phosphorothioate
  modified_base 23: mod_base = OTHER; note = 2'-O-methyluridine-3'-phosphate
tagcttcttggtgacttctcggt

SEQ ID NO: 2596 - RNA, 21 nt, synthetic construct
  misc_feature 1..21: note = Description of Artificial Sequence: Synthetic oligonucleotide
  source 1..21: mol_type = other RNA
  modified_base 1: mod_base = OTHER; note = 2'-O-methylguanosine-3'- phosphorothioate
  modified_base 2: mod_base = OTHER; note = 2'-O-methyladenosine-3'- phosphorothioate
  modified_base 3: mod_base = OTHER; note = 2'-O-methylguanosine-3'-phosphate
  modified_base 4: mod_base = OTHER; note = 2'-O-methyladenosine-3'-phosphate
  modified_base 5: mod_base = OTHER; note = 2'-O-methyladenosine-3'-phosphate
  modified_base 6: mod_base = OTHER; note = 2'-O-methylguanosine-3'-phosphate
  modified_base 7: mod_base = OTHER; note = 2'-fluorouridine-3'-phosphate
  modified_base 8: mod_base = OTHER; note = 2'-O-methylcytidine-3'-phosphate
  modified_base 9: mod_base = OTHER; note = 2'-fluoroadenosine-3'-phosphate
  modified_base 10: mod_base = OTHER; note = 2'-fluorocytidine-3'-phosphate
  modified_base 11: mod_base = OTHER; note = 2'-fluorocytidine-3'-phosphate
  modified_base 12: mod_base = OTHER; note = 2'-O-methyladenosine-3'-phosphate
  modified_base 13: mod_base = OTHER; note = 2'-O-methyladenosine-3'-phosphate
  modified_base 14: mod_base = OTHER; note = 2'-O-methylguanosine-3'-phosphate
  modified_base 15: mod_base = OTHER; note = 2'-O-methyladenosine-3'-phosphate
  modified_base 16: mod_base = OTHER; note = 2'-O-methyladenosine-3'-phosphate
  modified_base 17: mod_base = OTHER; note = 2'-O-methylguanosine-3'-phosphate
  modified_base 18: mod_base = OTHER; note = 2'-O-methylcytidine-3'-phosphate
  modified_base 19: mod_base = OTHER; note = 2'-O-methyluridine-3'-phosphate
  modified_base 20: mod_base = OTHER; note = 2'-O-methyladenosine-3'-phosphate
  modified_base 21: mod_base = OTHER; note = 2'-O-methylguanosine-3'-phosphate attached to N-[tris(N-acetylgalactosamine-alkyl)-amidodecanoyl)]-4-hydr oxyprolinol Hyp-(N-acetylgalactosamine-alkyl)3
gagaagtcaccaagaagctag

SEQ ID NO: 2597 - RNA, 23 nt, synthetic construct
  misc_feature 1..23: note = Description of Artificial Sequence: Synthetic oligonucleotide
  source 1..23: mol_type = other RNA
  modified_base 1: mod_base = OTHER; note = 2'-O-methylcytidine-3'- phosphorothioate
  modified_base 2: mod_base = OTHER; note = 2'-fluorouridine -3'-phosphorothioate
  modified_base 3: mod_base = OTHER; note = 2'-O-methyladenosine-3'-phosphate
  modified_base 4: mod_base = OTHER; note = 2'-O-methylguanosine-3'-phosphate
  modified_base 5: mod_base = OTHER; note = 2'-O-methylcytidine-3'-phosphate
  modified_base 6: mod_base = OTHER; note = 2'-fluorouridine-3'-phosphate
  modified_base 7: mod_base = OTHER; note = 2'-O-methyluridine-3'-phosphate
  modified_base 8: mod_base = OTHER; note = 2'-fluorocytidine-3'-phosphate
  modified_base 9: mod_base = OTHER; note = 2'-fluorouridine-3'-phosphate
  modified_base 10: mod_base = OTHER; note = 2'-O-methyluridine-3'-phosphate
  modified_base 11: mod_base = OTHER; note = 2'-O-methylguanosine-3'-phosphate
  modified_base 12: mod_base = OTHER; note = 2'-O-methylguanosine-3'-phosphate
  modified_base 13: mod_base = OTHER; note = 2'-O-methyluridine-3'-phosphate
  modified_base 14: mod_base = OTHER; note = 2'-fluoroguanosine-3'-phosphate
  modified_base 15: mod_base = OTHER; note = 2'-O-methyladenosine-3'-phosphate
  modified_base 16: mod_base = OTHER; note = 2'-fluorocytidine-3'-phosphate
  modified_base 17: mod_base = OTHER; note = 2'-O-methyluridine-3'-phosphate
  modified_base 18: mod_base = OTHER; note = 2'-O-methyluridine-3'-phosphate
  modified_base 19: mod_base = OTHER; note = 2'-O-methylcytidine-3'-phosphate
  modified_base 20: mod_base = OTHER; note = 2'-O-methyluridine-3'-phosphate
  modified_base 21: mod_base = OTHER; note = 2'-O-methylcytidine-3'- phosphorothioate
  modified_base 22: mod_base = OTHER; note = 2'-O-methylguanosine-3'- phosphorothioate
  modified_base 23: mod_base = OTHER; note = 2'-O-methylguanosine-3'-phosphate
ctagcttcttggtgacttctcgg

SEQ ID NO: 2598 - RNA, 21 nt, synthetic construct
  misc_feature 1..21: note = Description of Artificial Sequence: Synthetic oligonucleotide
  source 1..21: mol_type = other RNA
  modified_base 1: mod_base = OTHER; note = 2'-O-methylguanosine-3'- phosphorothioate
  modified_base 2: mod_base = OTHER; note = 2'-O-methylguanosine-3'- phosphorothioate
  modified_base 3: mod_base = OTHER; note = 2'-O-methyladenosine-3'-phosphate
  modified_base 4: mod_base = OTHER; note = 2'-O-methylcytidine-3'-phosphate
  modified_base 5: mod_base = OTHER; note = 2'-O-methylcytidine-3'-phosphate
  modified_base 6: mod_base = OTHER; note = 2'-O-methylguanosine-3'-phosphate
  modified_base 7: mod_base = OTHER; note = 2'-fluoroadenosine-3'-phosphate
  modified_base 8: mod_base = OTHER; note = 2'-O-methylguanosine-3'-phosphate
  modified_base 9: mod_base = OTHER; note = 2'-fluoroadenosine-3'-phosphate
  modified_base 10: mod_base = OTHER; note = 2'-fluoroadenosine-3'-phosphate
  modified_base 11: mod_base = OTHER; note = 2'-fluoroguanosine-3'-phosphate
  modified_base 12: mod_base = OTHER; note = 2'-O-methyluridine-3'-phosphate
  modified_base 13: mod_base = OTHER; note = 2'-O-methylcytidine-3'-phosphate
  modified_base 14: mod_base = OTHER; note = 2'-O-methyladenosine-3'-phosphate
  modified_base 15: mod_base = OTHER; note = 2'-O-methylcytidine-3'-phosphate
  modified_base 16: mod_base = OTHER; note = 2'-O-methylcytidine-3'-phosphate
  modified_base 17: mod_base = OTHER; note = 2'-O-methyladenosine-3'-phosphate
  modified_base 18: mod_base = OTHER; note = 2'-O-methyladenosine-3'-phosphate
  modified_base 19: mod_base = OTHER; note = 2'-O-methylguanosine-3'-phosphate
  modified_base 20: mod_base = OTHER; note = 2'-O-methyladenosine-3'-phosphate
  modified_base 21: mod_base = OTHER; note = 2'-O-methyladenosine-3'-phosphate attached to N-[tris(N-acetylgalactosamine-alkyl)-amidodecanoyl)]-4-hydr oxyprolinol Hyp-(N-acetylgalactosamine-alkyl)3
ggaccgagaagtcaccaagaa

SEQ ID NO: 2599 - RNA, 23 nt, synthetic construct
  misc_feature 1..23: note = Description of Artificial Sequence: Synthetic oligonucleotide
  source 1..23: mol_type = other RNA
  modified_base 1: mod_base = OTHER; note = 2'-O-methyluridine-3'-phosphorothioate
  modified_base 2: mod_base = OTHER; note = 2'-fluorouridine -3'-phosphorothioate
  modified_base 3: mod_base = OTHER; note = 2'-O-methylcytidine-3'-phosphate
  modified_base 4: mod_base = OTHER; note = 2'-O-methyluridine-3'-phosphate
  modified_base 5: mod_base = OTHER; note = 2'-O-methyluridine-3'-phosphate
  modified_base 6: mod_base = OTHER; note = 2'-fluoroguanosine-3'-phosphate
  modified_base 7: mod_base = OTHER; note = 2'-O-methylguanosine-3'-phosphate
  modified_base 8: mod_base = OTHER; note = 2'-fluorouridine-3'-phosphate
  modified_base 9: mod_base = OTHER; note = 2'-fluoroguanosine-3'-phosphate
  modified_base 10: mod_base = OTHER; note = 2'-O-methyladenosine-3'-phosphate
  modified_base 11: mod_base = OTHER; note = 2'-O-methylcytidine-3'-phosphate
  modified_base 12: mod_base = OTHER; note = 2'-O-methyluridine-3'-phosphate
  modified_base 13: mod_base = OTHER; note = 2'-O-methyluridine-3'-phosphate
  modified_base 14: mod_base = OTHER; note = 2'-fluorocytidine-3'-phosphate
  modified_base 15: mod_base = OTHER; note = 2'-O-methyluridine-3'-phosphate
  modified_base 16: mod_base = OTHER; note = 2'-fluorocytidine-3'-phosphate
  modified_base 17: mod_base = OTHER; note = 2'-O-methylguanosine-3'-phosphate
  modified_base 18: mod_base = OTHER; note = 2'-O-methylguanosine-3'-phosphate
  modified_base 19: mod_base = OTHER; note = 2'-O-methyluridine-3'-phosphate
  modified_base 20: mod_base = OTHER; note = 2'-O-methylcytidine-3'-phosphate
  modified_base 21: mod_base = OTHER; note = 2'-O-methylcytidine-3'- phosphorothioate
  modified_base 22: mod_base = OTHER; note = 2'-O-methyluridine-3'-phosphorothioate
  modified_base 23: mod_base = OTHER; note = 2'-O-methyluridine-3'-phosphate
ttcttggtgacttctcggtcctt

SEQ ID NO: 2600 - RNA, 21 nt, synthetic construct
  misc_feature 1..21: note = Description of Artificial Sequence: Synthetic oligonucleotide
  source 1..21: mol_type = other RNA
  modified_base 1: mod_base = OTHER; note = 2'-O-methyladenosine-3'- phosphorothioate
  modified_base 2: mod_base = OTHER; note = 2'-O-methylguanosine-3'- phosphorothioate
  modified_base 3: mod_base = OTHER; note = 2'-O-methylguanosine-3'-phosphate
  modified_base 4: mod_base = OTHER; note = 2'-O-methyladenosine-3'-phosphate
  modified_base 5: mod_base = OTHER; note = 2'-O-methylcytidine-3'-phosphate
  modified_base 6: mod_base = OTHER; note = 2'-O-methylcytidine-3'-phosphate
  modified_base 7: mod_base = OTHER; note = 2'-fluoroguanosine-3'-phosphate
  modified_base 8: mod_base = OTHER; note = 2'-O-methyladenosine-3'-phosphate
  modified_base 9: mod_base = OTHER; note = 2'-fluoroguanosine-3'-phosphate
  modified_base 10: mod_base = OTHER; note = 2'-fluoroadenosine-3'-phosphate
  modified_base 11: mod_base = OTHER; note = 2'-fluoroadenosine-3'-phosphate
  modified_base 12: mod_base = OTHER; note = 2'-O-methylguanosine-3'-phosphate
  modified_base 13: mod_base = OTHER; note = 2'-O-methyluridine-3'-phosphate
  modified_base 14: mod_base = OTHER; note = 2'-O-methylcytidine-3'-phosphate
  modified_base 15: mod_base = OTHER; note = 2'-O-methyladenosine-3'-phosphate
  modified_base 16: mod_base = OTHER; note = 2'-O-methylcytidine-3'-phosphate
  modified_base 17: mod_base = OTHER; note = 2'-O-methylcytidine-3'-phosphate
  modified_base 18: mod_base = OTHER; note = 2'-O-methyladenosine-3'-phosphate
  modified_base 19: mod_base = OTHER; note = 2'-O-methyladenosine-3'-phosphate
  modified_base 20: mod_base = OTHER; note = 2'-O-methylguanosine-3'-phosphate
  modified_base 21: mod_base = OTHER; note = 2'-O-methyladenosine-3'-phosphate attached to N-[tris(N-acetylgalactosamine-alkyl)-amidodecanoyl)]-4-hydr oxyprolinol Hyp-(N-acetylgalactosamine-alkyl)3
aggaccgagaagtcaccaaga

SEQ ID NO: 2601 - RNA, 23 nt, synthetic construct
  misc_feature 1..23: note = Description of Artificial Sequence: Synthetic oligonucleotide
  source 1..23: mol_type = other RNA
  modified_base 1: mod_base = OTHER; note = 2'-O-methyluridine-3'-phosphorothioate
  modified_base 2: mod_base = OTHER; note = 2'-fluorocytidine-3'-phosphorothioate
  modified_base 3: mod_base = OTHER; note = 2'-O-methyluridine-3'-phosphate
  modified_base 4: mod_base = OTHER; note = 2'-O-methyluridine-3'-phosphate
  modified_base 5: mod_base = OTHER; note = 2'-O-methylguanosine-3'-phosphate
  modified_base 6: mod_base = OTHER; note = 2'-fluoroguanosine-3'-phosphate
  modified_base 7: mod_base = OTHER; note = 2'-O-methyluridine-3'-phosphate
  modified_base 8: mod_base = OTHER; note = 2'-fluoroguanosine-3'-phosphate
  modified_base 9: mod_base = OTHER; note = 2'-fluoroadenosine-3'-phosphate
  modified_base 10: mod_base = OTHER; note = 2'-O-methylcytidine-3'-phosphate
  modified_base 11: mod_base = OTHER; note = 2'-O-methyluridine-3'-phosphate
  modified_base 12: mod_base = OTHER; note = 2'-O-methyluridine-3'-phosphate
  modified_base 13: mod_base = OTHER; note = 2'-O-methylcytidine-3'-phosphate
  modified_base 14: mod_base = OTHER; note = 2'-fluorouridine-3'-phosphate
  modified_base 15: mod_base = OTHER; note = 2'-O-methylcytidine-3'-phosphate
  modified_base 16: mod_base = OTHER; note = 2'-fluoroguanosine-3'-phosphate
  modified_base 17: mod_base = OTHER; note = 2'-O-methylguanosine-3'-phosphate
  modified_base 18: mod_base = OTHER; note = 2'-O-methyluridine-3'-phosphate
  modified_base 19: mod_base = OTHER; note = 2'-O-methylcytidine-3'-phosphate
  modified_base 20: mod_base = OTHER; note = 2'-O-methylcytidine-3'-phosphate
  modified_base 21: mod_base = OTHER; note = 2'-O-methyluridine-3'-phosphorothioate
  modified_base 22: mod_base = OTHER; note = 2'-O-methyluridine-3'-phosphorothioate
  modified_base 23: mod_base = OTHER; note = 2'-O-methylguanosine-3'-phosphate
tcttggtgacttctcggtccttg

SEQ ID NO: 2602 - RNA, 21 nt, synthetic construct
  misc_feature 1..21: note = Description of Artificial Sequence: Synthetic oligonucleotide
  source 1..21: mol_type = other RNA
  modified_base 1: mod_base = OTHER; note = 2'-O-methyluridine-3'-phosphorothioate
  modified_base 2: mod_base = OTHER; note = 2'-O-methylcytidine-3'- phosphorothioate
  modified_base 3: mod_base = OTHER; note = 2'-O-methyladenosine-3'-phosphate
  modified_base 4: mod_base = OTHER; note = 2'-O-methyladenosine-3'-phosphate
  modified_base 5: mod_base = OTHER; note = 2'-O-methyladenosine-3'-phosphate
  modified_base 6: mod_base = OTHER; note = 2'-O-methylguanosine-3'-phosphate
  modified_base 7: mod_base = OTHER; note = 2'-fluorouridine-3'-phosphate
  modified_base 8: mod_base = OTHER; note = 2'-O-methylguanosine-3'-phosphate
  modified_base 9: mod_base = OTHER; note = 2'-fluorouridine-3'-phosphate
  modified_base 10: mod_base = OTHER; note = 2'-fluorouridine-3'-phosphate
  modified_base 11: mod_base = OTHER; note = 2'-fluoroguanosine-3'-phosphate
  modified_base 12: mod_base = OTHER; note = 2'-O-methylguanosine-3'-phosphate
  modified_base 13: mod_base = OTHER; note = 2'-O-methyluridine-3'-phosphate
  modified_base 14: mod_base = OTHER; note = 2'-O-methyladenosine-3'-phosphate
  modified_base 15: mod_base = OTHER; note = 2'-O-methyladenosine-3'-phosphate
  modified_base 16: mod_base = OTHER; note = 2'-O-methyluridine-3'-phosphate
  modified_base 17: mod_base = OTHER; note = 2'-O-methylguanosine-3'-phosphate
  modified_base 18: mod_base = OTHER; note = 2'-O-methylcytidine-3'-phosphate
  modified_base 19: mod_base = OTHER; note = 2'-O-methylcytidine-3'-phosphate
  modified_base 20: mod_base = OTHER; note = 2'-O-methyluridine-3'-phosphate
  modified_base 21: mod_base = OTHER; note = 2'-O-methylguanosine-3'-phosphate attached to N-[tris(N-acetylgalactosamine-alkyl)-amidodecanoyl)]-4-hydr oxyprolinol Hyp-(N-acetylgalactosamine-alkyl)3
tcaaagtgttggtaatgcctg

SEQ ID NO: 2603 - RNA, 23 nt, synthetic construct
  misc_feature 1..23: note = Description of Artificial Sequence: Synthetic oligonucleotide
  source 1..23: mol_type = other RNA
  modified_base 1: mod_base = OTHER; note = 2'-O-methylcytidine-3'- phosphorothioate
  modified_base 2: mod_base = OTHER; note = 2'-fluoroadenosine-3'-phosphorothioate
  modified_base 3: mod_base = OTHER; note = 2'-O-methylguanosine-3'-phosphate
  modified_base 4: mod_base = OTHER; note = 2'-O-methylguanosine-3'-phosphate
  modified_base 5: mod_base = OTHER; note = 2'-O-methylcytidine-3'-phosphate
  modified_base 6: mod_base = OTHER; note = 2'-fluoroadenosine-3'-phosphate
  modified_base 7: mod_base = OTHER; note = 2'-O-methyluridine-3'-phosphate
  modified_base 8: mod_base = OTHER; note = 2'-fluorouridine-3'-phosphate
  modified_base 9: mod_base = OTHER; note = 2'-fluoroadenosine-3'-phosphate
  modified_base 10: mod_base = OTHER; note = 2'-O-methylcytidine-3'-phosphate
  modified_base 11: mod_base = OTHER; note = 2'-O-methylcytidine-3'-phosphate
  modified_base 12: mod_base = OTHER; note = 2'-O-methyladenosine-3'-phosphate
  modified_base 13: mod_base = OTHER; note = 2'-O-methyladenosine-3'-phosphate
  modified_base 14: mod_base = OTHER; note = 2'-fluorocytidine-3'-phosphate
  modified_base 15: mod_base = OTHER; note = 2'-O-methyladenosine-3'-phosphate
  modified_base 16: mod_base = OTHER; note = 2'-fluorocytidine-3'-phosphate
  modified_base 17: mod_base = OTHER; note = 2'-O-methyluridine-3'-phosphate
  modified_base 18: mod_base = OTHER; note = 2'-O-methyluridine-3'-phosphate
  modified_base 19: mod_base = OTHER; note = 2'-O-methyluridine-3'-phosphate
  modified_base 20: mod_base = OTHER; note = 2'-O-methylguanosine-3'-phosphate
  modified_base 21: mod_base = OTHER; note = 2'-O-methyladenosine-3'- phosphorothioate
  modified_base 22: mod_base = OTHER; note = 2'-O-methyladenosine-3'- phosphorothioate
  modified_base 23: mod_base = OTHER; note = 2'-O-methylcytidine-3'-phosphate
caggcattaccaacactttgaac

SEQ ID NO: 2604 - RNA, 21 nt, synthetic construct
  misc_feature 1..21: note = Description of Artificial Sequence: Synthetic oligonucleotide
  source 1..21: mol_type = other RNA
  modified_base 1: mod_base = OTHER; note = 2'-O-methylcytidine-3'- phosphorothioate
  modified_base 2: mod_base = OTHER; note = 2'-O-methyladenosine-3'- phosphorothioate
  modified_base 3: mod_base = OTHER; note = 2'-O-methyladenosine-3'-phosphate
  modified_base 4: mod_base = OTHER; note = 2'-O-methyladenosine-3'-phosphate
  modified_base 5: mod_base = OTHER; note = 2'-O-methylguanosine-3'-phosphate
  modified_base 6: mod_base = OTHER; note = 2'-O-methyluridine-3'-phosphate
  modified_base 7: mod_base = OTHER; note = 2'-fluoroguanosine-3'-phosphate
  modified_base 8: mod_base = OTHER; note = 2'-O-methyluridine-3'-phosphate
  modified_base 9: mod_base = OTHER; note = 2'-fluorouridine-3'-phosphate
  modified_base 10: mod_base = OTHER; note = 2'-fluoroguanosine-3'-phosphate
  modified_base 11: mod_base = OTHER; note = 2'-fluoroguanosine-3'-phosphate
  modified_base 12: mod_base = OTHER; note = 2'-O-methyluridine-3'-phosphate
  modified_base 13: mod_base = OTHER; note = 2'-O-methyladenosine-3'-phosphate
  modified_base 14: mod_base = OTHER; note = 2'-O-methyladenosine-3'-phosphate
  modified_base 15: mod_base = OTHER; note = 2'-O-methyluridine-3'-phosphate
  modified_base 16: mod_base = OTHER; note = 2'-O-methylguanosine-3'-phosphate
  modified_base 17: mod_base = OTHER; note = 2'-O-methylcytidine-3'-phosphate
  modified_base 18: mod_base = OTHER; note = 2'-O-methylcytidine-3'-phosphate
  modified_base 19: mod_base = OTHER; note = 2'-O-methyluridine-3'-phosphate
  modified_base 20: mod_base = OTHER; note = 2'-O-methylguanosine-3'-phosphate
  modified_base 21: mod_base = OTHER; note = 2'-O-methyladenosine-3'-phosphate attached to N-[tris(N-acetylgalactosamine-alkyl)-amidodecanoyl)]-4-hydr oxyprolinol Hyp-(N-acetylgalactosamine-alkyl)3
caaagtgttggtaatgcctga

SEQ ID NO: 2605 - RNA, 23 nt, synthetic construct
  misc_feature 1..23: note = Description of Artificial Sequence: Synthetic oligonucleotide
  source 1..23: mol_type = other RNA
  modified_base 1: mod_base = OTHER; note = 2'-O-methyluridine-3'-phosphorothioate
  modified_base 2: mod_base = OTHER; note = 2'-fluorocytidine-3'-phosphorothioate
  modified_base 3: mod_base = OTHER; note = 2'-O-methyladenosine-3'-phosphate
  modified_base 4: mod_base = OTHER; note = 2'-O-methylguanosine-3'-phosphate
  modified_base 5: mod_base = OTHER; note = 2'-O-methylguanosine-3'-phosphate
  modified_base 6: mod_base = OTHER; note = 2'-fluorocytidine-3'-phosphate
  modified_base 7: mod_base = OTHER; note = 2'-O-methyladenosine-3'-phosphate
  modified_base 8: mod_base = OTHER; note = 2'-fluorouridine-3'-phosphate
  modified_base 9: mod_base = OTHER; note = 2'-fluorouridine-3'-phosphate
  modified_base 10: mod_base = OTHER; note = 2'-O-methyladenosine-3'-phosphate
  modified_base 11: mod_base = OTHER; note = 2'-O-methylcytidine-3'-phosphate
  modified_base 12: mod_base = OTHER; note = 2'-O-methylcytidine-3'-phosphate
  modified_base 13: mod_base = OTHER; note = 2'-O-methyladenosine-3'-phosphate
  modified_base 14: mod_base = OTHER; note = 2'-fluoroadenosine-3'-phosphate
  modified_base 15: mod_base = OTHER; note = 2'-O-methylcytidine-3'-phosphate
  modified_base 16: mod_base = OTHER; note = 2'-fluoroadenosine-3'-phosphate
  modified_base 17: mod_base = OTHER; note = 2'-O-methylcytidine-3'-phosphate
  modified_base 18: mod_base = OTHER; note = 2'-O-methyluridine-3'-phosphate
  modified_base 19: mod_base = OTHER; note = 2'-O-methyluridine-3'-phosphate
  modified_base 20: mod_base = OTHER; note = 2'-O-methyluridine-3'-phosphate
  modified_base 21: mod_base = OTHER; note = 2'-O-methylguanosine-3'- phosphorothioate
  modified_base 22: mod_base = OTHER; note = 2'-O-methyladenosine-3'- phosphorothioate
  modified_base 23: mod_base = OTHER; note = 2'-O-methyladenosine-3'-phosphate
tcaggcattaccaacactttgaa

SEQ ID NO: 2606 - RNA, 21 nt, synthetic construct
  misc_feature 1..21: note = Description of Artificial Sequence: Synthetic oligonucleotide
  source 1..21: mol_type = other RNA
  modified_base 1: mod_base = OTHER; note = 2'-O-methyladenosine-3'- phosphorothioate
  modified_base 2: mod_base = OTHER; note = 2'-O-methylguanosine-3'- phosphorothioate
  modified_base 3: mod_base = OTHER; note = 2'-O-methylguanosine-3'-phosphate
  modified_base 4: mod_base = OTHER; note = 2'-O-methyluridine-3'-phosphate
  modified_base 5: mod_base = OTHER; note = 2'-O-methyluridine-3'-phosphate
  modified_base 6: mod_base = OTHER; note = 2'-O-methylcytidine-3'-phosphate
  modified_base 7: mod_base = OTHER; note = 2'-fluoroadenosine-3'-phosphate
  modified_base 8: mod_base = OTHER; note = 2'-O-methyladenosine-3'-phosphate
  modified_base 9: mod_base = OTHER; note = 2'-fluoroadenosine-3'-phosphate
  modified_base 10: mod_base = OTHER; note = 2'-fluoroguanosine-3'-phosphate
  modified_base 11: mod_base = OTHER; note = 2'-fluorouridine-3'-phosphate
  modified_base 12: mod_base = OTHER; note = 2'-O-methylguanosine-3'-phosphate
  modified_base 13: mod_base = OTHER; note = 2'-O-methyluridine-3'-phosphate
  modified_base 14: mod_base = OTHER; note = 2'-O-methyluridine-3'-phosphate
  modified_base 15: mod_base = OTHER; note = 2'-O-methylguanosine-3'-phosphate
  modified_base 16: mod_base = OTHER; note = 2'-O-methylguanosine-3'-phosphate
  modified_base 17: mod_base = OTHER; note = 2'-O-methyluridine-3'-phosphate
  modified_base 18: mod_base = OTHER; note = 2'-O-methyladenosine-3'-phosphate
  modified_base 19: mod_base = OTHER; note = 2'-O-methyladenosine-3'-phosphate
  modified_base 20: mod_base = OTHER; note = 2'-O-methyluridine-3'-phosphate
  modified_base 21: mod_base = OTHER; note = 2'-O-methylguanosine-3'-phosphate attached to N-[tris(N-acetylgalactosamine-alkyl)-amidodecanoyl)]-4-hydr oxyprolinol Hyp-(N-acetylgalactosamine-alkyl)3
aggttcaaagtgttggtaatg

SEQ ID NO: 2607 - RNA, 23 nt, synthetic construct
  misc_feature 1..23: note = Description of Artificial Sequence: Synthetic oligonucleotide
  source 1..23: mol_type = other RNA
  modified_base 1: mod_base = OTHER; note = 2'-O-methylcytidine-3'- phosphorothioate
  modified_base 2: mod_base = OTHER; note = 2'-fluoroadenosine-3'-phosphorothioate
  modified_base 3: mod_base = OTHER; note = 2'-O-methyluridine-3'-phosphate
  modified_base 4: mod_base = OTHER; note = 2'-O-methyluridine-3'-phosphate
  modified_base 5: mod_base = OTHER; note = 2'-O-methyladenosine-3'-phosphate
  modified_base 6: mod_base = OTHER; note = 2'-fluorocytidine-3'-phosphate
  modified_base 7: mod_base = OTHER; note = 2'-O-methylcytidine-3'-phosphate
  modified_base 8: mod_base = OTHER; note = 2'-fluoroadenosine-3'-phosphate
  modified_base 9: mod_base = OTHER; note = 2'-fluoroadenosine-3'-phosphate
  modified_base 10: mod_base = OTHER; note = 2'-O-methylcytidine-3'-phosphate
  modified_base 11: mod_base = OTHER; note = 2'-O-methyladenosine-3'-phosphate
  modified_base 12: mod_base = OTHER; note = 2'-O-methylcytidine-3'-phosphate
  modified_base 13: mod_base = OTHER; note = 2'-O-methyluridine-3'-phosphate
  modified_base 14: mod_base = OTHER; note = 2'-fluorouridine-3'-phosphate
  modified_base 15: mod_base = OTHER; note = 2'-O-methyluridine-3'-phosphate
  modified_base 16: mod_base = OTHER; note = 2'-fluoroguanosine-3'-phosphate
  modified_base 17: mod_base = OTHER; note = 2'-O-methyladenosine-3'-phosphate
  modified_base 18: mod_base = OTHER; note = 2'-O-methyladenosine-3'-phosphate
  modified_base 19: mod_base = OTHER; note = 2'-O-methylcytidine-3'-phosphate
  modified_base 20: mod_base = OTHER; note = 2'-O-methylcytidine-3'-phosphate
  modified_base 21: mod_base = OTHER; note = 2'-O-methyluridine-3'-phosphorothioate
  modified_base 22: mod_base = OTHER; note = 2'-O-methylguanosine-3'- phosphorothioate
  modified_base 23: mod_base = OTHER; note = 2'-O-methyladenosine-3'-phosphate
cattaccaacactttgaacctga

SEQ ID NO: 2608 - RNA, 21 nt, synthetic construct
  misc_feature 1..21: note = Description of Artificial Sequence: Synthetic oligonucleotide
  source 1..21: mol_type = other RNA
  modified_base 1: mod_base = OTHER; note = 2'-O-methylcytidine-3'- phosphorothioate
  modified_base 2: mod_base = OTHER; note = 2'-O-methyladenosine-3'- phosphorothioate
  modified_base 3: mod_base = OTHER; note = 2'-O-methylguanosine-3'-phosphate
  modified_base 4: mod_base = OTHER; note = 2'-O-methylguanosine-3'-phosphate
  modified_base 5: mod_base = OTHER; note = 2'-O-methyluridine-3'-phosphate
  modified_base 6: mod_base = OTHER; note = 2'-O-methyluridine-3'-phosphate
  modified_base 7: mod_base = OTHER; note = 2'-fluorocytidine-3'-phosphate
  modified_base 8: mod_base = OTHER; note = 2'-O-methyladenosine-3'-phosphate
  modified_base 9: mod_base = OTHER; note = 2'-fluoroadenosine-3'-phosphate
  modified_base 10: mod_base = OTHER; note = 2'-fluoroadenosine-3'-phosphate
  modified_base 11: mod_base = OTHER; note = 2'-fluoroguanosine-3'-phosphate
  modified_base 12: mod_base = OTHER; note = 2'-O-methyluridine-3'-phosphate
  modified_base 13: mod_base = OTHER; note = 2'-O-methylguanosine-3'-phosphate
  modified_base 14: mod_base = OTHER; note = 2'-O-methyluridine-3'-phosphate
  modified_base 15: mod_base = OTHER; note = 2'-O-methyluridine-3'-phosphate
  modified_base 16: mod_base = OTHER; note = 2'-O-methylguanosine-3'-phosphate
  modified_base 17: mod_base = OTHER; note = 2'-O-methylguanosine-3'-phosphate
  modified_base 18: mod_base = OTHER; note = 2'-O-methyluridine-3'-phosphate
  modified_base 19: mod_base = OTHER; note = 2'-O-methyladenosine-3'-phosphate
  modified_base 20: mod_base = OTHER; note = 2'-O-methyladenosine-3'-phosphate
  modified_base 21: mod_base = OTHER; note = 2'-O-methyluridine-3'-phosphate attached to N-[tris(N-acetylgalactosamine-alkyl)-amidodecanoyl)]-4-hydr oxyprolinol Hyp-(N-acetylgalactosamine-alkyl)3
caggttcaaagtgttggtaat

SEQ ID NO: 2609 - RNA, 23 nt, synthetic construct
  misc_feature 1..23: note = Description of Artificial Sequence: Synthetic oligonucleotide
  source 1..23: mol_type = other RNA
  modified_base 1: mod_base = OTHER; note = 2'-O-methyladenosine-3'- phosphorothioate
  modified_base 2: mod_base = OTHER; note = 2'-fluorouridine -3'-phosphorothioate
  modified_base 3: mod_base = OTHER; note = 2'-O-methyluridine-3'-phosphate
  modified_base 4: mod_base = OTHER; note = 2'-O-methyladenosine-3'-phosphate
  modified_base 5: mod_base = OTHER; note = 2'-O-methylcytidine-3'-phosphate
  modified_base 6: mod_base = OTHER; note = 2'-fluorocytidine-3'-phosphate
  modified_base 7: mod_base = OTHER; note = 2'-O-methyladenosine-3'-phosphate
  modified_base 8: mod_base = OTHER; note = 2'-fluoroadenosine-3'-phosphate
  modified_base 9: mod_base = OTHER; note = 2'-fluorocytidine-3'-phosphate
  modified_base 10: mod_base = OTHER; note = 2'-O-methyladenosine-3'-phosphate
  modified_base 11: mod_base = OTHER; note = 2'-O-methylcytidine-3'-phosphate
  modified_base 12: mod_base = OTHER; note = 2'-O-methyluridine-3'-phosphate
  modified_base 13: mod_base = OTHER; note = 2'-O-methyluridine-3'-phosphate
  modified_base 14: mod_base = OTHER; note = 2'-fluorouridine-3'-phosphate
  modified_base 15: mod_base = OTHER; note = 2'-O-methylguanosine-3'-phosphate
  modified_base 16: mod_base = OTHER; note = 2'-fluoroadenosine-3'-phosphate
  modified_base 17: mod_base = OTHER; note = 2'-O-methyladenosine-3'-phosphate
  modified_base 18: mod_base = OTHER; note = 2'-O-methylcytidine-3'-phosphate
  modified_base 19: mod_base = OTHER; note = 2'-O-methylcytidine-3'-phosphate
  modified_base 20: mod_base = OTHER; note = 2'-O-methyluridine-3'-phosphate
  modified_base 21: mod_base = OTHER; note = 2'-O-methylguanosine-3'- phosphorothioate
  modified_base 22: mod_base = OTHER; note = 2'-O-methyladenosine-3'- phosphorothioate
  modified_base 23: mod_base = OTHER; note = 2'-O-methylguanosine-3'-phosphate
attaccaacactttgaacctgag

SEQ ID NO: 2610 - RNA, 21 nt, synthetic construct
  misc_feature 1..21: note = Description of Artificial Sequence: Synthetic oligonucleotide
  source 1..21: mol_type = other RNA
  modified_base 1: mod_base = OTHER; note = 2'-O-methyluridine-3'-phosphorothioate
  modified_base 2: mod_base = OTHER; note = 2'-O-methyladenosine-3'- phosphorothioate
  modified_base 3: mod_base = OTHER; note = 2'-O-methyluridine-3'-phosphate
  modified_base 4: mod_base = OTHER; note = 2'-O-methyluridine-3'-phosphate
  modified_base 5: mod_base = OTHER; note = 2'-O-methyladenosine-3'-phosphate
  modified_base 6: mod_base = OTHER; note = 2'-O-methylcytidine-3'-phosphate
  modified_base 7: mod_base = OTHER; note = 2'-fluorouridine-3'-phosphate
  modified_base 8: mod_base = OTHER; note = 2'-O-methyluridine-3'-phosphate
  modified_base 9: mod_base = OTHER; note = 2'-fluoroguanosine-3'-phosphate
  modified_base 10: mod_base = OTHER; note = 2'-fluoroadenosine-3'-phosphate
  modified_base 11: mod_base = OTHER; note = 2'-fluorocytidine-3'-phosphate
  modified_base 12: mod_base = OTHER; note = 2'-O-methyladenosine-3'-phosphate
  modified_base 13: mod_base = OTHER; note = 2'-O-methyladenosine-3'-phosphate
  modified_base 14: mod_base = OTHER; note = 2'-O-methyladenosine-3'-phosphate
  modified_base 15: mod_base = OTHER; note = 2'-O-methylguanosine-3'-phosphate
  modified_base 16: mod_base = OTHER; note = 2'-O-methyladenosine-3'-phosphate
  modified_base 17: mod_base = OTHER; note = 2'-O-methylguanosine-3'-phosphate
  modified_base 18: mod_base = OTHER; note = 2'-O-methyladenosine-3'-phosphate
  modified_base 19: mod_base = OTHER; note = 2'-O-methylcytidine-3'-phosphate
  modified_base 20: mod_base = OTHER; note = 2'-O-methyladenosine-3'-phosphate
  modified_base 21: mod_base = OTHER; note = 2'-O-methylcytidine-3'-phosphate attached to N-[tris(N-acetylgalactosamine-alkyl)-amidodecanoyl)]-4-hydr oxyprolinol Hyp-(N-acetylgalactosamine-alkyl)3
tattacttgacaaagagacac

SEQ ID NO: 2611 - RNA, 23 nt, synthetic construct
  misc_feature 1..23: note = Description of Artificial Sequence: Synthetic oligonucleotide
  source 1..23: mol_type = other RNA
  modified_base 1: mod_base = OTHER; note = 2'-O-methylguanosine-3'- phosphorothioate
  modified_base 2: mod_base = OTHER; note = 2'-fluorouridine -3'-phosphorothioate
  modified_base 3: mod_base = OTHER; note = 2'-O-methylguanosine-3'-phosphate
  modified_base 4: mod_base = OTHER; note = 2'-O-methyluridine-3'-phosphate
  modified_base 5: mod_base = OTHER; note = 2'-O-methylcytidine-3'-phosphate
  modified_base 6: mod_base = OTHER; note = 2'-fluorouridine-3'-phosphate
  modified_base 7: mod_base = OTHER; note = 2'-O-methylcytidine-3'-phosphate
  modified_base 8: mod_base = OTHER; note = 2'-fluorouridine-3'-phosphate
  modified_base 9: mod_base = OTHER; note = 2'-fluorouridine-3'-phosphate
  modified_base 10: mod_base = OTHER; note = 2'-O-methyluridine-3'-phosphate
  modified_base 11: mod_base = OTHER; note = 2'-O-methylguanosine-3'-phosphate
  modified_base 12: mod_base = OTHER; note = 2'-O-methyluridine-3'-phosphate
  modified_base 13: mod_base = OTHER; note = 2'-O-methylcytidine-3'-phosphate
  modified_base 14: mod_base = OTHER; note = 2'-fluoroadenosine-3'-phosphate
  modified_base 15: mod_base = OTHER; note = 2'-O-methyladenosine-3'-phosphate
  modified_base 16: mod_base = OTHER; note = 2'-fluoroguanosine-3'-phosphate
  modified_base 17: mod_base = OTHER; note = 2'-O-methyluridine-3'-phosphate
  modified_base 18: mod_base = OTHER; note = 2'-O-methyladenosine-3'-phosphate
  modified_base 19: mod_base = OTHER; note = 2'-O-methyladenosine-3'-phosphate
  modified_base 20: mod_base = OTHER; note = 2'-O-methyluridine-3'-phosphate
  modified_base 21: mod_base = OTHER; note = 2'-O-methyladenosine-3'- phosphorothioate
  modified_base 22: mod_base = OTHER; note = 2'-O-methylcytidine-3'- phosphorothioate
  modified_base 23: mod_base = OTHER; note = 2'-O-methyladenosine-3'-phosphate
gtgtctctttgtcaagtaataca

SEQ ID NO: 2612 - RNA, 21 nt, synthetic construct
  misc_feature 1..21: note = Description of Artificial Sequence: Synthetic oligonucleotide
  source 1..21: mol_type = other RNA
  modified_base 1: mod_base = OTHER; note = 2'-O-methyladenosine-3'- phosphorothioate
  modified_base 2: mod_base = OTHER; note = 2'-O-methyluridine-3'-phosphorothioate
  modified_base 3: mod_base = OTHER; note = 2'-O-methyluridine-3'-phosphate
  modified_base 4: mod_base = OTHER; note = 2'-O-methyladenosine-3'-phosphate
  modified_base 5: mod_base = OTHER; note = 2'-O-methylcytidine-3'-phosphate
  modified_base 6: mod_base = OTHER; note = 2'-O-methyluridine-3'-phosphate
  modified_base 7: mod_base = OTHER; note = 2'-fluorouridine-3'-phosphate
  modified_base 8: mod_base = OTHER; note = 2'-O-methylguanosine-3'-phosphate
  modified_base 9: mod_base = OTHER; note = 2'-fluoroadenosine-3'-phosphate
  modified_base 10: mod_base = OTHER; note = 2'-fluorocytidine-3'-phosphate
  modified_base 11: mod_base = OTHER; note = 2'-fluoroadenosine-3'-phosphate
  modified_base 12: mod_base = OTHER; note = 2'-O-methyladenosine-3'-phosphate
  modified_base 13: mod_base = OTHER; note = 2'-O-methyladenosine-3'-phosphate
  modified_base 14: mod_base = OTHER; note = 2'-O-methylguanosine-3'-phosphate
  modified_base 15: mod_base = OTHER; note = 2'-O-methyladenosine-3'-phosphate
  modified_base 16: mod_base = OTHER; note = 2'-O-methylguanosine-3'-phosphate
  modified_base 17: mod_base = OTHER; note = 2'-O-methyladenosine-3'-phosphate
  modified_base 18: mod_base = OTHER; note = 2'-O-methylcytidine-3'-phosphate
  modified_base 19: mod_base = OTHER; note = 2'-O-methyladenosine-3'-phosphate
  modified_base 20: mod_base = OTHER; note = 2'-O-methylcytidine-3'-phosphate
  modified_base 21: mod_base = OTHER; note = 2'-O-methyluridine-3'-phosphate attached to N-[tris(N-acetylgalactosamine-alkyl)-amidodecanoyl)]-4-hydr oxyprolinol Hyp-(N-acetylgalactosamine-alkyl)3
attacttgacaaagagacact

SEQ ID NO: 2613 - RNA, 23 nt, synthetic construct
  misc_feature 1..23: note = Description of Artificial Sequence: Synthetic oligonucleotide
  source 1..23: mol_type = other RNA
  modified_base 1: mod_base = OTHER; note = 2'-O-methyladenosine-3'- phosphorothioate
  modified_base 2: mod_base = OTHER; note = 2'-fluoroguanosine-3'-phosphorothioate
  modified_base 3: mod_base = OTHER; note = 2'-O-methyluridine-3'-phosphate
  modified_base 4: mod_base = OTHER; note = 2'-O-methylguanosine-3'-phosphate
  modified_base 5: mod_base = OTHER; note = 2'-O-methyluridine-3'-phosphate
  modified_base 6: mod_base = OTHER; note = 2'-fluorocytidine-3'-phosphate
  modified_base 7: mod_base = OTHER; note = 2'-O-methyluridine-3'-phosphate
  modified_base 8: mod_base = OTHER; note = 2'-fluorocytidine-3'-phosphate
  modified_base 9: mod_base = OTHER; note = 2'-fluorouridine-3'-phosphate
  modified_base 10: mod_base = OTHER; note = 2'-O-methyluridine-3'-phosphate
  modified_base 11: mod_base = OTHER; note = 2'-O-methyluridine-3'-phosphate
  modified_base 12: mod_base = OTHER; note = 2'-O-methylguanosine-3'-phosphate
  modified_base 13: mod_base = OTHER; note = 2'-O-methyluridine-3'-phosphate
  modified_base 14: mod_base = OTHER; note = 2'-fluorocytidine-3'-phosphate
  modified_base 15: mod_base = OTHER; note = 2'-O-methyladenosine-3'-phosphate
  modified_base 16: mod_base = OTHER; note = 2'-fluoroadenosine-3'-phosphate
  modified_base 17: mod_base = OTHER; note = 2'-O-methylguanosine-3'-phosphate
  modified_base 18: mod_base = OTHER; note = 2'-O-methyluridine-3'-phosphate
  modified_base 19: mod_base = OTHER; note = 2'-O-methyladenosine-3'-phosphate
  modified_base 20: mod_base = OTHER; note = 2'-O-methyladenosine-3'-phosphate
  modified_base 21: mod_base = OTHER; note = 2'-O-methyluridine-3'-phosphorothioate
  modified_base 22: mod_base = OTHER; note = 2'-O-methyladenosine-3'- phosphorothioate
  modified_base 23: mod_base = OTHER; note = 2'-O-methylcytidine-3'-phosphate
agtgtctctttgtcaagtaatac

SEQ ID NO: 2614 - RNA, 21 nt, synthetic construct
  misc_feature 1..21: note = Description of Artificial Sequence: Synthetic oligonucleotide
  source 1..21: mol_type = other RNA
  modified_base 1: mod_base = OTHER; note = 2'-O-methylcytidine-3'- phosphorothioate
  modified_base 2: mod_base = OTHER; note = 2'-O-methyladenosine-3'- phosphorothioate
  modified_base 3: mod_base = OTHER; note = 2'-O-methyluridine-3'-phosphate
  modified_base 4: mod_base = OTHER; note = 2'-O-methylguanosine-3'-phosphate
  modified_base 5: mod_base = OTHER; note = 2'-O-methyluridine-3'-phosphate
  modified_base 6: mod_base = OTHER; note = 2'-O-methyladenosine-3'-phosphate
  modified_base 7: mod_base = OTHER; note = 2'-fluorouridine-3'-phosphate
  modified_base 8: mod_base = OTHER; note = 2'-O-methyluridine-3'-phosphate
  modified_base 9: mod_base = OTHER; note = 2'-fluoroadenosine-3'-phosphate
  modified_base 10: mod_base = OTHER; note = 2'-fluorocytidine-3'-phosphate
  modified_base 11: mod_base = OTHER; note = 2'-fluorouridine-3'-phosphate
  modified_base 12: mod_base = OTHER; note = 2'-O-methyluridine-3'-phosphate
  modified_base 13: mod_base = OTHER; note = 2'-O-methylguanosine-3'-phosphate
  modified_base 14: mod_base = OTHER; note = 2'-O-methyladenosine-3'-phosphate
  modified_base 15: mod_base = OTHER; note = 2'-O-methylcytidine-3'-phosphate
  modified_base 16: mod_base = OTHER; note = 2'-O-methyladenosine-3'-phosphate
  modified_base 17: mod_base = OTHER; note = 2'-O-methyladenosine-3'-phosphate
  modified_base 18: mod_base = OTHER; note = 2'-O-methyladenosine-3'-phosphate
  modified_base 19: mod_base = OTHER; note = 2'-O-methylguanosine-3'-phosphate
  modified_base 20: mod_base = OTHER; note = 2'-O-methyladenosine-3'-phosphate
  modified_base 21: mod_base = OTHER; note = 2'-O-methylguanosine-3'-phosphate attached to N-[tris(N-acetylgalactosamine-alkyl)-amidodecanoyl)]-4-hydr oxyprolinol Hyp-(N-acetylgalactosamine-alkyl)3
catgtattacttgacaaagag

SEQ ID NO: 2615 - RNA, 23 nt, synthetic construct
  misc_feature 1..23: note = Description of Artificial Sequence: Synthetic oligonucleotide
  source 1..23: mol_type = other RNA
  modified_base 1: mod_base = OTHER; note = 2'-O-methylcytidine-3'- phosphorothioate
  modified_base 2: mod_base = OTHER; note = 2'-fluorouridine -3'-phosphorothioate
  modified_base 3: mod_base = OTHER; note = 2'-O-methylcytidine-3'-phosphate
  modified_base 4: mod_base = OTHER; note = 2'-O-methyluridine-3'-phosphate
  modified_base 5: mod_base = OTHER; note = 2'-O-methyluridine-3'-phosphate
  modified_base 6: mod_base = OTHER; note = 2'-fluorouridine-3'-phosphate
  modified_base 7: mod_base = OTHER; note = 2'-O-methylguanosine-3'-phosphate
  modified_base 8: mod_base = OTHER; note = 2'-fluorouridine-3'-phosphate
  modified_base 9: mod_base = OTHER; note = 2'-fluorocytidine-3'-phosphate
  modified_base 10: mod_base = OTHER; note = 2'-O-methyladenosine-3'-phosphate
  modified_base 11: mod_base = OTHER; note = 2'-O-methyladenosine-3'-phosphate
  modified_base 12: mod_base = OTHER; note = 2'-O-methylguanosine-3'-phosphate
  modified_base 13: mod_base = OTHER; note = 2'-O-methyluridine-3'-phosphate
  modified_base 14: mod_base = OTHER; note = 2'-fluoroadenosine-3'-phosphate
  modified_base 15: mod_base = OTHER; note = 2'-O-methyladenosine-3'-phosphate
  modified_base 16: mod_base = OTHER; note = 2'-fluorouridine-3'-phosphate
  modified_base 17: mod_base = OTHER; note = 2'-O-methyladenosine-3'-phosphate
  modified_base 18: mod_base = OTHER; note = 2'-O-methylcytidine-3'-phosphate
  modified_base 19: mod_base = OTHER; note = 2'-O-methyladenosine-3'-phosphate
  modified_base 20: mod_base = OTHER; note = 2'-O-methyluridine-3'-phosphate
  modified_base 21: mod_base = OTHER; note = 2'-O-methylguanosine-3'- phosphorothioate
  modified_base 22: mod_base = OTHER; note = 2'-O-methylcytidine-3'- phosphorothioate
  modified_base 23: mod_base = OTHER; note = 2'-O-methyluridine-3'-phosphate
ctctttgtcaagtaatacatgct

SEQ ID NO: 2616 - RNA, 21 nt, synthetic construct
  misc_feature 1..21: note = Description of Artificial Sequence: Synthetic oligonucleotide
  source 1..21: mol_type = other RNA
  modified_base 1: mod_base = OTHER; note = 2'-O-methylguanosine-3'- phosphorothioate
  modified_base 2: mod_base = OTHER; note = 2'-O-methylcytidine-3'- phosphorothioate
  modified_base 3: mod_base = OTHER; note = 2'-O-methyladenosine-3'-phosphate
  modified_base 4: mod_base = OTHER; note = 2'-O-methyluridine-3'-phosphate
  modified_base 5: mod_base = OTHER; note = 2'-O-methylguanosine-3'-phosphate
  modified_base 6: mod_base = OTHER; note = 2'-O-methyluridine-3'-phosphate
  modified_base 7: mod_base = OTHER; note = 2'-fluoroadenosine-3'-phosphate
  modified_base 8: mod_base = OTHER; note = 2'-O-methyluridine-3'-phosphate
  modified_base 9: mod_base = OTHER; note = 2'-fluorouridine-3'-phosphate
  modified_base 10: mod_base = OTHER; note = 2'-fluoroadenosine-3'-phosphate
  modified_base 11: mod_base = OTHER; note = 2'-fluorocytidine-3'-phosphate
  modified_base 12: mod_base = OTHER; note = 2'-O-methyluridine-3'-phosphate
  modified_base 13: mod_base = OTHER; note = 2'-O-methyluridine-3'-phosphate
  modified_base 14: mod_base = OTHER; note = 2'-O-methylguanosine-3'-phosphate
  modified_base 15: mod_base = OTHER; note = 2'-O-methyladenosine-3'-phosphate
  modified_base 16: mod_base = OTHER; note = 2'-O-methylcytidine-3'-phosphate
  modified_base 17: mod_base = OTHER; note = 2'-O-methyladenosine-3'-phosphate
  modified_base 18: mod_base = OTHER; note = 2'-O-methyladenosine-3'-phosphate
  modified_base 19: mod_base = OTHER; note = 2'-O-methyladenosine-3'-phosphate
  modified_base 20: mod_base = OTHER; note = 2'-O-methylguanosine-3'-phosphate
  modified_base 21: mod_base = OTHER; note = 2'-O-methyladenosine-3'-phosphate attached to N-[tris(N-acetylgalactosamine-alkyl)-amidodecanoyl)]-4-hydr oxyprolinol Hyp-(N-acetylgalactosamine-alkyl)3
gcatgtattacttgacaaaga

SEQ ID NO: 2617 - RNA, 23 nt, synthetic construct
  misc_feature 1..23: note = Description of Artificial Sequence: Synthetic oligonucleotide
  source 1..23: mol_type = other RNA
  modified_base 1: mod_base = OTHER; note = 2'-O-methyluridine-3'-phosphorothioate
  modified_base 2: mod_base = OTHER; note = 2'-fluorocytidine-3'-phosphorothioate
  modified_base 3: mod_base = OTHER; note = 2'-O-methyluridine-3'-phosphate
  modified_base 4: mod_base = OTHER; note = 2'-O-methyluridine-3'-phosphate
  modified_base 5: mod_base = OTHER; note = 2'-O-methyluridine-3'-phosphate
  modified_base 6: mod_base = OTHER; note = 2'-fluoroguanosine-3'-phosphate
  modified_base 7: mod_base = OTHER; note = 2'-O-methyluridine-3'-phosphate
  modified_base 8: mod_base = OTHER; note = 2'-fluorocytidine-3'-phosphate
  modified_base 9: mod_base = OTHER; note = 2'-fluoroadenosine-3'-phosphate
  modified_base 10: mod_base = OTHER; note = 2'-O-methyladenosine-3'-phosphate
  modified_base 11: mod_base = OTHER; note = 2'-O-methylguanosine-3'-phosphate
  modified_base 12: mod_base = OTHER; note = 2'-O-methyluridine-3'-phosphate
  modified_base 13: mod_base = OTHER; note = 2'-O-methyladenosine-3'-phosphate
  modified_base 14: mod_base = OTHER; note = 2'-fluoroadenosine-3'-phosphate
  modified_base 15: mod_base = OTHER; note = 2'-O-methyluridine-3'-phosphate
  modified_base 16: mod_base = OTHER; note = 2'-fluoroadenosine-3'-phosphate
  modified_base 17: mod_base = OTHER; note = 2'-O-methylcytidine-3'-phosphate
  modified_base 18: mod_base = OTHER; note = 2'-O-methyladenosine-3'-phosphate
  modified_base 19: mod_base = OTHER; note = 2'-O-methyluridine-3'-phosphate
  modified_base 20: mod_base = OTHER; note = 2'-O-methylguanosine-3'-phosphate
  modified_base 21: mod_base = OTHER; note = 2'-O-methylcytidine-3'- phosphorothioate
  modified_base 22: mod_base = OTHER; note = 2'-O-methyluridine-3'-phosphorothioate
  modified_base 23: mod_base = OTHER; note = 2'-O-methylguanosine-3'-phosphate
tctttgtcaagtaatacatgctg

SEQ ID NO: 2618 - RNA, 21 nt, synthetic construct
  misc_feature 1..21: note = Description of Artificial Sequence: Synthetic oligonucleotide
  source 1..21: mol_type = other RNA
  modified_base 1: mod_base = OTHER; note = 2'-O-methyladenosine-3'- phosphorothioate
  modified_base 2: mod_base = OTHER; note = 2'-O-methyladenosine-3'- phosphorothioate
  modified_base 3: mod_base = OTHER; note = 2'-O-methyladenosine-3'-phosphate
  modified_base 4: mod_base = OTHER; note = 2'-O-methylguanosine-3'-phosphate
  modified_base 5: mod_base = OTHER; note = 2'-O-methyluridine-3'-phosphate
  modified_base 6: mod_base = OTHER; note = 2'-O-methylcytidine-3'-phosphate
  modified_base 7: mod_base = OTHER; note = 2'-fluoroadenosine-3'-phosphate
  modified_base 8: mod_base = OTHER; note = 2'-O-methyluridine-3'-phosphate
  modified_base 9: mod_base = OTHER; note = 2'-fluorocytidine-3'-phosphate
  modified_base 10: mod_base = OTHER; note = 2'-fluoroguanosine-3'-phosphate
  modified_base 11: mod_base = OTHER; note = 2'-fluoroadenosine-3'-phosphate
  modified_base 12: mod_base = OTHER; note = 2'-O-methylcytidine-3'-phosphate
  modified_base 13: mod_base = OTHER; note = 2'-O-methyladenosine-3'-phosphate
  modified_base 14: mod_base = OTHER; note = 2'-O-methyladenosine-3'-phosphate
  modified_base 15: mod_base = OTHER; note = 2'-O-methylguanosine-3'-phosphate
  modified_base 16: mod_base = OTHER; note = 2'-O-methyladenosine-3'-phosphate
  modified_base 17: mod_base = OTHER; note = 2'-O-methylcytidine-3'-phosphate
  modified_base 18: mod_base = OTHER; note = 2'-O-methyladenosine-3'-phosphate
  modified_base 19: mod_base = OTHER; note = 2'-O-methyluridine-3'-phosphate
  modified_base 20: mod_base = OTHER; note = 2'-O-methyluridine-3'-phosphate
  modified_base 21: mod_base = OTHER; note = 2'-O-methylguanosine-3'-phosphate attached to N-[tris(N-acetylgalactosamine-alkyl)-amidodecanoyl)]-4-hydr oxyprolinol Hyp-(N-acetylgalactosamine-alkyl)3
aaagtcatcgacaagacattg

SEQ ID NO: 2619 - RNA, 23 nt, synthetic construct
  misc_feature 1..23: note = Description of Artificial Sequence: Synthetic oligonucleotide
  source 1..23: mol_type = other RNA
  modified_base 1: mod_base = OTHER; note = 2'-O-methylcytidine-3'- phosphorothioate
  modified_base 2: mod_base = OTHER; note = 2'-fluoroadenosine-3'-phosphorothioate
  modified_base 3: mod_base = OTHER; note = 2'-O-methyladenosine-3'-phosphate
  modified_base 4: mod_base = OTHER; note = 2'-O-methyluridine-3'-phosphate
  modified_base 5: mod_base = OTHER; note = 2'-O-methylguanosine-3'-phosphate
  modified_base 6: mod_base = OTHER; note = 2'-fluorouridine-3'-phosphate
  modified_base 7: mod_base = OTHER; note = 2'-O-methylcytidine-3'-phosphate
  modified_base 8: mod_base = OTHER; note = 2'-fluorouridine-3'-phosphate
  modified_base 9: mod_base = OTHER; note = 2'-fluorouridine-3'-phosphate
  modified_base 10: mod_base = OTHER; note = 2'-O-methylguanosine-3'-phosphate
  modified_base 11: mod_base = OTHER; note = 2'-O-methyluridine-3'-phosphate
  modified_base 12: mod_base = OTHER; note = 2'-O-methylcytidine-3'-phosphate
  modified_base 13: mod_base = OTHER; note = 2'-O-methylguanosine-3'-phosphate
  modified_base 14: mod_base = OTHER; note = 2'-fluoroadenosine-3'-phosphate
  modified_base 15: mod_base = OTHER; note = 2'-O-methyluridine-3'-phosphate
  modified_base 16: mod_base = OTHER; note = 2'-fluoroguanosine-3'-phosphate
  modified_base 17: mod_base = OTHER; note = 2'-O-methyladenosine-3'-phosphate
  modified_base 18: mod_base = OTHER; note = 2'-O-methylcytidine-3'-phosphate
  modified_base 19: mod_base = OTHER; note = 2'-O-methyluridine-3'-phosphate
  modified_base 20: mod_base = OTHER; note = 2'-O-methyluridine-3'-phosphate
  modified_base 21: mod_base = OTHER; note = 2'-O-methyluridine-3'-phosphorothioate
  modified_base 22: mod_base = OTHER; note = 2'-O-methylcytidine-3'- phosphorothioate
  modified_base 23: mod_base = OTHER; note = 2'-O-methyladenosine-3'-phosphate
caatgtcttgtcgatgactttca

SEQ ID NO: 2620 - RNA, 21 nt, synthetic construct
  misc_feature 1..21: note = Description of Artificial Sequence: Synthetic oligonucleotide
  source 1..21: mol_type = other RNA
  modified_base 1: mod_base = OTHER; note = 2'-O-methyladenosine-3'- phosphorothioate
  modified_base 2: mod_base = OTHER; note = 2'-O-methyladenosine-3'- phosphorothioate
  modified_base 3: mod_base = OTHER; note = 2'-O-methylguanosine-3'-phosphate
  modified_base 4: mod_base = OTHER; note = 2'-O-methyluridine-3'-phosphate
  modified_base 5: mod_base = OTHER; note = 2'-O-methylcytidine-3'-phosphate
  modified_base 6: mod_base = OTHER; note = 2'-O-methyladenosine-3'-phosphate
  modified_base 7: mod_base = OTHER; note = 2'-fluorouridine-3'-phosphate
  modified_base 8: mod_base = OTHER; note = 2'-O-methylcytidine-3'-phosphate
  modified_base 9: mod_base = OTHER; note = 2'-fluoroguanosine-3'-phosphate
  modified_base 10: mod_base = OTHER; note = 2'-fluoroadenosine-3'-phosphate
  modified_base 11: mod_base = OTHER; note = 2'-fluorocytidine-3'-phosphate
  modified_base 12: mod_base = OTHER; note = 2'-O-methyladenosine-3'-phosphate
  modified_base 13: mod_base = OTHER; note = 2'-O-methyladenosine-3'-phosphate
  modified_base 14: mod_base = OTHER; note = 2'-O-methylguanosine-3'-phosphate
  modified_base 15: mod_base = OTHER; note = 2'-O-methyladenosine-3'-phosphate
  modified_base 16: mod_base = OTHER; note = 2'-O-methylcytidine-3'-phosphate
  modified_base 17: mod_base = OTHER; note = 2'-O-methyladenosine-3'-phosphate
  modified_base 18: mod_base = OTHER; note = 2'-O-methyluridine-3'-phosphate
  modified_base 19: mod_base = OTHER; note = 2'-O-methyluridine-3'-phosphate
  modified_base 20: mod_base = OTHER; note = 2'-O-methylguanosine-3'-phosphate
  modified_base 21: mod_base = OTHER; note = 2'-O-methylguanosine-3'-phosphate attached to N-[tris(N-acetylgalactosamine-alkyl)-amidodecanoyl)]-4-hydr oxyprolinol Hyp-(N-acetylgalactosamine-alkyl)3
aagtcatcgacaagacattgg

SEQ ID NO: 2621 - RNA, 23 nt, synthetic construct
  misc_feature 1..23: note = Description of Artificial Sequence: Synthetic oligonucleotide
  source 1..23: mol_type = other RNA
  modified_base 1: mod_base = OTHER; note = 2'-O-methylcytidine-3'- phosphorothioate
  modified_base 2: mod_base = OTHER; note = 2'-fluorocytidine-3'-phosphorothioate
  modified_base 3: mod_base = OTHER; note = 2'-O-methyladenosine-3'-phosphate
  modified_base 4: mod_base = OTHER; note = 2'-O-methyladenosine-3'-phosphate
  modified_base 5: mod_base = OTHER; note = 2'-O-methyluridine-3'-phosphate
  modified_base 6: mod_base = OTHER; note = 2'-fluoroguanosine-3'-phosphate
  modified_base 7: mod_base = OTHER; note = 2'-O-methyluridine-3'-phosphate
  modified_base 8: mod_base = OTHER; note = 2'-fluorocytidine-3'-phosphate
  modified_base 9: mod_base = OTHER; note = 2'-fluorouridine-3'-phosphate
  modified_base 10: mod_base = OTHER; note = 2'-O-methyluridine-3'-phosphate
  modified_base 11: mod_base = OTHER; note = 2'-O-methylguanosine-3'-phosphate
  modified_base 12: mod_base = OTHER; note = 2'-O-methyluridine-3'-phosphate
  modified_base 13: mod_base = OTHER; note = 2'-O-methylcytidine-3'-phosphate
  modified_base 14: mod_base = OTHER; note = 2'-fluoroguanosine-3'-phosphate
  modified_base 15: mod_base = OTHER; note = 2'-O-methyladenosine-3'-phosphate
  modified_base 16: mod_base = OTHER; note = 2'-fluorouridine-3'-phosphate
  modified_base 17: mod_base = OTHER; note = 2'-O-methylguanosine-3'-phosphate
  modified_base 18: mod_base = OTHER; note = 2'-O-methyladenosine-3'-phosphate
  modified_base 19: mod_base = OTHER; note = 2'-O-methylcytidine-3'-phosphate
  modified_base 20: mod_base = OTHER; note = 2'-O-methyluridine-3'-phosphate
  modified_base 21: mod_base = OTHER; note = 2'-O-methyluridine-3'-phosphorothioate
  modified_base 22: mod_base = OTHER; note = 2'-O-methyluridine-3'-phosphorothioate
  modified_base 23: mod_base = OTHER; note = 2'-O-methylcytidine-3'-phosphate
ccaatgtcttgtcgatgactttc

SEQ ID NO: 2622 - RNA, 21 nt, synthetic construct
  misc_feature 1..21: note = Description of Artificial Sequence: Synthetic oligonucleotide
  source 1..21: mol_type = other RNA
  modified_base 1: mod_base = OTHER; note = 2'-O-methyluridine-3'-phosphorothioate
  modified_base 2: mod_base = OTHER; note = 2'-O-methylguanosine-3'- phosphorothioate
  modified_base 3: mod_base = OTHER; note = 2'-O-methyluridine-3'-phosphate
  modified_base 4: mod_base = OTHER; note = 2'-O-methylguanosine-3'-phosphate
  modified_base 5: mod_base = OTHER; note = 2'-O-methyladenosine-3'-phosphate
  modified_base 6: mod_base = OTHER; note = 2'-O-methyladenosine-3'-phosphate
  modified_base 7: mod_base = OTHER; note = 2'-fluoroadenosine-3'-phosphate
  modified_base 8: mod_base = OTHER; note = 2'-O-methylguanosine-3'-phosphate
  modified_base 9: mod_base = OTHER; note = 2'-fluorouridine-3'-phosphate
  modified_base 10: mod_base = OTHER; note = 2'-fluorocytidine-3'-phosphate
  modified_base 11: mod_base = OTHER; note = 2'-fluoroadenosine-3'-phosphate
  modified_base 12: mod_base = OTHER; note = 2'-O-methyluridine-3'-phosphate
  modified_base 13: mod_base = OTHER; note = 2'-O-methylcytidine-3'-phosphate
  modified_base 14: mod_base = OTHER; note = 2'-O-methylguanosine-3'-phosphate
  modified_base 15: mod_base = OTHER; note = 2'-O-methyladenosine-3'-phosphate
  modified_base 16: mod_base = OTHER; note = 2'-O-methylcytidine-3'-phosphate
  modified_base 17: mod_base = OTHER; note = 2'-O-methyladenosine-3'-phosphate
  modified_base 18: mod_base = OTHER; note = 2'-O-methyladenosine-3'-phosphate
  modified_base 19: mod_base = OTHER; note = 2'-O-methylguanosine-3'-phosphate
  modified_base 20: mod_base = OTHER; note = 2'-O-methyladenosine-3'-phosphate
  modified_base 21: mod_base = OTHER; note = 2'-O-methylcytidine-3'-phosphate attached to N-[tris(N-acetylgalactosamine-alkyl)-amidodecanoyl)]-4-hydr oxyprolinol Hyp-(N-acetylgalactosamine-alkyl)3
tgtgaaagtcatcgacaagac

SEQ ID NO: 2623 - RNA, 23 nt, synthetic construct
  misc_feature 1..23: note = Description of Artificial Sequence: Synthetic oligonucleotide
  source 1..23: mol_type = other RNA
  modified_base 1: mod_base = OTHER; note = 2'-O-methylguanosine-3'- phosphorothioate
  modified_base 2: mod_base = OTHER; note = 2'-fluorouridine -3'-phosphorothioate
  modified_base 3: mod_base = OTHER; note = 2'-O-methylcytidine-3'-phosphate
  modified_base 4: mod_base = OTHER; note = 2'-O-methyluridine-3'-phosphate
  modified_base 5: mod_base = OTHER; note = 2'-O-methyluridine-3'-phosphate
  modified_base 6: mod_base = OTHER; note = 2'-fluoroguanosine-3'-phosphate
  modified_base 7: mod_base = OTHER; note = 2'-O-methyluridine-3'-phosphate
  modified_base 8: mod_base = OTHER; note = 2'-fluorocytidine-3'-phosphate
  modified_base 9: mod_base = OTHER; note = 2'-fluoroguanosine-3'-phosphate
  modified_base 10: mod_base = OTHER; note = 2'-O-methyladenosine-3'-phosphate
  modified_base 11: mod_base = OTHER; note = 2'-O-methyluridine-3'-phosphate
  modified_base 12: mod_base = OTHER; note = 2'-O-methylguanosine-3'-phosphate
  modified_base 13: mod_base = OTHER; note = 2'-O-methyladenosine-3'-phosphate
  modified_base 14: mod_base = OTHER; note = 2'-fluorocytidine-3'-phosphate
  modified_base 15: mod_base = OTHER; note = 2'-O-methyluridine-3'-phosphate
  modified_base 16: mod_base = OTHER; note = 2'-fluorouridine-3'-phosphate
  modified_base 17: mod_base = OTHER; note = 2'-O-methyluridine-3'-phosphate
  modified_base 18: mod_base = OTHER; note = 2'-O-methylcytidine-3'-phosphate
  modified_base 19: mod_base = OTHER; note = 2'-O-methyladenosine-3'-phosphate
  modified_base 20: mod_base = OTHER; note = 2'-O-methylcytidine-3'-phosphate
  modified_base 21: mod_base = OTHER; note = 2'-O-methyladenosine-3'- phosphorothioate
  modified_base 22: mod_base = OTHER; note = 2'-O-methyluridine-3'-phosphorothioate
  modified_base 23: mod_base = OTHER; note = 2'-O-methyluridine-3'-phosphate
gtcttgtcgatgactttcacatt

SEQ ID NO: 2624 - RNA, 21 nt, synthetic construct
  misc_feature 1..21: note = Description of Artificial Sequence: Synthetic oligonucleotide
  source 1..21: mol_type = other RNA
  modified_base 1: mod_base = OTHER; note = 2'-O-methyladenosine-3'- phosphorothioate
  modified_base 2: mod_base = OTHER; note = 2'-O-methyluridine-3'-phosphorothioate
  modified_base 3: mod_base = OTHER; note = 2'-O-methylguanosine-3'-phosphate
  modified_base 4: mod_base = OTHER; note = 2'-O-methyluridine-3'-phosphate
  modified_base 5: mod_base = OTHER; note = 2'-O-methylguanosine-3'-phosphate
  modified_base 6: mod_base = OTHER; note = 2'-O-methyladenosine-3'-phosphate
  modified_base 7: mod_base = OTHER; note = 2'-fluoroadenosine-3'-phosphate
  modified_base 8: mod_base = OTHER; note = 2'-O-methyladenosine-3'-phosphate
  modified_base 9: mod_base = OTHER; note = 2'-fluoroguanosine-3'-phosphate
  modified_base 10: mod_base = OTHER; note = 2'-fluorouridine-3'-phosphate
  modified_base 11: mod_base = OTHER; note = 2'-fluorocytidine-3'-phosphate
  modified_base 12: mod_base = OTHER; note = 2'-O-methyladenosine-3'-phosphate
  modified_base 13: mod_base = OTHER; note = 2'-O-methyluridine-3'-phosphate
  modified_base 14: mod_base = OTHER; note = 2'-O-methylcytidine-3'-phosphate
  modified_base 15: mod_base = OTHER; note = 2'-O-methylguanosine-3'-phosphate
  modified_base 16: mod_base = OTHER; note = 2'-O-methyladenosine-3'-phosphate
  modified_base 17: mod_base = OTHER; note = 2'-O-methylcytidine-3'-phosphate
  modified_base 18: mod_base = OTHER; note = 2'-O-methyladenosine-3'-phosphate
  modified_base 19: mod_base = OTHER; note = 2'-O-methyladenosine-3'-phosphate
  modified_base 20: mod_base = OTHER; note = 2'-O-methylguanosine-3'-phosphate
  modified_base 21: mod_base = OTHER; note = 2'-O-methyladenosine-3'-phosphate attached to N-[tris(N-acetylgalactosamine-alkyl)-amidodecanoyl)]-4-hydr oxyprolinol Hyp-(N-acetylgalactosamine-alkyl)3
atgtgaaagtcatcgacaaga

SEQ ID NO: 2625 - RNA, 23 nt, synthetic construct
  misc_feature 1..23: note = Description of Artificial Sequence: Synthetic oligonucleotide
  source 1..23: mol_type = other RNA
  modified_base 1: mod_base = OTHER; note = 2'-O-methyluridine-3'-phosphorothioate
  modified_base 2: mod_base = OTHER; note = 2'-fluorocytidine-3'-phosphorothioate
  modified_base 3: mod_base = OTHER; note = 2'-O-methyluridine-3'-phosphate
  modified_base 4: mod_base = OTHER; note = 2'-O-methyluridine-3'-phosphate
  modified_base 5: mod_base = OTHER; note = 2'-O-methylguanosine-3'-phosphate
  modified_base 6: mod_base = OTHER; note = 2'-fluorouridine-3'-phosphate
  modified_base 7: mod_base = OTHER; note = 2'-O-methylcytidine-3'-phosphate
  modified_base 8: mod_base = OTHER; note = 2'-fluoroguanosine-3'-phosphate
  modified_base 9: mod_base = OTHER; note = 2'-fluoroadenosine-3'-phosphate
  modified_base 10: mod_base = OTHER; note = 2'-O-methyluridine-3'-phosphate
  modified_base 11: mod_base = OTHER; note = 2'-O-methylguanosine-3'-phosphate
  modified_base 12: mod_base = OTHER; note = 2'-O-methyladenosine-3'-phosphate
  modified_base 13: mod_base = OTHER; note = 2'-O-methylcytidine-3'-phosphate
  modified_base 14: mod_base = OTHER; note = 2'-fluorouridine-3'-phosphate
  modified_base 15: mod_base = OTHER; note = 2'-O-methyluridine-3'-phosphate
  modified_base 16: mod_base = OTHER; note = 2'-fluorouridine-3'-phosphate
  modified_base 17: mod_base = OTHER; note = 2'-O-methylcytidine-3'-phosphate
  modified_base 18: mod_base = OTHER; note = 2'-O-methyladenosine-3'-phosphate
  modified_base 19: mod_base = OTHER; note = 2'-O-methylcytidine-3'-phosphate
  modified_base 20: mod_base = OTHER; note = 2'-O-methyladenosine-3'-phosphate
  modified_base 21: mod_base = OTHER; note = 2'-O-methyluridine-3'-phosphorothioate
  modified_base 22: mod_base = OTHER; note = 2'-O-methyluridine-3'-phosphorothioate
  modified_base 23: mod_base = OTHER; note = 2'-O-methylcytidine-3'-phosphate
tcttgtcgatgactttcacattc

SEQ ID NO: 2626 - RNA, 21 nt, synthetic construct
  misc_feature 1..21: note = Description of Artificial Sequence: Synthetic oligonucleotide
  source 1..21: mol_type = other RNA
  modified_base 1: mod_base = OTHER; note = 2'-O-methyladenosine-3'- phosphorothioate
  modified_base 2: mod_base = OTHER; note = 2'-O-methyluridine-3'-phosphorothioate
  modified_base 3: mod_base = OTHER; note = 2'-O-methyladenosine-3'-phosphate
  modified_base 4: mod_base = OTHER; note = 2'-O-methyluridine-3'-phosphate
  modified_base 5: mod_base = OTHER; note = 2'-O-methylguanosine-3'-phosphate
  modified_base 6: mod_base = OTHER; note = 2'-O-methyluridine-3'-phosphate
  modified_base 7: mod_base = OTHER; note = 2'-fluoroguanosine-3'-phosphate
  modified_base 8: mod_base = OTHER; note = 2'-O-methylguanosine-3'-phosphate
  modified_base 9: mod_base = OTHER; note = 2'-fluorocytidine-3'-phosphate
  modified_base 10: mod_base = OTHER; note = 2'-fluorouridine-3'-phosphate
  modified_base 11: mod_base = OTHER; note = 2'-fluoroadenosine-3'-phosphate
  modified_base 12: mod_base = OTHER; note = 2'-O-methyladenosine-3'-phosphate
  modified_base 13: mod_base = OTHER; note = 2'-O-methyladenosine-3'-phosphate
  modified_base 14: mod_base = OTHER; note = 2'-O-methylguanosine-3'-phosphate
  modified_base 15: mod_base = OTHER; note = 2'-O-methylcytidine-3'-phosphate
  modified_base 16: mod_base = OTHER; note = 2'-O-methyladenosine-3'-phosphate
  modified_base 17: mod_base = OTHER; note = 2'-O-methyladenosine-3'-phosphate
  modified_base 18: mod_base = OTHER; note = 2'-O-methyluridine-3'-phosphate
  modified_base 19: mod_base = OTHER; note = 2'-O-methyladenosine-3'-phosphate
  modified_base 20: mod_base = OTHER; note = 2'-O-methylguanosine-3'-phosphate
  modified_base 21: mod_base = OTHER; note = 2'-O-methyladenosine-3'-phosphate attached to N-[tris(N-acetylgalactosamine-alkyl)-amidodecanoyl)]-4-hydr oxyprolinol Hyp-(N-acetylgalactosamine-alkyl)3
atatgtggctaaagcaataga

SEQ ID NO: 2627 - RNA, 23 nt, synthetic construct
  misc_feature 1..23: note = Description of Artificial Sequence: Synthetic oligonucleotide
  source 1..23: mol_type = other RNA
  modified_base 1: mod_base = OTHER; note = 2'-O-methyluridine-3'-phosphorothioate
  modified_base 2: mod_base = OTHER; note = 2'-fluorocytidine-3'-phosphorothioate
  modified_base 3: mod_base = OTHER; note = 2'-O-methyluridine-3'-phosphate
  modified_base 4: mod_base = OTHER; note = 2'-O-methyladenosine-3'-phosphate
  modified_base 5: mod_base = OTHER; note = 2'-O-methyluridine-3'-phosphate
  modified_base 6: mod_base = OTHER; note = 2'-fluorouridine-3'-phosphate
  modified_base 7: mod_base = OTHER; note = 2'-O-methylguanosine-3'-phosphate
  modified_base 8: mod_base = OTHER; note = 2'-fluorocytidine-3'-phosphate
  modified_base 9: mod_base = OTHER; note = 2'-fluorouridine-3'-phosphate
  modified_base 10: mod_base = OTHER; note = 2'-O-methyluridine-3'-phosphate
  modified_base 11: mod_base = OTHER; note = 2'-O-methyluridine-3'-phosphate
  modified_base 12: mod_base = OTHER; note = 2'-O-methyladenosine-3'-phosphate
  modified_base 13: mod_base = OTHER; note = 2'-O-methylguanosine-3'-phosphate
  modified_base 14: mod_base = OTHER; note = 2'-fluorocytidine-3'-phosphate
  modified_base 15: mod_base = OTHER; note = 2'-O-methylcytidine-3'-phosphate
  modified_base 16: mod_base = OTHER; note = 2'-fluoroadenosine-3'-phosphate
  modified_base 17: mod_base = OTHER; note = 2'-O-methylcytidine-3'-phosphate
  modified_base 18: mod_base = OTHER; note = 2'-O-methyladenosine-3'-phosphate
  modified_base 19: mod_base = OTHER; note = 2'-O-methyluridine-3'-phosphate
  modified_base 20: mod_base = OTHER; note = 2'-O-methyladenosine-3'-phosphate
  modified_base 21: mod_base = OTHER; note = 2'-O-methyluridine-3'-phosphorothioate
  modified_base 22: mod_base = OTHER; note = 2'-O-methylguanosine-3'- phosphorothioate
  modified_base 23: mod_base = OTHER; note = 2'-O-methylcytidine-3'-phosphate
tctattgctttagccacatatgc

SEQ ID NO: 2628 - RNA, 21 nt, synthetic construct
  misc_feature 1..21: note = Description of Artificial Sequence: Synthetic oligonucleotide
  source 1..21: mol_type = other RNA
  modified_base 1: mod_base = OTHER; note = 2'-O-methyluridine-3'-phosphorothioate
  modified_base 2: mod_base = OTHER; note = 2'-O-methyladenosine-3'- phosphorothioate
  modified_base 3: mod_base = OTHER; note = 2'-O-methyluridine-3'-phosphate
  modified_base 4: mod_base = OTHER; note = 2'-O-methylguanosine-3'-phosphate
  modified_base 5: mod_base = OTHER; note = 2'-O-methyluridine-3'-phosphate
  modified_base 6: mod_base = OTHER; note = 2'-O-methylguanosine-3'-phosphate
  modified_base 7: mod_base = OTHER; note = 2'-fluoroguanosine-3'-phosphate
  modified_base 8: mod_base = OTHER; note = 2'-O-methylcytidine-3'-phosphate
  modified_base 9: mod_base = OTHER; note = 2'-fluorouridine-3'-phosphate
  modified_base 10: mod_base = OTHER; note = 2'-fluoroadenosine-3'-phosphate
  modified_base 11: mod_base = OTHER; note = 2'-fluoroadenosine-3'-phosphate
  modified_base 12: mod_base = OTHER; note = 2'-O-methyladenosine-3'-phosphate
  modified_base 13: mod_base = OTHER; note = 2'-O-methylguanosine-3'-phosphate
  modified_base 14: mod_base = OTHER; note = 2'-O-methylcytidine-3'-phosphate
  modified_base 15: mod_base = OTHER; note = 2'-O-methyladenosine-3'-phosphate
  modified_base 16: mod_base = OTHER; note = 2'-O-methyladenosine-3'-phosphate
  modified_base 17: mod_base = OTHER; note = 2'-O-methyluridine-3'-phosphate
  modified_base 18: mod_base = OTHER; note = 2'-O-methyladenosine-3'-phosphate
  modified_base 19: mod_base = OTHER; note = 2'-O-methylguanosine-3'-phosphate
  modified_base 20: mod_base = OTHER; note = 2'-O-methyladenosine-3'-phosphate
  modified_base 21: mod_base = OTHER; note = 2'-O-methylcytidine-3'-phosphate attached to N-[tris(N-acetylgalactosamine-alkyl)-amidodecanoyl)]-4-hydr oxyprolinol Hyp-(N-acetylgalactosamine-alkyl)3
tatgtggctaaagcaatagac

SEQ ID NO: 2629 - RNA, 23 nt, synthetic construct
  misc_feature 1..23: note = Description of Artificial Sequence: Synthetic oligonucleotide
  source 1..23: mol_type = other RNA
  modified_base 1: mod_base = OTHER; note = 2'-O-methylguanosine-3'- phosphorothioate
  modified_base 2: mod_base = OTHER; note = 2'-fluorouridine -3'-phosphorothioate
  modified_base 3: mod_base = OTHER; note = 2'-O-methylcytidine-3'-phosphate
  modified_base 4: mod_base = OTHER; note = 2'-O-methyluridine-3'-phosphate
  modified_base 5: mod_base = OTHER; note = 2'-O-methyladenosine-3'-phosphate
  modified_base 6: mod_base = OTHER; note = 2'-fluorouridine-3'-phosphate
  modified_base 7: mod_base = OTHER; note = 2'-O-methyluridine-3'-phosphate
  modified_base 8: mod_base = OTHER; note = 2'-fluoroguanosine-3'-phosphate
  modified_base 9: mod_base = OTHER; note = 2'-fluorocytidine-3'-phosphate
  modified_base 10: mod_base = OTHER; note = 2'-O-methyluridine-3'-phosphate
  modified_base 11: mod_base = OTHER; note = 2'-O-methyluridine-3'-phosphate
  modified_base 12: mod_base = OTHER; note = 2'-O-methyluridine-3'-phosphate
  modified_base 13: mod_base = OTHER; note = 2'-O-methyladenosine-3'-phosphate
  modified_base 14: mod_base = OTHER; note = 2'-fluoroguanosine-3'-phosphate
  modified_base 15: mod_base = OTHER; note = 2'-O-methylcytidine-3'-phosphate
  modified_base 16: mod_base = OTHER; note = 2'-fluorocytidine-3'-phosphate
  modified_base 17: mod_base = OTHER; note = 2'-O-methyladenosine-3'-phosphate
  modified_base 18: mod_base = OTHER; note = 2'-O-methylcytidine-3'-phosphate
  modified_base 19: mod_base = OTHER; note = 2'-O-methyladenosine-3'-phosphate
  modified_base 20: mod_base = OTHER; note = 2'-O-methyluridine-3'-phosphate
  modified_base 21: mod_base = OTHER; note = 2'-O-methyladenosine-3'- phosphorothioate
  modified_base 22: mod_base = OTHER; note = 2'-O-methyluridine-3'-phosphorothioate
  modified_base 23: mod_base = OTHER; note = 2'-O-methylguanosine-3'-phosphate
gtctattgctttagccacatatg

SEQ ID NO: 2630 - RNA, 21 nt, synthetic construct
  misc_feature 1..21: note = Description of Artificial Sequence: Synthetic oligonucleotide
  source 1..21: mol_type = other RNA
  modified_base 1: mod_base = OTHER; note = 2'-O-methylcytidine-3'- phosphorothioate
  modified_base 2: mod_base = OTHER; note = 2'-O-methyluridine-3'-phosphorothioate
  modified_base 3: mod_base = OTHER; note = 2'-O-methylguanosine-3'-phosphate
  modified_base 4: mod_base = OTHER; note = 2'-O-methylcytidine-3'-phosphate
  modified_base 5: mod_base = OTHER; note = 2'-O-methyladenosine-3'-phosphate
  modified_base 6: mod_base = OTHER; note = 2'-O-methyluridine-3'-phosphate
  modified_base 7: mod_base = OTHER; note = 2'-fluoroadenosine-3'-phosphate
  modified_base 8: mod_base = OTHER; note = 2'-O-methyluridine-3'-phosphate
  modified_base 9: mod_base = OTHER; note = 2'-fluoroguanosine-3'-phosphate
  modified_base 10: mod_base = OTHER; note = 2'-fluorouridine-3'-phosphate
  modified_base 11: mod_base = OTHER; note = 2'-fluoroguanosine-3'-phosphate
  modified_base 12: mod_base = OTHER; note = 2'-O-methylguanosine-3'-phosphate
  modified_base 13: mod_base = OTHER; note = 2'-O-methylcytidine-3'-phosphate
  modified_base 14: mod_base = OTHER; note = 2'-O-methyluridine-3'-phosphate
  modified_base 15: mod_base = OTHER; note = 2'-O-methyladenosine-3'-phosphate
  modified_base 16: mod_base = OTHER; note = 2'-O-methyladenosine-3'-phosphate
  modified_base 17: mod_base = OTHER; note = 2'-O-methyladenosine-3'-phosphate
  modified_base 18: mod_base = OTHER; note = 2'-O-methylguanosine-3'-phosphate
  modified_base 19: mod_base = OTHER; note = 2'-O-methylcytidine-3'-phosphate
  modified_base 20: mod_base = OTHER; note = 2'-O-methyladenosine-3'-phosphate
  modified_base 21: mod_base = OTHER; note = 2'-O-methyladenosine-3'-phosphate attached to N-[tris(N-acetylgalactosamine-alkyl)-amidodecanoyl)]-4-hydr oxyprolinol Hyp-(N-acetylgalactosamine-alkyl)3
ctgcatatgtggctaaagcaa

SEQ ID NO: 2631 - RNA, 23 nt, synthetic construct
  misc_feature 1..23: note = Description of Artificial Sequence: Synthetic oligonucleotide
  source 1..23: mol_type = other RNA
  modified_base 1: mod_base = OTHER; note = 2'-O-methyluridine-3'-phosphorothioate
  modified_base 2: mod_base = OTHER; note = 2'-fluorouridine -3'-phosphorothioate
  modified_base 3: mod_base = OTHER; note = 2'-O-methylguanosine-3'-phosphate
  modified_base 4: mod_base = OTHER; note = 2'-O-methylcytidine-3'-phosphate
  modified_base 5: mod_base = OTHER; note = 2'-O-methyluridine-3'-phosphate
  modified_base 6: mod_base = OTHER; note = 2'-fluorouridine-3'-phosphate
  modified_base 7: mod_base = OTHER; note = 2'-O-methyluridine-3'-phosphate
  modified_base 8: mod_base = OTHER; note = 2'-fluoroadenosine-3'-phosphate
  modified_base 9: mod_base = OTHER; note = 2'-fluoroguanosine-3'-phosphate
  modified_base 10: mod_base = OTHER; note = 2'-O-methylcytidine-3'-phosphate
  modified_base 11: mod_base = OTHER; note = 2'-O-methylcytidine-3'-phosphate
  modified_base 12: mod_base = OTHER; note = 2'-O-methyladenosine-3'-phosphate
  modified_base 13: mod_base = OTHER; note = 2'-O-methylcytidine-3'-phosphate
  modified_base 14: mod_base = OTHER; note = 2'-fluoroadenosine-3'-phosphate
  modified_base 15: mod_base = OTHER; note = 2'-O-methyluridine-3'-phosphate
  modified_base 16: mod_base = OTHER; note = 2'-fluoroadenosine-3'-phosphate
  modified_base 17: mod_base = OTHER; note = 2'-O-methyluridine-3'-phosphate
  modified_base 18: mod_base = OTHER; note = 2'-O-methylguanosine-3'-phosphate
  modified_base 19: mod_base = OTHER; note = 2'-O-methylcytidine-3'-phosphate
  modified_base 20: mod_base = OTHER; note = 2'-O-methyladenosine-3'-phosphate
  modified_base 21: mod_base = OTHER; note = 2'-O-methylguanosine-3'- phosphorothioate
  modified_base 22: mod_base = OTHER; note = 2'-O-methylcytidine-3'- phosphorothioate
  modified_base 23: mod_base = OTHER; note = 2'-O-methyladenosine-3'-phosphate
ttgctttagccacatatgcagca

SEQ ID NO: 2632 - RNA, 21 nt, synthetic construct
  misc_feature 1..21: note = Description of Artificial Sequence: Synthetic oligonucleotide
  source 1..21: mol_type = other RNA
  modified_base 1: mod_base = OTHER; note = 2'-O-methylguanosine-3'- phosphorothioate
  modified_base 2: mod_base = OTHER; note = 2'-O-methylcytidine-3'- phosphorothioate
  modified_base 3: mod_base = OTHER; note = 2'-O-methyluridine-3'-phosphate
  modified_base 4: mod_base = OTHER; note = 2'-O-methylguanosine-3'-phosphate
  modified_base 5: mod_base = OTHER; note = 2'-O-methylcytidine-3'-phosphate
  modified_base 6: mod_base = OTHER; note = 2'-O-methyladenosine-3'-phosphate
  modified_base 7: mod_base = OTHER; note = 2'-fluorouridine-3'-phosphate
  modified_base 8: mod_base = OTHER; note = 2'-O-methyladenosine-3'-phosphate
  modified_base 9: mod_base = OTHER; note = 2'-fluorouridine-3'-phosphate
  modified_base 10: mod_base = OTHER; note = 2'-fluoroguanosine-3'-phosphate
  modified_base 11: mod_base = OTHER; note = 2'-fluorouridine-3'-phosphate
  modified_base 12: mod_base = OTHER; note = 2'-O-methylguanosine-3'-phosphate
  modified_base 13: mod_base = OTHER; note = 2'-O-methylguanosine-3'-phosphate
  modified_base 14: mod_base = OTHER; note = 2'-O-methylcytidine-3'-phosphate
  modified_base 15: mod_base = OTHER; note = 2'-O-methyluridine-3'-phosphate
  modified_base 16: mod_base = OTHER; note = 2'-O-methyladenosine-3'-phosphate
  modified_base 17: mod_base = OTHER; note = 2'-O-methyladenosine-3'-phosphate
  modified_base 18: mod_base = OTHER; note = 2'-O-methyladenosine-3'-phosphate
  modified_base 19: mod_base = OTHER; note = 2'-O-methylguanosine-3'-phosphate
  modified_base 20: mod_base = OTHER; note = 2'-O-methylcytidine-3'-phosphate
  modified_base 21: mod_base = OTHER; note = 2'-O-methyladenosine-3'-phosphate attached to N-[tris(N-acetylgalactosamine-alkyl)-amidodecanoyl)]-4-hydr oxyprolinol Hyp-(N-acetylgalactosamine-alkyl)3
gctgcatatgtggctaaagca

SEQ ID NO: 2633 - RNA, 23 nt, synthetic construct
  misc_feature 1..23: note = Description of Artificial Sequence: Synthetic oligonucleotide
  source 1..23: mol_type = other RNA
  modified_base 1: mod_base = OTHER; note = 2'-O-methyluridine-3'-phosphorothioate
  modified_base 2: mod_base = OTHER; note = 2'-fluoroguanosine-3'-phosphorothioate
  modified_base 3: mod_base = OTHER; note = 2'-O-methylcytidine-3'-phosphate
  modified_base 4: mod_base = OTHER; note = 2'-O-methyluridine-3'-phosphate
  modified_base 5: mod_base = OTHER; note = 2'-O-methyluridine-3'-phosphate
  modified_base 6: mod_base = OTHER; note = 2'-fluorouridine-3'-phosphate
  modified_base 7: mod_base = OTHER; note = 2'-O-methyladenosine-3'-phosphate
  modified_base 8: mod_base = OTHER; note = 2'-fluoroguanosine-3'-phosphate
  modified_base 9: mod_base = OTHER; note = 2'-fluorocytidine-3'-phosphate
  modified_base 10: mod_base = OTHER; note = 2'-O-methylcytidine-3'-phosphate
  modified_base 11: mod_base = OTHER; note = 2'-O-methyladenosine-3'-phosphate
  modified_base 12: mod_base = OTHER; note = 2'-O-methylcytidine-3'-phosphate
  modified_base 13: mod_base = OTHER; note = 2'-O-methyladenosine-3'-phosphate
  modified_base 14: mod_base = OTHER; note = 2'-fluorouridine-3'-phosphate
  modified_base 15: mod_base = OTHER; note = 2'-O-methyladenosine-3'-phosphate
  modified_base 16: mod_base = OTHER; note = 2'-fluorouridine-3'-phosphate
  modified_base 17: mod_base = OTHER; note = 2'-O-methylguanosine-3'-phosphate
  modified_base 18: mod_base = OTHER; note = 2'-O-methylcytidine-3'-phosphate
  modified_base 19: mod_base = OTHER; note = 2'-O-methyladenosine-3'-phosphate
  modified_base 20: mod_base = OTHER; note = 2'-O-methylguanosine-3'-phosphate
  modified_base 21: mod_base = OTHER; note = 2'-O-methylcytidine-3'- phosphorothioate
  modified_base 22: mod_base = OTHER; note = 2'-O-methyladenosine-3'- phosphorothioate
  modified_base 23: mod_base = OTHER; note = 2'-O-methyladenosine-3'-phosphate
tgctttagccacatatgcagcaa

SEQ ID NO: 2634 - RNA, 21 nt, synthetic construct
  misc_feature 1..21: note = Description of Artificial Sequence: Synthetic oligonucleotide
  source 1..21: mol_type = other RNA
  modified_base 1: mod_base = OTHER; note = 2'-O-methyladenosine-3'- phosphorothioate
  modified_base 2: mod_base = OTHER; note = 2'-O-methylguanosine-3'- phosphorothioate
  modified_base 3: mod_base = OTHER; note = 2'-O-methyladenosine-3'-phosphate
  modified_base 4: mod_base = OTHER; note = 2'-O-methylcytidine-3'-phosphate
  modified_base 5: mod_base = OTHER; note = 2'-O-methylguanosine-3'-phosphate
  modified_base 6: mod_base = OTHER; note = 2'-O-methyladenosine-3'-phosphate
  modified_base 7: mod_base = OTHER; note = 2'-fluorocytidine-3'-phosphate
  modified_base 8: mod_base = OTHER; note = 2'-O-methyladenosine-3'-phosphate
  modified_base 9: mod_base = OTHER; note = 2'-fluoroguanosine-3'-phosphate
  modified_base 10: mod_base = OTHER; note = 2'-fluorouridine-3'-phosphate
  modified_base 11: mod_base = OTHER; note = 2'-fluoroguanosine-3'-phosphate
  modified_base 12: mod_base = OTHER; note = 2'-O-methylguanosine-3'-phosphate
  modified_base 13: mod_base = OTHER; note = 2'-O-methyladenosine-3'-phosphate
  modified_base 14: mod_base = OTHER; note = 2'-O-methylcytidine-3'-phosphate
  modified_base 15: mod_base = OTHER; note = 2'-O-methyluridine-3'-phosphate
  modified_base 16: mod_base = OTHER; note = 2'-O-methyluridine-3'-phosphate
  modified_base 17: mod_base = OTHER; note = 2'-O-methylguanosine-3'-phosphate
  modified_base 18: mod_base = OTHER; note = 2'-O-methylcytidine-3'-phosphate
  modified_base 19: mod_base = OTHER; note = 2'-O-methyluridine-3'-phosphate
  modified_base 20: mod_base = OTHER; note = 2'-O-methylguanosine-3'-phosphate
  modified_base 21: mod_base = OTHER; note = 2'-O-methylcytidine-3'-phosphate attached to N-[tris(N-acetylgalactosamine-alkyl)-amidodecanoyl)]-4-hydr oxyprolinol Hyp-(N-acetylgalactosamine-alkyl)3
agacgacagtggacttgctgc

SEQ ID NO: 2635 - RNA, 23 nt, synthetic construct
  misc_feature 1..23: note = Description of Artificial Sequence: Synthetic oligonucleotide
  source 1..23: mol_type = other RNA
  modified_base 1: mod_base = OTHER; note = 2'-O-methylguanosine-3'- phosphorothioate
  modified_base 2: mod_base = OTHER; note = 2'-fluorocytidine-3'-phosphorothioate
  modified_base 3: mod_base = OTHER; note = 2'-O-methyladenosine-3'-phosphate
  modified_base 4: mod_base = OTHER; note = 2'-O-methylguanosine-3'-phosphate
  modified_base 5: mod_base = OTHER; note = 2'-O-methylcytidine-3'-phosphate
  modified_base 6: mod_base = OTHER; note = 2'-fluoroadenosine-3'-phosphate
  modified_base 7: mod_base = OTHER; note = 2'-O-methyladenosine-3'-phosphate
  modified_base 8: mod_base = OTHER; note = 2'-fluoroguanosine-3'-phosphate
  modified_base 9: mod_base = OTHER; note = 2'-fluorouridine-3'-phosphate
  modified_base 10: mod_base = OTHER; note = 2'-O-methylcytidine-3'-phosphate
  modified_base 11: mod_base = OTHER; note = 2'-O-methylcytidine-3'-phosphate
  modified_base 12: mod_base = OTHER; note = 2'-O-methyladenosine-3'-phosphate
  modified_base 13: mod_base = OTHER; note = 2'-O-methylcytidine-3'-phosphate
  modified_base 14: mod_base = OTHER; note = 2'-fluorouridine-3'-phosphate
  modified_base 15: mod_base = OTHER; note = 2'-O-methylguanosine-3'-phosphate
  modified_base 16: mod_base = OTHER; note = 2'-fluorouridine-3'-phosphate
  modified_base 17: mod_base = OTHER; note = 2'-O-methylcytidine-3'-phosphate
  modified_base 18: mod_base = OTHER; note = 2'-O-methylguanosine-3'-phosphate
  modified_base 19: mod_base = OTHER; note = 2'-O-methyluridine-3'-phosphate
  modified_base 20: mod_base = OTHER; note = 2'-O-methylcytidine-3'-phosphate
  modified_base 21: mod_base = OTHER; note = 2'-O-methyluridine-3'-phosphorothioate
  modified_base 22: mod_base = OTHER; note = 2'-O-methylcytidine-3'- phosphorothioate
  modified_base 23: mod_base = OTHER; note = 2'-O-methylcytidine-3'-phosphate
gcagcaagtccactgtcgtctcc

SEQ ID NO: 2636 - RNA, 21 nt, synthetic construct
  misc_feature 1..21: note = Description of Artificial Sequence: Synthetic oligonucleotide
  source 1..21: mol_type = other RNA
  modified_base 1: mod_base = OTHER; note = 2'-O-methylguanosine-3'- phosphorothioate
  modified_base 2: mod_base = OTHER; note = 2'-O-methyladenosine-3'- phosphorothioate
  modified_base 3: mod_base = OTHER; note = 2'-O-methylcytidine-3'-phosphate
  modified_base 4: mod_base = OTHER; note = 2'-O-methylguanosine-3'-phosphate
  modified_base 5: mod_base = OTHER; note = 2'-O-methyladenosine-3'-phosphate
  modified_base 6: mod_base = OTHER; note = 2'-O-methylcytidine-3'-phosphate
  modified_base 7: mod_base = OTHER; note = 2'-fluoroadenosine-3'-phosphate
  modified_base 8: mod_base = OTHER; note = 2'-O-methylguanosine-3'-phosphate
  modified_base 9: mod_base = OTHER; note = 2'-fluorouridine-3'-phosphate
  modified_base 10: mod_base = OTHER; note = 2'-fluoroguanosine-3'-phosphate
  modified_base 11: mod_base = OTHER; note = 2'-fluoroguanosine-3'-phosphate
  modified_base 12: mod_base = OTHER; note = 2'-O-methyladenosine-3'-phosphate
  modified_base 13: mod_base = OTHER; note = 2'-O-methylcytidine-3'-phosphate
  modified_base 14: mod_base = OTHER; note = 2'-O-methyluridine-3'-phosphate
  modified_base 15: mod_base = OTHER; note = 2'-O-methyluridine-3'-phosphate
  modified_base 16: mod_base = OTHER; note = 2'-O-methylguanosine-3'-phosphate
  modified_base 17: mod_base = OTHER; note = 2'-O-methylcytidine-3'-phosphate
  modified_base 18: mod_base = OTHER; note = 2'-O-methyluridine-3'-phosphate
  modified_base 19: mod_base = OTHER; note = 2'-O-methylguanosine-3'-phosphate
  modified_base 20: mod_base = OTHER; note = 2'-O-methylcytidine-3'-phosphate
  modified_base 21: mod_base = OTHER; note = 2'-O-methyladenosine-3'-phosphate attached to N-[tris(N-acetylgalactosamine-alkyl)-amidodecanoyl)]-4-hydr oxyprolinol Hyp-(N-acetylgalactosamine-alkyl)3
gacgacagtggacttgctgca

SEQ ID NO: 2637 - RNA, 23 nt, synthetic construct
  misc_feature 1..23: note = Description of Artificial Sequence: Synthetic oligonucleotide
  source 1..23: mol_type = other RNA
  modified_base 1: mod_base = OTHER; note = 2'-O-methyluridine-3'-phosphorothioate
  modified_base 2: mod_base = OTHER; note = 2'-fluoroguanosine-3'-phosphorothioate
  modified_base 3: mod_base = OTHER; note = 2'-O-methylcytidine-3'-phosphate
  modified_base 4: mod_base = OTHER; note = 2'-O-methyladenosine-3'-phosphate
  modified_base 5: mod_base = OTHER; note = 2'-O-methylguanosine-3'-phosphate
  modified_base 6: mod_base = OTHER; note = 2'-fluorocytidine-3'-phosphate
  modified_base 7: mod_base = OTHER; note = 2'-O-methyladenosine-3'-phosphate
  modified_base 8: mod_base = OTHER; note = 2'-fluoroadenosine-3'-phosphate
  modified_base 9: mod_base = OTHER; note = 2'-fluoroguanosine-3'-phosphate
  modified_base 10: mod_base = OTHER; note = 2'-O-methyluridine-3'-phosphate
  modified_base 11: mod_base = OTHER; note = 2'-O-methylcytidine-3'-phosphate
  modified_base 12: mod_base = OTHER; note = 2'-O-methylcytidine-3'-phosphate
  modified_base 13: mod_base = OTHER; note = 2'-O-methyladenosine-3'-phosphate
  modified_base 14: mod_base = OTHER; note = 2'-fluorocytidine-3'-phosphate
  modified_base 15: mod_base = OTHER; note = 2'-O-methyluridine-3'-phosphate
  modified_base 16: mod_base = OTHER; note = 2'-fluoroguanosine-3'-phosphate
  modified_base 17: mod_base = OTHER; note = 2'-O-methyluridine-3'-phosphate
  modified_base 18: mod_base = OTHER; note = 2'-O-methylcytidine-3'-phosphate
  modified_base 19: mod_base = OTHER; note = 2'-O-methylguanosine-3'-phosphate
  modified_base 20: mod_base = OTHER; note = 2'-O-methyluridine-3'-phosphate
  modified_base 21: mod_base = OTHER; note = 2'-O-methylcytidine-3'- phosphorothioate
  modified_base 22: mod_base = OTHER; note = 2'-O-methyluridine-3'-phosphorothioate
  modified_base 23: mod_base = OTHER; note = 2'-O-methylcytidine-3'-phosphate
tgcagcaagtccactgtcgtctc

SEQ ID NO: 2638 - RNA, 21 nt, synthetic construct
  misc_feature 1..21: note = Description of Artificial Sequence: Synthetic oligonucleotide
  source 1..21: mol_type = other RNA
  modified_base 1: mod_base = OTHER; note = 2'-O-methyluridine-3'-phosphorothioate
  modified_base 2: mod_base = OTHER; note = 2'-O-methyluridine-3'-phosphorothioate
  modified_base 3: mod_base = OTHER; note = 2'-O-methylguanosine-3'-phosphate
  modified_base 4: mod_base = OTHER; note = 2'-O-methylguanosine-3'-phosphate
  modified_base 5: mod_base = OTHER; note = 2'-O-methyladenosine-3'-phosphate
  modified_base 6: mod_base = OTHER; note = 2'-O-methylguanosine-3'-phosphate
  modified_base 7: mod_base = OTHER; note = 2'-fluoroadenosine-3'-phosphate
  modified_base 8: mod_base = OTHER; note = 2'-O-methylcytidine-3'-phosphate
  modified_base 9: mod_base = OTHER; note = 2'-fluoroguanosine-3'-phosphate
  modified_base 10: mod_base = OTHER; note = 2'-fluoroadenosine-3'-phosphate
  modified_base 11: mod_base = OTHER; note = 2'-fluorocytidine-3'-phosphate
  modified_base 12: mod_base = OTHER; note = 2'-O-methyladenosine-3'-phosphate
  modified_base 13: mod_base = OTHER; note = 2'-O-methylguanosine-3'-phosphate
  modified_base 14: mod_base = OTHER; note = 2'-O-methyluridine-3'-phosphate
  modified_base 15: mod_base = OTHER; note = 2'-O-methylguanosine-3'-phosphate
  modified_base 16: mod_base = OTHER; note = 2'-O-methylguanosine-3'-phosphate
  modified_base 17: mod_base = OTHER; note = 2'-O-methyladenosine-3'-phosphate
  modified_base 18: mod_base = OTHER; note = 2'-O-methylcytidine-3'-phosphate
  modified_base 19: mod_base = OTHER; note = 2'-O-methyluridine-3'-phosphate
  modified_base 20: mod_base = OTHER; note = 2'-O-methyluridine-3'-phosphate
  modified_base 21: mod_base = OTHER; note = 2'-O-methylguanosine-3'-phosphate attached to N-[tris(N-acetylgalactosamine-alkyl)-amidodecanoyl)]-4-hydr oxyprolinol Hyp-(N-acetylgalactosamine-alkyl)3
ttggagacgacagtggacttg

SEQ ID NO: 2639 - RNA, 23 nt, synthetic construct
  misc_feature 1..23: note = Description of Artificial Sequence: Synthetic oligonucleotide
  source 1..23: mol_type = other RNA
  modified_base 1: mod_base = OTHER; note = 2'-O-methylcytidine-3'- phosphorothioate
  modified_base 2: mod_base = OTHER; note = 2'-fluoroadenosine-3'-phosphorothioate
  modified_base 3: mod_base = OTHER; note = 2'-O-methyladenosine-3'-phosphate
  modified_base 4: mod_base = OTHER; note = 2'-O-methylguanosine-3'-phosphate
  modified_base 5: mod_base = OTHER; note = 2'-O-methyluridine-3'-phosphate
  modified_base 6: mod_base = OTHER; note = 2'-fluorocytidine-3'-phosphate
  modified_base 7: mod_base = OTHER; note = 2'-O-methylcytidine-3'-phosphate
  modified_base 8: mod_base = OTHER; note = 2'-fluoroadenosine-3'-phosphate
  modified_base 9: mod_base = OTHER; note = 2'-fluorocytidine-3'-phosphate
  modified_base 10: mod_base = OTHER; note = 2'-O-methyluridine-3'-phosphate
  modified_base 11: mod_base = OTHER; note = 2'-O-methylguanosine-3'-phosphate
  modified_base 12: mod_base = OTHER; note = 2'-O-methyluridine-3'-phosphate
  modified_base 13: mod_base = OTHER; note = 2'-O-methylcytidine-3'-phosphate
  modified_base 14: mod_base = OTHER; note = 2'-fluoroguanosine-3'-phosphate
  modified_base 15: mod_base = OTHER; note = 2'-O-methyluridine-3'-phosphate
  modified_base 16: mod_base = OTHER; note = 2'-fluorocytidine-3'-phosphate
  modified_base 17: mod_base = OTHER; note = 2'-O-methyluridine-3'-phosphate
  modified_base 18: mod_base = OTHER; note = 2'-O-methylcytidine-3'-phosphate
  modified_base 19: mod_base = OTHER; note = 2'-O-methylcytidine-3'-phosphate
  modified_base 20: mod_base = OTHER; note = 2'-O-methyladenosine-3'-phosphate
  modified_base 21: mod_base = OTHER; note = 2'-O-methyladenosine-3'- phosphorothioate
  modified_base 22: mod_base = OTHER; note = 2'-O-methyladenosine-3'- phosphorothioate
  modified_base 23: mod_base = OTHER; note = 2'-O-methyladenosine-3'-phosphate
caagtccactgtcgtctccaaaa

SEQ ID NO: 2640 - RNA, 21 nt, synthetic construct
  misc_feature 1..21: note = Description of Artificial Sequence: Synthetic oligonucleotide
  source 1..21: mol_type = other RNA
  modified_base 1: mod_base = OTHER; note = 2'-O-methyluridine-3'-phosphorothioate
  modified_base 2: mod_base = OTHER; note = 2'-O-methyluridine-3'-phosphorothioate
  modified_base 3: mod_base = OTHER; note = 2'-O-methyluridine-3'-phosphate
  modified_base 4: mod_base = OTHER; note = 2'-O-methylguanosine-3'-phosphate
  modified_base 5: mod_base = OTHER; note = 2'-O-methylguanosine-3'-phosphate
  modified_base 6: mod_base = OTHER; note = 2'-O-methyladenosine-3'-phosphate
  modified_base 7: mod_base = OTHER; note = 2'-fluoroguanosine-3'-phosphate
  modified_base 8: mod_base = OTHER; note = 2'-O-methyladenosine-3'-phosphate
  modified_base 9: mod_base = OTHER; note = 2'-fluorocytidine-3'-phosphate
  modified_base 10: mod_base = OTHER; note = 2'-fluoroguanosine-3'-phosphate
  modified_base 11: mod_base = OTHER; note = 2'-fluoroadenosine-3'-phosphate
  modified_base 12: mod_base = OTHER; note = 2'-O-methylcytidine-3'-phosphate
  modified_base 13: mod_base = OTHER; note = 2'-O-methyladenosine-3'-phosphate
  modified_base 14: mod_base = OTHER; note = 2'-O-methylguanosine-3'-phosphate
  modified_base 15: mod_base = OTHER; note = 2'-O-methyluridine-3'-phosphate
  modified_base 16: mod_base = OTHER; note = 2'-O-methylguanosine-3'-phosphate
  modified_base 17: mod_base = OTHER; note = 2'-O-methylguanosine-3'-phosphate
  modified_base 18: mod_base = OTHER; note = 2'-O-methyladenosine-3'-phosphate
  modified_base 19: mod_base = OTHER; note = 2'-O-methylcytidine-3'-phosphate
  modified_base 20: mod_base = OTHER; note = 2'-O-methyluridine-3'-phosphate
  modified_base 21: mod_base = OTHER; note = 2'-O-methyluridine-3'-phosphate attached to N-[tris(N-acetylgalactosamine-alkyl)-amidodecanoyl)]-4-hydr oxyprolinol Hyp-(N-acetylgalactosamine-alkyl)3
tttggagacgacagtggactt

SEQ ID NO: 2641 - RNA, 23 nt, synthetic construct
  misc_feature 1..23: note = Description of Artificial Sequence: Synthetic oligonucleotide
  source 1..23: mol_type = other RNA
  modified_base 1: mod_base = OTHER; note = 2'-O-methyladenosine-3'- phosphorothioate
  modified_base 2: mod_base = OTHER; note = 2'-fluoroadenosine-3'-phosphorothioate
  modified_base 3: mod_base = OTHER; note = 2'-O-methylguanosine-3'-phosphate
  modified_base 4: mod_base = OTHER; note = 2'-O-methyluridine-3'-phosphate
  modified_base 5: mod_base = OTHER; note = 2'-O-methylcytidine-3'-phosphate
  modified_base 6: mod_base = OTHER; note = 2'-fluorocytidine-3'-phosphate
  modified_base 7: mod_base = OTHER; note = 2'-O-methyladenosine-3'-phosphate
  modified_base 8: mod_base = OTHER; note = 2'-fluorocytidine-3'-phosphate
  modified_base 9: mod_base = OTHER; note = 2'-fluorouridine-3'-phosphate
  modified_base 10: mod_base = OTHER; note = 2'-O-methylguanosine-3'-phosphate
  modified_base 11: mod_base = OTHER; note = 2'-O-methyluridine-3'-phosphate
  modified_base 12: mod_base = OTHER; note = 2'-O-methylcytidine-3'-phosphate
  modified_base 13: mod_base = OTHER; note = 2'-O-methylguanosine-3'-phosphate
  modified_base 14: mod_base = OTHER; note = 2'-fluorouridine-3'-phosphate
  modified_base 15: mod_base = OTHER; note = 2'-O-methylcytidine-3'-phosphate
  modified_base 16: mod_base = OTHER; note = 2'-fluorouridine-3'-phosphate
  modified_base 17: mod_base = OTHER; note = 2'-O-methylcytidine-3'-phosphate
  modified_base 18: mod_base = OTHER; note = 2'-O-methylcytidine-3'-phosphate
  modified_base 19: mod_base = OTHER; note = 2'-O-methyladenosine-3'-phosphate
  modified_base 20: mod_base = OTHER; note = 2'-O-methyladenosine-3'-phosphate
  modified_base 21: mod_base = OTHER; note = 2'-O-methyladenosine-3'- phosphorothioate
  modified_base 22: mod_base = OTHER; note = 2'-O-methyladenosine-3'- phosphorothioate
  modified_base 23: mod_base = OTHER; note = 2'-O-methyluridine-3'-phosphate
aagtccactgtcgtctccaaaat

SEQ ID NO: 2642 - RNA, 21 nt, synthetic construct
  misc_feature 1..21: note = Description of Artificial Sequence: Synthetic oligonucleotide
  source 1..21: mol_type = other RNA
  modified_base 1: mod_base = OTHER; note = 2'-O-methylguanosine-3'- phosphorothioate
  modified_base 2: mod_base = OTHER; note = 2'-O-methylguanosine-3'- phosphorothioate
  modified_base 3: mod_base = OTHER; note = 2'-O-methylcytidine-3'-phosphate
  modified_base 4: mod_base = OTHER; note = 2'-O-methylcytidine-3'-phosphate
  modified_base 5: mod_base = OTHER; note = 2'-O-methyladenosine-3'-phosphate
  modified_base 6: mod_base = OTHER; note = 2'-O-methylcytidine-3'-phosphate
  modified_base 7: mod_base = OTHER; note = 2'-fluorocytidine-3'-phosphate
  modified_base 8: mod_base = OTHER; note = 2'-O-methyluridine-3'-phosphate
  modified_base 9: mod_base = OTHER; note = 2'-fluorocytidine-3'-phosphate
  modified_base 10: mod_base = OTHER; note = 2'-fluorocytidine-3'-phosphate
  modified_base 11: mod_base = OTHER; note = 2'-fluorouridine-3'-phosphate
  modified_base 12: mod_base = OTHER; note = 2'-O-methylcytidine-3'-phosphate
  modified_base 13: mod_base = OTHER; note = 2'-O-methyladenosine-3'-phosphate
  modified_base 14: mod_base = OTHER; note = 2'-O-methyladenosine-3'-phosphate
  modified_base 15: mod_base = OTHER; note = 2'-O-methyluridine-3'-phosphate
  modified_base 16: mod_base = OTHER; note = 2'-O-methyluridine-3'-phosphate
  modified_base 17: mod_base = OTHER; note = 2'-O-methylguanosine-3'-phosphate
  modified_base 18: mod_base = OTHER; note = 2'-O-methyladenosine-3'-phosphate
  modified_base 19: mod_base = OTHER; note = 2'-O-methyladenosine-3'-phosphate
  modified_base 20: mod_base = OTHER; note = 2'-O-methylguanosine-3'-phosphate
  modified_base 21: mod_base = OTHER; note = 2'-O-methyladenosine-3'-phosphate attached to N-[tris(N-acetylgalactosamine-alkyl)-amidodecanoyl)]-4-hydr oxyprolinol Hyp-(N-acetylgalactosamine-alkyl)3
ggccacctcctcaattgaaga

SEQ ID NO: 2643 - RNA, 23 nt, synthetic construct
  misc_feature 1..23: note = Description of Artificial Sequence: Synthetic oligonucleotide
  source 1..23: mol_type = other RNA
  modified_base 1: mod_base = OTHER; note = 2'-O-methyluridine-3'-phosphorothioate
  modified_base 2: mod_base = OTHER; note = 2'-fluorocytidine-3'-phosphorothioate
  modified_base 3: mod_base = OTHER; note = 2'-O-methyluridine-3'-phosphate
  modified_base 4: mod_base = OTHER; note = 2'-O-methyluridine-3'-phosphate
  modified_base 5: mod_base = OTHER; note = 2'-O-methylcytidine-3'-phosphate
  modified_base 6: mod_base = OTHER; note = 2'-fluoroadenosine-3'-phosphate
  modified_base 7: mod_base = OTHER; note = 2'-O-methyladenosine-3'-phosphate
  modified_base 8: mod_base = OTHER; note = 2'-fluorouridine-3'-phosphate
  modified_base 9: mod_base = OTHER; note = 2'-fluorouridine-3'-phosphate
  modified_base 10: mod_base = OTHER; note = 2'-O-methylguanosine-3'-phosphate
  modified_base 11: mod_base = OTHER; note = 2'-O-methyladenosine-3'-phosphate
  modified_base 12: mod_base = OTHER; note = 2'-O-methylguanosine-3'-phosphate
  modified_base 13: mod_base = OTHER; note = 2'-O-methylguanosine-3'-phosphate
  modified_base 14: mod_base = OTHER; note = 2'-fluoroadenosine-3'-phosphate
  modified_base 15: mod_base = OTHER; note = 2'-O-methylguanosine-3'-phosphate
  modified_base 16: mod_base = OTHER; note = 2'-fluoroguanosine-3'-phosphate
  modified_base 17: mod_base = OTHER; note = 2'-O-methyluridine-3'-phosphate
  modified_base 18: mod_base = OTHER; note = 2'-O-methylguanosine-3'-phosphate
  modified_base 19: mod_base = OTHER; note = 2'-O-methylguanosine-3'-phosphate
  modified_base 20: mod_base = OTHER; note = 2'-O-methylcytidine-3'-phosphate
  modified_base 21: mod_base = OTHER; note = 2'-O-methylcytidine-3'- phosphorothioate
  modified_base 22: mod_base = OTHER; note = 2'-O-methylcytidine-3'- phosphorothioate
  modified_base 23: mod_base = OTHER; note = 2'-O-methyladenosine-3'-phosphate
tcttcaattgaggaggtggccca

SEQ ID NO: 2644 - RNA, 21 nt, synthetic construct
  misc_feature 1..21: note = Description of Artificial Sequence: Synthetic oligonucleotide
  source 1..21: mol_type = other RNA
  modified_base 1: mod_base = OTHER; note = 2'-O-methylguanosine-3'- phosphorothioate
  modified_base 2: mod_base = OTHER; note = 2'-O-methylcytidine-3'- phosphorothioate
  modified_base 3: mod_base = OTHER; note = 2'-O-methylcytidine-3'-phosphate
  modified_base 4: mod_base = OTHER; note = 2'-O-methyladenosine-3'-phosphate
  modified_base 5: mod_base = OTHER; note = 2'-O-methylcytidine-3'-phosphate
  modified_base 6: mod_base = OTHER; note = 2'-O-methylcytidine-3'-phosphate
  modified_base 7: mod_base = OTHER; note = 2'-fluorouridine-3'-phosphate
  modified_base 8: mod_base = OTHER; note = 2'-O-methylcytidine-3'-phosphate
  modified_base 9: mod_base = OTHER; note = 2'-fluorocytidine-3'-phosphate
  modified_base 10: mod_base = OTHER; note = 2'-fluorouridine-3'-phosphate
  modified_base 11: mod_base = OTHER; note = 2'-fluorocytidine-3'-phosphate
  modified_base 12: mod_base = OTHER; note = 2'-O-methyladenosine-3'-phosphate
  modified_base 13: mod_base = OTHER; note = 2'-O-methyladenosine-3'-phosphate
  modified_base 14: mod_base = OTHER; note = 2'-O-methyluridine-3'-phosphate
  modified_base 15: mod_base = OTHER; note = 2'-O-methyluridine-3'-phosphate
  modified_base 16: mod_base = OTHER; note = 2'-O-methylguanosine-3'-phosphate
  modified_base 17: mod_base = OTHER; note = 2'-O-methyladenosine-3'-phosphate
  modified_base 18: mod_base = OTHER; note = 2'-O-methyladenosine-3'-phosphate
  modified_base 19: mod_base = OTHER; note = 2'-O-methylguanosine-3'-phosphate
  modified_base 20: mod_base = OTHER; note = 2'-O-methyladenosine-3'-phosphate
  modified_base 21: mod_base = OTHER; note = 2'-O-methyladenosine-3'-phosphate attached to N-[tris(N-acetylgalactosamine-alkyl)-amidodecanoyl)]-4-hydr oxyprolinol Hyp-(N-acetylgalactosamine-alkyl)3
gccacctcctcaattgaagaa

SEQ ID NO: 2645 - RNA, 23 nt, synthetic construct
  misc_feature 1..23: note = Description of Artificial Sequence: Synthetic oligonucleotide
  source 1..23: mol_type = other RNA
  modified_base 1: mod_base = OTHER; note = 2'-O-methyluridine-3'-phosphorothioate
  modified_base 2: mod_base = OTHER; note = 2'-fluorouridine -3'-phosphorothioate
  modified_base 3: mod_base = OTHER; note = 2'-O-methylcytidine-3'-phosphate
  modified_base 4: mod_base = OTHER; note = 2'-O-methyluridine-3'-phosphate
  modified_base 5: mod_base = OTHER; note = 2'-O-methyluridine-3'-phosphate
  modified_base 6: mod_base = OTHER; note = 2'-fluorocytidine-3'-phosphate
  modified_base 7: mod_base = OTHER; note = 2'-O-methyladenosine-3'-phosphate
  modified_base 8: mod_base = OTHER; note = 2'-fluoroadenosine-3'-phosphate
  modified_base 9: mod_base = OTHER; note = 2'-fluorouridine-3'-phosphate
  modified_base 10: mod_base = OTHER; note = 2'-O-methyluridine-3'-phosphate
  modified_base 11: mod_base = OTHER; note = 2'-O-methylguanosine-3'-phosphate
  modified_base 12: mod_base = OTHER; note = 2'-O-methyladenosine-3'-phosphate
  modified_base 13: mod_base = OTHER; note = 2'-O-methylguanosine-3'-phosphate
  modified_base 14: mod_base = OTHER; note = 2'-fluoroguanosine-3'-phosphate
  modified_base 15: mod_base = OTHER; note = 2'-O-methyladenosine-3'-phosphate
  modified_base 16: mod_base = OTHER; note = 2'-fluoroguanosine-3'-phosphate
  modified_base 17: mod_base = OTHER; note = 2'-O-methylguanosine-3'-phosphate
  modified_base 18: mod_base = OTHER; note = 2'-O-methyluridine-3'-phosphate
  modified_base 19: mod_base = OTHER; note = 2'-O-methylguanosine-3'-phosphate
  modified_base 20: mod_base = OTHER; note = 2'-O-methylguanosine-3'-phosphate
  modified_base 21: mod_base = OTHER; note = 2'-O-methylcytidine-3'- phosphorothioate
  modified_base 22: mod_base = OTHER; note = 2'-O-methylcytidine-3'- phosphorothioate
  modified_base 23: mod_base = OTHER; note = 2'-O-methylcytidine-3'-phosphate
ttcttcaattgaggaggtggccc

SEQ ID NO: 2646 - RNA, 21 nt, synthetic construct
  misc_feature 1..21: note = Description of Artificial Sequence: Synthetic oligonucleotide
  source 1..21: mol_type = other RNA
  modified_base 1: mod_base = OTHER; note = 2'-O-methylcytidine-3'- phosphorothioate
  modified_base 2: mod_base = OTHER; note = 2'-O-methylcytidine-3'- phosphorothioate
  modified_base 3: mod_base = OTHER; note = 2'-O-methyluridine-3'-phosphate
  modified_base 4: mod_base = OTHER; note = 2'-O-methylguanosine-3'-phosphate
  modified_base 5: mod_base = OTHER; note = 2'-O-methylguanosine-3'-phosphate
  modified_base 6: mod_base = OTHER; note = 2'-O-methylguanosine-3'-phosphate
  modified_base 7: mod_base = OTHER; note = 2'-fluorocytidine-3'-phosphate
  modified_base 8: mod_base = OTHER; note = 2'-O-methylcytidine-3'-phosphate
  modified_base 9: mod_base = OTHER; note = 2'-fluoroadenosine-3'-phosphate
  modified_base 10: mod_base = OTHER; note = 2'-fluorocytidine-3'-phosphate
  modified_base 11: mod_base = OTHER; note = 2'-fluorocytidine-3'-phosphate
  modified_base 12: mod_base = OTHER; note = 2'-O-methyluridine-3'-phosphate
  modified_base 13: mod_base = OTHER; note = 2'-O-methylcytidine-3'-phosphate
  modified_base 14: mod_base = OTHER; note = 2'-O-methylcytidine-3'-phosphate
  modified_base 15: mod_base = OTHER; note = 2'-O-methyluridine-3'-phosphate
  modified_base 16: mod_base = OTHER; note = 2'-O-methylcytidine-3'-phosphate
  modified_base 17: mod_base = OTHER; note = 2'-O-methyladenosine-3'-phosphate
  modified_base 18: mod_base = OTHER; note = 2'-O-methyladenosine-3'-phosphate
  modified_base 19: mod_base = OTHER; note = 2'-O-methyluridine-3'-phosphate
  modified_base 20: mod_base = OTHER; note = 2'-O-methyluridine-3'-phosphate
  modified_base 21: mod_base = OTHER; note = 2'-O-methylguanosine-3'-phosphate attached to N-[tris(N-acetylgalactosamine-alkyl)-amidodecanoyl)]-4-hydr oxyprolinol Hyp-(N-acetylgalactosamine-alkyl)3
cctgggccacctcctcaattg

SEQ ID NO: 2647 - RNA, 23 nt, synthetic construct
  misc_feature 1..23: note = Description of Artificial Sequence: Synthetic oligonucleotide
  source 1..23: mol_type = other RNA
  modified_base 1: mod_base = OTHER; note = 2'-O-methylcytidine-3'- phosphorothioate
  modified_base 2: mod_base = OTHER; note = 2'-fluoroadenosine-3'-phosphorothioate
  modified_base 3: mod_base = OTHER; note = 2'-O-methyladenosine-3'-phosphate
  modified_base 4: mod_base = OTHER; note = 2'-O-methyluridine-3'-phosphate
  modified_base 5: mod_base = OTHER; note = 2'-O-methyluridine-3'-phosphate
  modified_base 6: mod_base = OTHER; note = 2'-fluoroguanosine-3'-phosphate
  modified_base 7: mod_base = OTHER; note = 2'-O-methyladenosine-3'-phosphate
  modified_base 8: mod_base = OTHER; note = 2'-fluoroguanosine-3'-phosphate
  modified_base 9: mod_base = OTHER; note = 2'-fluoroguanosine-3'-phosphate
  modified_base 10: mod_base = OTHER; note = 2'-O-methyladenosine-3'-phosphate
  modified_base 11: mod_base = OTHER; note = 2'-O-methylguanosine-3'-phosphate
  modified_base 12: mod_base = OTHER; note = 2'-O-methylguanosine-3'-phosphate
  modified_base 13: mod_base = OTHER; note = 2'-O-methyluridine-3'-phosphate
  modified_base 14: mod_base = OTHER; note = 2'-fluoroguanosine-3'-phosphate
  modified_base 15: mod_base = OTHER; note = 2'-O-methylguanosine-3'-phosphate
  modified_base 16: mod_base = OTHER; note = 2'-fluorocytidine-3'-phosphate
  modified_base 17: mod_base = OTHER; note = 2'-O-methylcytidine-3'-phosphate
  modified_base 18: mod_base = OTHER; note = 2'-O-methylcytidine-3'-phosphate
  modified_base 19: mod_base = OTHER; note = 2'-O-methyladenosine-3'-phosphate
  modified_base 20: mod_base = OTHER; note = 2'-O-methylguanosine-3'-phosphate
  modified_base 21: mod_base = OTHER; note = 2'-O-methylguanosine-3'- phosphorothioate
  modified_base 22: mod_base = OTHER; note = 2'-O-methyladenosine-3'- phosphorothioate
  modified_base 23: mod_base = OTHER; note = 2'-O-methyladenosine-3'-phosphate
caattgaggaggtggcccaggaa

SEQ ID NO: 2648 - RNA, 21 nt, synthetic construct
  misc_feature 1..21: note = Description of Artificial Sequence: Synthetic oligonucleotide
  source 1..21: mol_type = other RNA
  modified_base 1: mod_base = OTHER; note = 2'-O-methyluridine-3'-phosphorothioate
  modified_base 2: mod_base = OTHER; note = 2'-O-methylcytidine-3'- phosphorothioate
  modified_base 3: mod_base = OTHER; note = 2'-O-methylcytidine-3'-phosphate
  modified_base 4: mod_base = OTHER; note = 2'-O-methyluridine-3'-phosphate
  modified_base 5: mod_base = OTHER; note = 2'-O-methylguanosine-3'-phosphate
  modified_base 6: mod_base = OTHER; note = 2'-O-methylguanosine-3'-phosphate
  modified_base 7: mod_base = OTHER; note = 2'-fluoroguanosine-3'-phosphate
  modified_base 8: mod_base = OTHER; note = 2'-O-methylcytidine-3'-phosphate
  modified_base 9: mod_base = OTHER; note = 2'-fluorocytidine-3'-phosphate
  modified_base 10: mod_base = OTHER; note = 2'-fluoroadenosine-3'-phosphate
  modified_base 11: mod_base = OTHER; note = 2'-fluorocytidine-3'-phosphate
  modified_base 12: mod_base = OTHER; note = 2'-O-methylcytidine-3'-phosphate
  modified_base 13: mod_base = OTHER; note = 2'-O-methyluridine-3'-phosphate
  modified_base 14: mod_base = OTHER; note = 2'-O-methylcytidine-3'-phosphate
  modified_base 15: mod_base = OTHER; note = 2'-O-methylcytidine-3'-phosphate
  modified_base 16: mod_base = OTHER; note = 2'-O-methyluridine-3'-phosphate
  modified_base 17: mod_base = OTHER; note = 2'-O-methylcytidine-3'-phosphate
  modified_base 18: mod_base = OTHER; note = 2'-O-methyladenosine-3'-phosphate
  modified_base 19: mod_base = OTHER; note = 2'-O-methyladenosine-3'-phosphate
  modified_base 20: mod_base = OTHER; note = 2'-O-methyluridine-3'-phosphate
  modified_base 21: mod_base = OTHER; note = 2'-O-methyluridine-3'-phosphate attached to N-[tris(N-acetylgalactosamine-alkyl)-amidodecanoyl)]-4-hydr oxyprolinol Hyp-(N-acetylgalactosamine-alkyl)3
tcctgggccacctcctcaatt

SEQ ID NO: 2649 - RNA, 23 nt, synthetic construct
  misc_feature 1..23: note = Description of Artificial Sequence: Synthetic oligonucleotide
  source 1..23: mol_type = other RNA
  modified_base 1: mod_base = OTHER; note = 2'-O-methyladenosine-3'- phosphorothioate
  modified_base 2: mod_base = OTHER; note = 2'-fluoroadenosine-3'-phosphorothioate
  modified_base 3: mod_base = OTHER; note = 2'-O-methyluridine-3'-phosphate
  modified_base 4: mod_base = OTHER; note = 2'-O-methyluridine-3'-phosphate
  modified_base 5: mod_base = OTHER; note = 2'-O-methylguanosine-3'-phosphate
  modified_base 6: mod_base = OTHER; note = 2'-fluoroadenosine-3'-phosphate
  modified_base 7: mod_base = OTHER; note = 2'-O-methylguanosine-3'-phosphate
  modified_base 8: mod_base = OTHER; note = 2'-fluoroguanosine-3'-phosphate
  modified_base 9: mod_base = OTHER; note = 2'-fluoroadenosine-3'-phosphate
  modified_base 10: mod_base = OTHER; note = 2'-O-methylguanosine-3'-phosphate
  modified_base 11: mod_base = OTHER; note = 2'-O-methylguanosine-3'-phosphate
  modified_base 12: mod_base = OTHER; note = 2'-O-methyluridine-3'-phosphate
  modified_base 13: mod_base = OTHER; note = 2'-O-methylguanosine-3'-phosphate
  modified_base 14: mod_base = OTHER; note = 2'-fluoroguanosine-3'-phosphate
  modified_base 15: mod_base = OTHER; note = 2'-O-methylcytidine-3'-phosphate
  modified_base 16: mod_base = OTHER; note = 2'-fluorocytidine-3'-phosphate
  modified_base 17: mod_base = OTHER; note = 2'-O-methylcytidine-3'-phosphate
  modified_base 18: mod_base = OTHER; note = 2'-O-methyladenosine-3'-phosphate
  modified_base 19: mod_base = OTHER; note = 2'-O-methylguanosine-3'-phosphate
  modified_base 20: mod_base = OTHER; note = 2'-O-methylguanosine-3'-phosphate
  modified_base 21: mod_base = OTHER; note = 2'-O-methyladenosine-3'- phosphorothioate
  modified_base 22: mod_base = OTHER; note = 2'-O-methyladenosine-3'- phosphorothioate
  modified_base 23: mod_base = OTHER; note = 2'-O-methylcytidine-3'-phosphate
aattgaggaggtggcccaggaac

SEQ ID NO: 2650 - RNA, 21 nt, synthetic construct
  misc_feature 1..21: note = Description of Artificial Sequence: Synthetic oligonucleotide
  source 1..21: mol_type = other RNA
  modified_base 1: mod_base = OTHER; note = 2'-O-methyluridine-3'-phosphorothioate
  modified_base 2: mod_base = OTHER; note = 2'-O-methylguanosine-3'- phosphorothioate
  modified_base 3: mod_base = OTHER; note = 2'-O-methyluridine-3'-phosphate
  modified_base 4: mod_base = OTHER; note = 2'-O-methyladenosine-3'-phosphate
  modified_base 5: mod_base = OTHER; note = 2'-O-methyluridine-3'-phosphate
  modified_base 6: mod_base = OTHER; note = 2'-O-methylguanosine-3'-phosphate
  modified_base 7: mod_base = OTHER; note = 2'-fluorouridine-3'-phosphate
  modified_base 8: mod_base = OTHER; note = 2'-O-methyluridine-3'-phosphate
  modified_base 9: mod_base = OTHER; note = 2'-fluoroadenosine-3'-phosphate
  modified_base 10: mod_base = OTHER; note = 2'-fluorocytidine-3'-phosphate
  modified_base 11: mod_base = OTHER; note = 2'-fluorouridine-3'-phosphate
  modified_base 12: mod_base = OTHER; note = 2'-O-methyluridine-3'-phosphate
  modified_base 13: mod_base = OTHER; note = 2'-O-methylcytidine-3'-phosphate
  modified_base 14: mod_base = OTHER; note = 2'-O-methyluridine-3'-phosphate
  modified_base 15: mod_base = OTHER; note = 2'-O-methyluridine-3'-phosphate
  modified_base 16: mod_base = OTHER; note = 2'-O-methyladenosine-3'-phosphate
  modified_base 17: mod_base = OTHER; note = 2'-O-methylguanosine-3'-phosphate
  modified_base 18: mod_base = OTHER; note = 2'-O-methyladenosine-3'-phosphate
  modified_base 19: mod_base = OTHER; note = 2'-O-methylguanosine-3'-phosphate
  modified_base 20: mod_base = OTHER; note = 2'-O-methyladenosine-3'-phosphate
  modified_base 21: mod_base = OTHER; note = 2'-O-methylguanosine-3'-phosphate attached to N-[tris(N-acetylgalactosamine-alkyl)-amidodecanoyl)]-4-hydr oxyprolinol Hyp-(N-acetylgalactosamine-alkyl)3
tgtatgttacttcttagagag

SEQ ID NO: 2651 - RNA, 23 nt, synthetic construct
  misc_feature 1..23: note = Description of Artificial Sequence: Synthetic oligonucleotide
  source 1..23: mol_type = other RNA
  modified_base 1: mod_base = OTHER; note = 2'-O-methylcytidine-3'- phosphorothioate
  modified_base 2: mod_base = OTHER; note = 2'-fluorouridine -3'-phosphorothioate
  modified_base 3: mod_base = OTHER; note = 2'-O-methylcytidine-3'-phosphate
  modified_base 4: mod_base = OTHER; note = 2'-O-methyluridine-3'-phosphate
  modified_base 5: mod_base = OTHER; note = 2'-O-methylcytidine-3'-phosphate
  modified_base 6: mod_base = OTHER; note = 2'-fluorouridine-3'-phosphate
  modified_base 7: mod_base = OTHER; note = 2'-O-methyladenosine-3'-phosphate
  modified_base 8: mod_base = OTHER; note = 2'-fluoroadenosine-3'-phosphate
  modified_base 9: mod_base = OTHER; note = 2'-fluoroguanosine-3'-phosphate
  modified_base 10: mod_base = OTHER; note = 2'-O-methyladenosine-3'-phosphate
  modified_base 11: mod_base = OTHER; note = 2'-O-methyladenosine-3'-phosphate
  modified_base 12: mod_base = OTHER; note = 2'-O-methylguanosine-3'-phosphate
  modified_base 13: mod_base = OTHER; note = 2'-O-methyluridine-3'-phosphate
  modified_base 14: mod_base = OTHER; note = 2'-fluoroadenosine-3'-phosphate
  modified_base 15: mod_base = OTHER; note = 2'-O-methyladenosine-3'-phosphate
  modified_base 16: mod_base = OTHER; note = 2'-fluorocytidine-3'-phosphate
  modified_base 17: mod_base = OTHER; note = 2'-O-methyladenosine-3'-phosphate
  modified_base 18: mod_base = OTHER; note = 2'-O-methyluridine-3'-phosphate
  modified_base 19: mod_base = OTHER; note = 2'-O-methyladenosine-3'-phosphate
  modified_base 20: mod_base = OTHER; note = 2'-O-methylcytidine-3'-phosphate
  modified_base 21: mod_base = OTHER; note = 2'-O-methyladenosine-3'- phosphorothioate
  modified_base 22: mod_base = OTHER; note = 2'-O-methyluridine-3'-phosphorothioate
  modified_base 23: mod_base = OTHER; note = 2'-O-methylcytidine-3'-phosphate
ctctctaagaagtaacatacatc

SEQ ID NO: 2652 - RNA, 21 nt, synthetic construct
  misc_feature 1..21: note = Description of Artificial Sequence: Synthetic oligonucleotide
  source 1..21: mol_type = other RNA
  modified_base 1: mod_base = OTHER; note = 2'-O-methylguanosine-3'- phosphorothioate
  modified_base 2: mod_base = OTHER; note = 2'-O-methyluridine-3'-phosphorothioate
  modified_base 3: mod_base = OTHER; note = 2'-O-methyladenosine-3'-phosphate
  modified_base 4: mod_base = OTHER; note = 2'-O-methyluridine-3'-phosphate
  modified_base 5: mod_base = OTHER; note = 2'-O-methylguanosine-3'-phosphate
  modified_base 6: mod_base = OTHER; note = 2'-O-methyluridine-3'-phosphate
  modified_base 7: mod_base = OTHER; note = 2'-fluorouridine-3'-phosphate
  modified_base 8: mod_base = OTHER; note = 2'-O-methyladenosine-3'-phosphate
  modified_base 9: mod_base = OTHER; note = 2'-fluorocytidine-3'-phosphate
  modified_base 10: mod_base = OTHER; note = 2'-fluorouridine-3'-phosphate
  modified_base 11: mod_base = OTHER; note = 2'-fluorouridine-3'-phosphate
  modified_base 12: mod_base = OTHER; note = 2'-O-methylcytidine-3'-phosphate
  modified_base 13: mod_base = OTHER; note = 2'-O-methyluridine-3'-phosphate
  modified_base 14: mod_base = OTHER; note = 2'-O-methyluridine-3'-phosphate
  modified_base 15: mod_base = OTHER; note = 2'-O-methyladenosine-3'-phosphate
  modified_base 16: mod_base = OTHER; note = 2'-O-methylguanosine-3'-phosphate
  modified_base 17: mod_base = OTHER; note = 2'-O-methyladenosine-3'-phosphate
  modified_base 18: mod_base = OTHER; note = 2'-O-methylguanosine-3'-phosphate
  modified_base 19: mod_base = OTHER; note = 2'-O-methyladenosine-3'-phosphate
  modified_base 20: mod_base = OTHER; note = 2'-O-methylguanosine-3'-phosphate
  modified_base 21: mod_base = OTHER; note = 2'-O-methyladenosine-3'-phosphate attached to N-[tris(N-acetylgalactosamine-alkyl)-amidodecanoyl)]-4-hydr oxyprolinol Hyp-(N-acetylgalactosamine-alkyl)3
gtatgttacttcttagagaga

SEQ ID NO: 2653 - RNA, 23 nt, synthetic construct
  misc_feature 1..23: note = Description of Artificial Sequence: Synthetic oligonucleotide
  source 1..23: mol_type = other RNA
  modified_base 1: mod_base = OTHER; note = 2'-O-methyluridine-3'-phosphorothioate
  modified_base 2: mod_base = OTHER; note = 2'-fluorocytidine-3'-phosphorothioate
  modified_base 3: mod_base = OTHER; note = 2'-O-methyluridine-3'-phosphate
  modified_base 4: mod_base = OTHER; note = 2'-O-methylcytidine-3'-phosphate
  modified_base 5: mod_base = OTHER; note = 2'-O-methyluridine-3'-phosphate
  modified_base 6: mod_base = OTHER; note = 2'-fluorocytidine-3'-phosphate
  modified_base 7: mod_base = OTHER; note = 2'-O-methyluridine-3'-phosphate
  modified_base 8: mod_base = OTHER; note = 2'-fluoroadenosine-3'-phosphate
  modified_base 9: mod_base = OTHER; note = 2'-fluoroadenosine-3'-phosphate
  modified_base 10: mod_base = OTHER; note = 2'-O-methylguanosine-3'-phosphate
  modified_base 11: mod_base = OTHER; note = 2'-O-methyladenosine-3'-phosphate
  modified_base 12: mod_base = OTHER; note = 2'-O-methyladenosine-3'-phosphate
  modified_base 13: mod_base = OTHER; note = 2'-O-methylguanosine-3'-phosphate
  modified_base 14: mod_base = OTHER; note = 2'-fluorouridine-3'-phosphate
  modified_base 15: mod_base = OTHER; note = 2'-O-methyladenosine-3'-phosphate
  modified_base 16: mod_base = OTHER; note = 2'-fluoroadenosine-3'-phosphate
  modified_base 17: mod_base = OTHER; note = 2'-O-methylcytidine-3'-phosphate
  modified_base 18: mod_base = OTHER; note = 2'-O-methyladenosine-3'-phosphate
  modified_base 19: mod_base = OTHER; note = 2'-O-methyluridine-3'-phosphate
  modified_base 20: mod_base = OTHER; note = 2'-O-methyladenosine-3'-phosphate
  modified_base 21: mod_base = OTHER; note = 2'-O-methylcytidine-3'- phosphorothioate
  modified_base 22: mod_base = OTHER; note = 2'-O-methyladenosine-3'- phosphorothioate
  modified_base 23: mod_base = OTHER; note = 2'-O-methyluridine-3'-phosphate
tctctctaagaagtaacatacat

SEQ ID NO: 2654 - RNA, 21 nt, synthetic construct
  misc_feature 1..21: note = Description of Artificial Sequence: Synthetic oligonucleotide
  source 1..21: mol_type = other RNA
  modified_base 1: mod_base = OTHER; note = 2'-O-methyladenosine-3'- phosphorothioate
  modified_base 2: mod_base = OTHER; note = 2'-O-methylguanosine-3'- phosphorothioate
  modified_base 3: mod_base = OTHER; note = 2'-O-methylguanosine-3'-phosphate
  modified_base 4: mod_base = OTHER; note = 2'-O-methyladenosine-3'-phosphate
  modified_base 5: mod_base = OTHER; note = 2'-O-methyluridine-3'-phosphate
  modified_base 6: mod_base = OTHER; note = 2'-O-methylguanosine-3'-phosphate
  modified_base 7: mod_base = OTHER; note = 2'-fluorouridine-3'-phosphate
  modified_base 8: mod_base = OTHER; note = 2'-O-methyladenosine-3'-phosphate
  modified_base 9: mod_base = OTHER; note = 2'-fluorouridine-3'-phosphate
  modified_base 10: mod_base = OTHER; note = 2'-fluoroguanosine-3'-phosphate
  modified_base 11: mod_base = OTHER; note = 2'-fluorouridine-3'-phosphate
  modified_base 12: mod_base = OTHER; note = 2'-O-methyluridine-3'-phosphate
  modified_base 13: mod_base = OTHER; note = 2'-O-methyladenosine-3'-phosphate
  modified_base 14: mod_base = OTHER; note = 2'-O-methylcytidine-3'-phosphate
  modified_base 15: mod_base = OTHER; note = 2'-O-methyluridine-3'-phosphate
  modified_base 16: mod_base = OTHER; note = 2'-O-methyluridine-3'-phosphate
  modified_base 17: mod_base = OTHER; note = 2'-O-methylcytidine-3'-phosphate
  modified_base 18: mod_base = OTHER; note = 2'-O-methyluridine-3'-phosphate
  modified_base 19: mod_base = OTHER; note = 2'-O-methyluridine-3'-phosphate
  modified_base 20: mod_base = OTHER; note = 2'-O-methyladenosine-3'-phosphate
  modified_base 21: mod_base = OTHER; note = 2'-O-methylguanosine-3'-phosphate attached to N-[tris(N-acetylgalactosamine-alkyl)-amidodecanoyl)]-4-hydr oxyprolinol Hyp-(N-acetylgalactosamine-alkyl)3
aggatgtatgttacttcttag

SEQ ID NO: 2655 - RNA, 23 nt, synthetic construct
  misc_feature 1..23: note = Description of Artificial Sequence: Synthetic oligonucleotide
  source 1..23: mol_type = other RNA
  modified_base 1: mod_base = OTHER; note = 2'-O-methylcytidine-3'- phosphorothioate
  modified_base 2: mod_base = OTHER; note = 2'-fluorouridine -3'-phosphorothioate
  modified_base 3: mod_base = OTHER; note = 2'-O-methyladenosine-3'-phosphate
  modified_base 4: mod_base = OTHER; note = 2'-O-methyladenosine-3'-phosphate
  modified_base 5: mod_base = OTHER; note = 2'-O-methylguanosine-3'-phosphate
  modified_base 6: mod_base = OTHER; note = 2'-fluoroadenosine-3'-phosphate
  modified_base 7: mod_base = OTHER; note = 2'-O-methyladenosine-3'-phosphate
  modified_base 8: mod_base = OTHER; note = 2'-fluoroguanosine-3'-phosphate
  modified_base 9: mod_base = OTHER; note = 2'-fluorouridine-3'-phosphate
  modified_base 10: mod_base = OTHER; note = 2'-O-methyladenosine-3'-phosphate
  modified_base 11: mod_base = OTHER; note = 2'-O-methyladenosine-3'-phosphate
  modified_base 12: mod_base = OTHER; note = 2'-O-methylcytidine-3'-phosphate
  modified_base 13: mod_base = OTHER; note = 2'-O-methyladenosine-3'-phosphate
  modified_base 14: mod_base = OTHER; note = 2'-fluorouridine-3'-phosphate
  modified_base 15: mod_base = OTHER; note = 2'-O-methyladenosine-3'-phosphate
  modified_base 16: mod_base = OTHER; note = 2'-fluorocytidine-3'-phosphate
  modified_base 17: mod_base = OTHER; note = 2'-O-methyladenosine-3'-phosphate
  modified_base 18: mod_base = OTHER; note = 2'-O-methyluridine-3'-phosphate
  modified_base 19: mod_base = OTHER; note = 2'-O-methylcytidine-3'-phosphate
  modified_base 20: mod_base = OTHER; note = 2'-O-methylcytidine-3'-phosphate
  modified_base 21: mod_base = OTHER; note = 2'-O-methyluridine-3'-phosphorothioate
  modified_base 22: mod_base = OTHER; note = 2'-O-methyladenosine-3'- phosphorothioate
  modified_base 23: mod_base = OTHER; note = 2'-O-methyladenosine-3'-phosphate
ctaagaagtaacatacatcctaa

SEQ ID NO: 2656 - RNA, 21 nt, synthetic construct
  misc_feature 1..21: note = Description of Artificial Sequence: Synthetic oligonucleotide
  source 1..21: mol_type = other RNA
  modified_base 1: mod_base = OTHER; note = 2'-O-methyluridine-3'-phosphorothioate
  modified_base 2: mod_base = OTHER; note = 2'-O-methyladenosine-3'- phosphorothioate
  modified_base 3: mod_base = OTHER; note = 2'-O-methylguanosine-3'-phosphate
  modified_base 4: mod_base = OTHER; note = 2'-O-methylguanosine-3'-phosphate
  modified_base 5: mod_base = OTHER; note = 2'-O-methyladenosine-3'-phosphate
  modified_base 6: mod_base = OTHER; note = 2'-O-methyluridine-3'-phosphate
  modified_base 7: mod_base = OTHER; note = 2'-fluoroguanosine-3'-phosphate
  modified_base 8: mod_base = OTHER; note = 2'-O-methyluridine-3'-phosphate
  modified_base 9: mod_base = OTHER; note = 2'-fluoroadenosine-3'-phosphate
  modified_base 10: mod_base = OTHER; note = 2'-fluorouridine-3'-phosphate
  modified_base 11: mod_base = OTHER; note = 2'-fluoroguanosine-3'-phosphate
  modified_base 12: mod_base = OTHER; note = 2'-O-methyluridine-3'-phosphate
  modified_base 13: mod_base = OTHER; note = 2'-O-methyluridine-3'-phosphate
  modified_base 14: mod_base = OTHER; note = 2'-O-methyladenosine-3'-phosphate
  modified_base 15: mod_base = OTHER; note = 2'-O-methylcytidine-3'-phosphate
  modified_base 16: mod_base = OTHER; note = 2'-O-methyluridine-3'-phosphate
  modified_base 17: mod_base = OTHER; note = 2'-O-methyluridine-3'-phosphate
  modified_base 18: mod_base = OTHER; note = 2'-O-methylcytidine-3'-phosphate
  modified_base 19: mod_base = OTHER; note = 2'-O-methyluridine-3'-phosphate
  modified_base 20: mod_base = OTHER; note = 2'-O-methyluridine-3'-phosphate
  modified_base 21: mod_base = OTHER; note = 2'-O-methyladenosine-3'-phosphate attached to N-[tris(N-acetylgalactosamine-alkyl)-amidodecanoyl)]-4-hydr oxyprolinol Hyp-(N-acetylgalactosamine-alkyl)3
taggatgtatgttacttctta

SEQ ID NO: 2657 - RNA, 23 nt, synthetic construct
  misc_feature 1..23: note = Description of Artificial Sequence: Synthetic oligonucleotide
  source 1..23: mol_type = other RNA
  modified_base 1: mod_base = OTHER; note = 2'-O-methyluridine-3'-phosphorothioate
  modified_base 2: mod_base = OTHER; note = 2'-fluoroadenosine-3'-phosphorothioate
  modified_base 3: mod_base = OTHER; note = 2'-O-methyladenosine-3'-phosphate
  modified_base 4: mod_base = OTHER; note = 2'-O-methylguanosine-3'-phosphate
  modified_base 5: mod_base = OTHER; note = 2'-O-methyladenosine-3'-phosphate
  modified_base 6: mod_base = OTHER; note = 2'-fluoroadenosine-3'-phosphate
  modified_base 7: mod_base = OTHER; note = 2'-O-methylguanosine-3'-phosphate
  modified_base 8: mod_base = OTHER; note = 2'-fluorouridine-3'-phosphate
  modified_base 9: mod_base = OTHER; note = 2'-fluoroadenosine-3'-phosphate
  modified_base 10: mod_base = OTHER; note = 2'-O-methyladenosine-3'-phosphate
  modified_base 11: mod_base = OTHER; note = 2'-O-methylcytidine-3'-phosphate
  modified_base 12: mod_base = OTHER; note = 2'-O-methyladenosine-3'-phosphate
  modified_base 13: mod_base = OTHER; note = 2'-O-methyluridine-3'-phosphate
  modified_base 14: mod_base = OTHER; note = 2'-fluoroadenosine-3'-phosphate
  modified_base 15: mod_base = OTHER; note = 2'-O-methylcytidine-3'-phosphate
  modified_base 16: mod_base = OTHER; note = 2'-fluoroadenosine-3'-phosphate
  modified_base 17: mod_base = OTHER; note = 2'-O-methyluridine-3'-phosphate
  modified_base 18: mod_base = OTHER; note = 2'-O-methylcytidine-3'-phosphate
  modified_base 19: mod_base = OTHER; note = 2'-O-methylcytidine-3'-phosphate
  modified_base 20: mod_base = OTHER; note = 2'-O-methyluridine-3'-phosphate
  modified_base 21: mod_base = OTHER; note = 2'-O-methyladenosine-3'- phosphorothioate
  modified_base 22: mod_base = OTHER; note = 2'-O-methyladenosine-3'- phosphorothioate
  modified_base 23: mod_base = OTHER; note = 2'-O-methyladenosine-3'-phosphate
taagaagtaacatacatcctaaa

SEQ ID NO: 2658 - RNA, 21 nt, synthetic construct
  misc_feature 1..21: note = Description of Artificial Sequence: Synthetic oligonucleotide
  source 1..21: mol_type = other RNA
  modified_base 1: mod_base = OTHER; note = 2'-O-methyladenosine-3'- phosphorothioate
  modified_base 2: mod_base = OTHER; note = 2'-O-methyladenosine-3'- phosphorothioate
  modified_base 3: mod_base = OTHER; note = 2'-O-methyladenosine-3'-phosphate
  modified_base 4: mod_base = OTHER; note = 2'-O-methyluridine-3'-phosphate
  modified_base 5: mod_base = OTHER; note = 2'-O-methylguanosine-3'-phosphate
  modified_base 6: mod_base = OTHER; note = 2'-O-methyluridine-3'-phosphate
  modified_base 7: mod_base = OTHER; note = 2'-fluorouridine-3'-phosphate
  modified_base 8: mod_base = OTHER; note = 2'-O-methyluridine-3'-phosphate
  modified_base 9: mod_base = OTHER; note = 2'-fluorouridine-3'-phosphate
  modified_base 10: mod_base = OTHER; note = 2'-fluoroadenosine-3'-phosphate
  modified_base 11: mod_base = OTHER; note = 2'-fluoroguanosine-3'-phosphate
  modified_base 12: mod_base = OTHER; note = 2'-O-methylguanosine-3'-phosphate
  modified_base 13: mod_base = OTHER; note = 2'-O-methyladenosine-3'-phosphate
  modified_base 14: mod_base = OTHER; note = 2'-O-methyluridine-3'-phosphate
  modified_base 15: mod_base = OTHER; note = 2'-O-methylguanosine-3'-phosphate
  modified_base 16: mod_base = OTHER; note = 2'-O-methyluridine-3'-phosphate
  modified_base 17: mod_base = OTHER; note = 2'-O-methyladenosine-3'-phosphate
  modified_base 18: mod_base = OTHER; note = 2'-O-methyluridine-3'-phosphate
  modified_base 19: mod_base = OTHER; note = 2'-O-methylguanosine-3'-phosphate
  modified_base 20: mod_base = OTHER; note = 2'-O-methyluridine-3'-phosphate
  modified_base 21: mod_base = OTHER; note = 2'-O-methyluridine-3'-phosphate attached to N-[tris(N-acetylgalactosamine-alkyl)-amidodecanoyl)]-4-hydr oxyprolinol Hyp-(N-acetylgalactosamine-alkyl)3
aaatgttttaggatgtatgtt

SEQ ID NO: 2659 - RNA, 23 nt, synthetic construct
  misc_feature 1..23: note = Description of Artificial Sequence: Synthetic oligonucleotide
  source 1..23: mol_type = other RNA
  modified_base 1: mod_base = OTHER; note = 2'-O-methyladenosine-3'- phosphorothioate
  modified_base 2: mod_base = OTHER; note = 2'-fluoroadenosine-3'-phosphorothioate
  modified_base 3: mod_base = OTHER; note = 2'-O-methylcytidine-3'-phosphate
  modified_base 4: mod_base = OTHER; note = 2'-O-methyladenosine-3'-phosphate
  modified_base 5: mod_base = OTHER; note = 2'-O-methyluridine-3'-phosphate
  modified_base 6: mod_base = OTHER; note = 2'-fluoroadenosine-3'-phosphate
  modified_base 7: mod_base = OTHER; note = 2'-O-methylcytidine-3'-phosphate
  modified_base 8: mod_base = OTHER; note = 2'-fluoroadenosine-3'-phosphate
  modified_base 9: mod_base = OTHER; note = 2'-fluorouridine-3'-phosphate
  modified_base 10: mod_base = OTHER; note = 2'-O-methylcytidine-3'-phosphate
  modified_base 11: mod_base = OTHER; note = 2'-O-methylcytidine-3'-phosphate
  modified_base 12: mod_base = OTHER; note = 2'-O-methyluridine-3'-phosphate
  modified_base 13: mod_base = OTHER; note = 2'-O-methyladenosine-3'-phosphate
  modified_base 14: mod_base = OTHER; note = 2'-fluoroadenosine-3'-phosphate
  modified_base 15: mod_base = OTHER; note = 2'-O-methyladenosine-3'-phosphate
  modified_base 16: mod_base = OTHER; note = 2'-fluoroadenosine-3'-phosphate
  modified_base 17: mod_base = OTHER; note = 2'-O-methylcytidine-3'-phosphate
  modified_base 18: mod_base = OTHER; note = 2'-O-methyladenosine-3'-phosphate
  modified_base 19: mod_base = OTHER; note = 2'-O-methyluridine-3'-phosphate
  modified_base 20: mod_base = OTHER; note = 2'-O-methyluridine-3'-phosphate
  modified_base 21: mod_base = OTHER; note = 2'-O-methyluridine-3'-phosphorothioate
  modified_base 22: mod_base = OTHER; note = 2'-O-methylguanosine-3'- phosphorothioate
  modified_base 23: mod_base = OTHER; note = 2'-O-methylguanosine-3'-phosphate
aacatacatcctaaaacatttgg

SEQ ID NO: 2660 - RNA, 21 nt, synthetic construct
  misc_feature 1..21: note = Description of Artificial Sequence: Synthetic oligonucleotide
  source 1..21: mol_type = other RNA
  modified_base 1: mod_base = OTHER; note = 2'-O-methyladenosine-3'- phosphorothioate
  modified_base 2: mod_base = OTHER; note = 2'-O-methyladenosine-3'- phosphorothioate
  modified_base 3: mod_base = OTHER; note = 2'-O-methyluridine-3'-phosphate
  modified_base 4: mod_base = OTHER; note = 2'-O-methylguanosine-3'-phosphate
  modified_base 5: mod_base = OTHER; note = 2'-O-methyluridine-3'-phosphate
  modified_base 6: mod_base = OTHER; note = 2'-O-methyluridine-3'-phosphate
  modified_base 7: mod_base = OTHER; note = 2'-fluorouridine-3'-phosphate
  modified_base 8: mod_base = OTHER; note = 2'-O-methyluridine-3'-phosphate
  modified_base 9: mod_base = OTHER; note = 2'-fluoroadenosine-3'-phosphate
  modified_base 10: mod_base = OTHER; note = 2'-fluoroguanosine-3'-phosphate
  modified_base 11: mod_base = OTHER; note = 2'-fluoroguanosine-3'-phosphate
  modified_base 12: mod_base = OTHER; note = 2'-O-methyladenosine-3'-phosphate
  modified_base 13: mod_base = OTHER; note = 2'-O-methyluridine-3'-phosphate
  modified_base 14: mod_base = OTHER; note = 2'-O-methylguanosine-3'-phosphate
  modified_base 15: mod_base = OTHER; note = 2'-O-methyluridine-3'-phosphate
  modified_base 16: mod_base = OTHER; note = 2'-O-methyladenosine-3'-phosphate
  modified_base 17: mod_base = OTHER; note = 2'-O-methyluridine-3'-phosphate
  modified_base 18: mod_base = OTHER; note = 2'-O-methylguanosine-3'-phosphate
  modified_base 19: mod_base = OTHER; note = 2'-O-methyluridine-3'-phosphate
  modified_base 20: mod_base = OTHER; note = 2'-O-methyluridine-3'-phosphate
  modified_base 21: mod_base = OTHER; note = 2'-O-methyladenosine-3'-phosphate attached to N-[tris(N-acetylgalactosamine-alkyl)-amidodecanoyl)]-4-hydr oxyprolinol Hyp-(N-acetylgalactosamine-alkyl)3
aatgttttaggatgtatgtta

SEQ ID NO: 2661 - RNA, 23 nt, synthetic construct
  misc_feature 1..23: note = Description of Artificial Sequence: Synthetic oligonucleotide
  source 1..23: mol_type = other RNA
  modified_base 1: mod_base = OTHER; note = 2'-O-methyluridine-3'-phosphorothioate
  modified_base 2: mod_base = OTHER; note = 2'-fluoroadenosine-3'-phosphorothioate
  modified_base 3: mod_base = OTHER; note = 2'-O-methyladenosine-3'-phosphate
  modified_base 4: mod_base = OTHER; note = 2'-O-methylcytidine-3'-phosphate
  modified_base 5: mod_base = OTHER; note = 2'-O-methyladenosine-3'-phosphate
  modified_base 6: mod_base = OTHER; note = 2'-fluorouridine-3'-phosphate
  modified_base 7: mod_base = OTHER; note = 2'-O-methyladenosine-3'-phosphate
  modified_base 8: mod_base = OTHER; note = 2'-fluorocytidine-3'-phosphate
  modified_base 9: mod_base = OTHER; note = 2'-fluoroadenosine-3'-phosphate
  modified_base 10: mod_base = OTHER; note = 2'-O-methyluridine-3'-phosphate
  modified_base 11: mod_base = OTHER; note = 2'-O-methylcytidine-3'-phosphate
  modified_base 12: mod_base = OTHER; note = 2'-O-methylcytidine-3'-phosphate
  modified_base 13: mod_base = OTHER; note = 2'-O-methyluridine-3'-phosphate
  modified_base 14: mod_base = OTHER; note = 2'-fluoroadenosine-3'-phosphate
  modified_base 15: mod_base = OTHER; note = 2'-O-methyladenosine-3'-phosphate
  modified_base 16: mod_base = OTHER; note = 2'-fluoroadenosine-3'-phosphate
  modified_base 17: mod_base = OTHER; note = 2'-O-methyladenosine-3'-phosphate
  modified_base 18: mod_base = OTHER; note = 2'-O-methylcytidine-3'-phosphate
  modified_base 19: mod_base = OTHER; note = 2'-O-methyladenosine-3'-phosphate
  modified_base 20: mod_base = OTHER; note = 2'-O-methyluridine-3'-phosphate
  modified_base 21: mod_base = OTHER; note = 2'-O-methyluridine-3'-phosphorothioate
  modified_base 22: mod_base = OTHER; note = 2'-O-methyluridine-3'-phosphorothioate
  modified_base 23: mod_base = OTHER; note = 2'-O-methylguanosine-3'-phosphate
taacatacatcctaaaacatttg

SEQ ID NO: 2662 - RNA, 21 nt, synthetic construct
  misc_feature 1..21: note = Description of Artificial Sequence: Synthetic oligonucleotide
  source 1..21: mol_type = other RNA
  modified_base 1: mod_base = OTHER; note = 2'-O-methyladenosine-3'- phosphorothioate
  modified_base 2: mod_base = OTHER; note = 2'-O-methyluridine-3'-phosphorothioate
  modified_base 3: mod_base = OTHER; note = 2'-O-methylcytidine-3'-phosphate
  modified_base 4: mod_base = OTHER; note = 2'-O-methylcytidine-3'-phosphate
  modified_base 5: mod_base = OTHER; note = 2'-O-methyladenosine-3'-phosphate
  modified_base 6: mod_base = OTHER; note = 2'-O-methyladenosine-3'-phosphate
  modified_base 7: mod_base = OTHER; note = 2'-fluoroadenosine-3'-phosphate
  modified_base 8: mod_base = OTHER; note = 2'-O-methyluridine-3'-phosphate
  modified_base 9: mod_base = OTHER; note = 2'-fluoroguanosine-3'-phosphate
  modified_base 10: mod_base = OTHER; note = 2'-fluorouridine-3'-phosphate
  modified_base 11: mod_base = OTHER; note = 2'-fluorouridine-3'-phosphate
  modified_base 12: mod_base = OTHER; note = 2'-O-methyluridine-3'-phosphate
  modified_base 13: mod_base = OTHER; note = 2'-O-methyluridine-3'-phosphate
  modified_base 14: mod_base = OTHER; note = 2'-O-methyladenosine-3'-phosphate
  modified_base 15: mod_base = OTHER; note = 2'-O-methylguanosine-3'-phosphate
  modified_base 16: mod_base = OTHER; note = 2'-O-methylguanosine-3'-phosphate
  modified_base 17: mod_base = OTHER; note = 2'-O-methyladenosine-3'-phosphate
  modified_base 18: mod_base = OTHER; note = 2'-O-methyluridine-3'-phosphate
  modified_base 19: mod_base = OTHER; note = 2'-O-methylguanosine-3'-phosphate
  modified_base 20: mod_base = OTHER; note = 2'-O-methyluridine-3'-phosphate
  modified_base 21: mod_base = OTHER; note = 2'-O-methyladenosine-3'-phosphate attached to N-[tris(N-acetylgalactosamine-alkyl)-amidodecanoyl)]-4-hydr oxyprolinol Hyp-(N-acetylgalactosamine-alkyl)3
atccaaatgttttaggatgta

SEQ ID NO: 2663 - RNA, 23 nt, synthetic construct
  misc_feature 1..23: note = Description of Artificial Sequence: Synthetic oligonucleotide
  source 1..23: mol_type = other RNA
  modified_base 1: mod_base = OTHER; note = 2'-O-methyluridine-3'-phosphorothioate
  modified_base 2: mod_base = OTHER; note = 2'-fluoroadenosine-3'-phosphorothioate
  modified_base 3: mod_base = OTHER; note = 2'-O-methylcytidine-3'-phosphate
  modified_base 4: mod_base = OTHER; note = 2'-O-methyladenosine-3'-phosphate
  modified_base 5: mod_base = OTHER; note = 2'-O-methyluridine-3'-phosphate
  modified_base 6: mod_base = OTHER; note = 2'-fluorocytidine-3'-phosphate
  modified_base 7: mod_base = OTHER; note = 2'-O-methylcytidine-3'-phosphate
  modified_base 8: mod_base = OTHER; note = 2'-fluorouridine-3'-phosphate
  modified_base 9: mod_base = OTHER; note = 2'-fluoroadenosine-3'-phosphate
  modified_base 10: mod_base = OTHER; note = 2'-O-methyladenosine-3'-phosphate
  modified_base 11: mod_base = OTHER; note = 2'-O-methyladenosine-3'-phosphate
  modified_base 12: mod_base = OTHER; note = 2'-O-methyladenosine-3'-phosphate
  modified_base 13: mod_base = OTHER; note = 2'-O-methylcytidine-3'-phosphate
  modified_base 14: mod_base = OTHER; note = 2'-fluoroadenosine-3'-phosphate
  modified_base 15: mod_base = OTHER; note = 2'-O-methyluridine-3'-phosphate
  modified_base 16: mod_base = OTHER; note = 2'-fluorouridine-3'-phosphate
  modified_base 17: mod_base = OTHER; note = 2'-O-methyluridine-3'-phosphate
  modified_base 18: mod_base = OTHER; note = 2'-O-methylguanosine-3'-phosphate
  modified_base 19: mod_base = OTHER; note = 2'-O-methylguanosine-3'-phosphate
  modified_base 20: mod_base = OTHER; note = 2'-O-methyladenosine-3'-phosphate
  modified_base 21: mod_base = OTHER; note = 2'-O-methyluridine-3'-phosphorothioate
  modified_base 22: mod_base = OTHER; note = 2'-O-methyladenosine-3'- phosphorothioate
  modified_base 23: mod_base = OTHER; note = 2'-O-methyluridine-3'-phosphate
tacatcctaaaacatttggatat

SEQ ID NO: 2664 - RNA, 21 nt, synthetic construct
  misc_feature 1..21: note = Description of Artificial Sequence: Synthetic oligonucleotide
  source 1..21: mol_type = other RNA
  modified_base 1: mod_base = OTHER; note = 2'-O-methyluridine-3'-phosphorothioate
  modified_base 2: mod_base = OTHER; note = 2'-O-methyladenosine-3'- phosphorothioate
  modified_base 3: mod_base = OTHER; note = 2'-O-methyluridine-3'-phosphate
  modified_base 4: mod_base = OTHER; note = 2'-O-methylcytidine-3'-phosphate
  modified_base 5: mod_base = OTHER; note = 2'-O-methylcytidine-3'-phosphate
  modified_base 6: mod_base = OTHER; note = 2'-O-methyladenosine-3'-phosphate
  modified_base 7: mod_base = OTHER; note = 2'-fluoroadenosine-3'-phosphate
  modified_base 8: mod_base = OTHER; note = 2'-O-methyladenosine-3'-phosphate
  modified_base 9: mod_base = OTHER; note = 2'-fluorouridine-3'-phosphate
  modified_base 10: mod_base = OTHER; note = 2'-fluoroguanosine-3'-phosphate
  modified_base 11: mod_base = OTHER; note = 2'-fluorouridine-3'-phosphate
  modified_base 12: mod_base = OTHER; note = 2'-O-methyluridine-3'-phosphate
  modified_base 13: mod_base = OTHER; note = 2'-O-methyluridine-3'-phosphate
  modified_base 14: mod_base = OTHER; note = 2'-O-methyluridine-3'-phosphate
  modified_base 15: mod_base = OTHER; note = 2'-O-methyladenosine-3'-phosphate
  modified_base 16: mod_base = OTHER; note = 2'-O-methylguanosine-3'-phosphate
  modified_base 17: mod_base = OTHER; note = 2'-O-methylguanosine-3'-phosphate
  modified_base 18: mod_base = OTHER; note = 2'-O-methyladenosine-3'-phosphate
  modified_base 19: mod_base = OTHER; note = 2'-O-methyluridine-3'-phosphate
  modified_base 20: mod_base = OTHER; note = 2'-O-methylguanosine-3'-phosphate
  modified_base 21: mod_base = OTHER; note = 2'-O-methyluridine-3'-phosphate attached to N-[tris(N-acetylgalactosamine-alkyl)-amidodecanoyl)]-4-hydr oxyprolinol Hyp-(N-acetylgalactosamine-alkyl)3
tatccaaatgttttaggatgt

SEQ ID NO: 2665 - RNA, 23 nt, synthetic construct
  misc_feature 1..23: note = Description of Artificial Sequence: Synthetic oligonucleotide
  source 1..23: mol_type = other RNA
  modified_base 1: mod_base = OTHER; note = 2'-O-methyladenosine-3'- phosphorothioate
  modified_base 2: mod_base = OTHER; note = 2'-fluorocytidine-3'-phosphorothioate
  modified_base 3: mod_base = OTHER; note = 2'-O-methyladenosine-3'-phosphate
  modified_base 4: mod_base = OTHER; note = 2'-O-methyluridine-3'-phosphate
  modified_base 5: mod_base = OTHER; note = 2'-O-methylcytidine-3'-phosphate
  modified_base 6: mod_base = OTHER; note = 2'-fluorocytidine-3'-phosphate
  modified_base 7: mod_base = OTHER; note = 2'-O-methyluridine-3'-phosphate
  modified_base 8: mod_base = OTHER; note = 2'-fluoroadenosine-3'-phosphate
  modified_base 9: mod_base = OTHER; note = 2'-fluoroadenosine-3'-phosphate
  modified_base 10: mod_base = OTHER; note = 2'-O-methyladenosine-3'-phosphate
  modified_base 11: mod_base = OTHER; note = 2'-O-methyladenosine-3'-phosphate
  modified_base 12: mod_base = OTHER; note = 2'-O-methylcytidine-3'-phosphate
  modified_base 13: mod_base = OTHER; note = 2'-O-methyladenosine-3'-phosphate
  modified_base 14: mod_base = OTHER; note = 2'-fluorouridine-3'-phosphate
  modified_base 15: mod_base = OTHER; note = 2'-O-methyluridine-3'-phosphate
  modified_base 16: mod_base = OTHER; note = 2'-fluorouridine-3'-phosphate
  modified_base 17: mod_base = OTHER; note = 2'-O-methylguanosine-3'-phosphate
  modified_base 18: mod_base = OTHER; note = 2'-O-methylguanosine-3'-phosphate
  modified_base 19: mod_base = OTHER; note = 2'-O-methyladenosine-3'-phosphate
  modified_base 20: mod_base = OTHER; note = 2'-O-methyluridine-3'-phosphate
  modified_base 21: mod_base = OTHER; note = 2'-O-methyladenosine-3'- phosphorothioate
  modified_base 22: mod_base = OTHER; note = 2'-O-methyluridine-3'-phosphorothioate
  modified_base 23: mod_base = OTHER; note = 2'-O-methyladenosine-3'-phosphate
acatcctaaaacatttggatata

SEQ ID NO: 2666 - RNA, 21 nt, synthetic construct
  misc_feature 1..21: note = Description of Artificial Sequence: Synthetic oligonucleotide
  source 1..21: mol_type = other RNA
  modified_base 1: mod_base = OTHER; note = 2'-O-methyladenosine-3'- phosphorothioate
  modified_base 2: mod_base = OTHER; note = 2'-O-methyluridine-3'-phosphorothioate
  modified_base 3: mod_base = OTHER; note = 2'-O-methylguanosine-3'-phosphate
  modified_base 4: mod_base = OTHER; note = 2'-O-methylguanosine-3'-phosphate
  modified_base 5: mod_base = OTHER; note = 2'-O-methylguanosine-3'-phosphate
  modified_base 6: mod_base = OTHER; note = 2'-O-methyluridine-3'-phosphate
  modified_base 7: mod_base = OTHER; note = 2'-fluoroguanosine-3'-phosphate
  modified_base 8: mod_base = OTHER; note = 2'-O-methylguanosine-3'-phosphate
  modified_base 9: mod_base = OTHER; note = 2'-fluorocytidine-3'-phosphate
  modified_base 10: mod_base = OTHER; note = 2'-fluoroguanosine-3'-phosphate
  modified_base 11: mod_base = OTHER; note = 2'-fluoroguanosine-3'-phosphate
  modified_base 12: mod_base = OTHER; note = 2'-O-methyluridine-3'-phosphate
  modified_base 13: mod_base = OTHER; note = 2'-O-methyladenosine-3'-phosphate
  modified_base 14: mod_base = OTHER; note = 2'-O-methyladenosine-3'-phosphate
  modified_base 15: mod_base = OTHER; note = 2'-O-methyluridine-3'-phosphate
  modified_base 16: mod_base = OTHER; note = 2'-O-methyluridine-3'-phosphate
  modified_base 17: mod_base = OTHER; note = 2'-O-methylguanosine-3'-phosphate
  modified_base 18: mod_base = OTHER; note = 2'-O-methylguanosine-3'-phosphate
  modified_base 19: mod_base = OTHER; note = 2'-O-methyluridine-3'-phosphate
  modified_base 20: mod_base = OTHER; note = 2'-O-methylguanosine-3'-phosphate
  modified_base 21: mod_base = OTHER; note = 2'-O-methyladenosine-3'-phosphate attached to N-[tris(N-acetylgalactosamine-alkyl)-amidodecanoyl)]-4-hydr oxyprolinol Hyp-(N-acetylgalactosamine-alkyl)3
atgggtggcggtaattggtga

SEQ ID NO: 2667 - RNA, 23 nt, synthetic construct
  misc_feature 1..23: note = Description of Artificial Sequence: Synthetic oligonucleotide
  source 1..23: mol_type = other RNA
  modified_base 1: mod_base = OTHER; note = 2'-O-methyluridine-3'-phosphorothioate
  modified_base 2: mod_base = OTHER; note = 2'-fluorocytidine-3'-phosphorothioate
  modified_base 3: mod_base = OTHER; note = 2'-O-methyladenosine-3'-phosphate
  modified_base 4: mod_base = OTHER; note = 2'-O-methylcytidine-3'-phosphate
  modified_base 5: mod_base = OTHER; note = 2'-O-methylcytidine-3'-phosphate
  modified_base 6: mod_base = OTHER; note = 2'-fluoroadenosine-3'-phosphate
  modified_base 7: mod_base = OTHER; note = 2'-O-methyladenosine-3'-phosphate
  modified_base 8: mod_base = OTHER; note = 2'-fluorouridine-3'-phosphate
  modified_base 9: mod_base = OTHER; note = 2'-fluorouridine-3'-phosphate
  modified_base 10: mod_base = OTHER; note = 2'-O-methyladenosine-3'-phosphate
  modified_base 11: mod_base = OTHER; note = 2'-O-methylcytidine-3'-phosphate
  modified_base 12: mod_base = OTHER; note = 2'-O-methylcytidine-3'-phosphate
  modified_base 13: mod_base = OTHER; note = 2'-O-methylguanosine-3'-phosphate
  modified_base 14: mod_base = OTHER; note = 2'-fluorocytidine-3'-phosphate
  modified_base 15: mod_base = OTHER; note = 2'-O-methylcytidine-3'-phosphate
  modified_base 16: mod_base = OTHER; note = 2'-fluoroadenosine-3'-phosphate
  modified_base 17: mod_base = OTHER; note = 2'-O-methylcytidine-3'-phosphate
  modified_base 18: mod_base = OTHER; note = 2'-O-methylcytidine-3'-phosphate
  modified_base 19: mod_base = OTHER; note = 2'-O-methylcytidine-3'-phosphate
  modified_base 20: mod_base = OTHER; note = 2'-O-methyladenosine-3'-phosphate
  modified_base 21: mod_base = OTHER; note = 2'-O-methyluridine-3'-phosphorothioate
  modified_base 22: mod_base = OTHER; note = 2'-O-methyluridine-3'-phosphorothioate
  modified_base 23: mod_base = OTHER; note = 2'-O-methylcytidine-3'-phosphate
tcaccaattaccgccacccattc

SEQ ID NO: 2668 - RNA, 21 nt, synthetic construct
  misc_feature 1..21: note = Description of Artificial Sequence: Synthetic oligonucleotide
  source 1..21: mol_type = other RNA
  modified_base 1: mod_base = OTHER; note = 2'-O-methyluridine-3'-phosphorothioate
  modified_base 2: mod_base = OTHER; note = 2'-O-methylguanosine-3'- phosphorothioate
  modified_base 3: mod_base = OTHER; note = 2'-O-methylguanosine-3'-phosphate
  modified_base 4: mod_base = OTHER; note = 2'-O-methylguanosine-3'-phosphate
  modified_base 5: mod_base = OTHER; note = 2'-O-methyluridine-3'-phosphate
  modified_base 6: mod_base = OTHER; note = 2'-O-methylguanosine-3'-phosphate
  modified_base 7: mod_base = OTHER; note = 2'-fluoroguanosine-3'-phosphate
  modified_base 8: mod_base = OTHER; note = 2'-O-methylcytidine-3'-phosphate
  modified_base 9: mod_base = OTHER; note = 2'-fluoroguanosine-3'-phosphate
  modified_base 10: mod_base = OTHER; note = 2'-fluoroguanosine-3'-phosphate
  modified_base 11: mod_base = OTHER; note = 2'-fluorouridine-3'-phosphate
  modified_base 12: mod_base = OTHER; note = 2'-O-methyladenosine-3'-phosphate
  modified_base 13: mod_base = OTHER; note = 2'-O-methyladenosine-3'-phosphate
  modified_base 14: mod_base = OTHER; note = 2'-O-methyluridine-3'-phosphate
  modified_base 15: mod_base = OTHER; note = 2'-O-methyluridine-3'-phosphate
  modified_base 16: mod_base = OTHER; note = 2'-O-methylguanosine-3'-phosphate
  modified_base 17: mod_base = OTHER; note = 2'-O-methylguanosine-3'-phosphate
  modified_base 18: mod_base = OTHER; note = 2'-O-methyluridine-3'-phosphate
  modified_base 19: mod_base = OTHER; note = 2'-O-methylguanosine-3'-phosphate
  modified_base 20: mod_base = OTHER; note = 2'-O-methyladenosine-3'-phosphate
  modified_base 21: mod_base = OTHER; note = 2'-O-methyluridine-3'-phosphate attached to N-[tris(N-acetylgalactosamine-alkyl)-amidodecanoyl)]-4-hydr oxyprolinol Hyp-(N-acetylgalactosamine-alkyl)3
tgggtggcggtaattggtgat

SEQ ID NO: 2669 - RNA, 23 nt, synthetic construct
  misc_feature 1..23: note = Description of Artificial Sequence: Synthetic oligonucleotide
  source 1..23: mol_type = other RNA
  modified_base 1: mod_base = OTHER; note = 2'-O-methyladenosine-3'- phosphorothioate
  modified_base 2: mod_base = OTHER; note = 2'-fluorouridine -3'-phosphorothioate
  modified_base 3: mod_base = OTHER; note = 2'-O-methylcytidine-3'-phosphate
  modified_base 4: mod_base = OTHER; note = 2'-O-methyladenosine-3'-phosphate
  modified_base 5: mod_base = OTHER; note = 2'-O-methylcytidine-3'-phosphate
  modified_base 6: mod_base = OTHER; note = 2'-fluorocytidine-3'-phosphate
  modified_base 7: mod_base = OTHER; note = 2'-O-methyladenosine-3'-phosphate
  modified_base 8: mod_base = OTHER; note = 2'-fluoroadenosine-3'-phosphate
  modified_base 9: mod_base = OTHER; note = 2'-fluorouridine-3'-phosphate
  modified_base 10: mod_base = OTHER; note = 2'-O-methyluridine-3'-phosphate
  modified_base 11: mod_base = OTHER; note = 2'-O-methyladenosine-3'-phosphate
  modified_base 12: mod_base = OTHER; note = 2'-O-methylcytidine-3'-phosphate
  modified_base 13: mod_base = OTHER; note = 2'-O-methylcytidine-3'-phosphate
  modified_base 14: mod_base = OTHER; note = 2'-fluoroguanosine-3'-phosphate
  modified_base 15: mod_base = OTHER; note = 2'-O-methylcytidine-3'-phosphate
  modified_base 16: mod_base = OTHER; note = 2'-fluorocytidine-3'-phosphate
  modified_base 17: mod_base = OTHER; note = 2'-O-methyladenosine-3'-phosphate
  modified_base 18: mod_base = OTHER; note = 2'-O-methylcytidine-3'-phosphate
  modified_base 19: mod_base = OTHER; note = 2'-O-methylcytidine-3'-phosphate
  modified_base 20: mod_base = OTHER; note = 2'-O-methylcytidine-3'-phosphate
  modified_base 21: mod_base = OTHER; note = 2'-O-methyladenosine-3'- phosphorothioate
  modified_base 22: mod_base = OTHER; note = 2'-O-methyluridine-3'-phosphorothioate
  modified_base 23: mod_base = OTHER; note = 2'-O-methyluridine-3'-phosphate
atcaccaattaccgccacccatt

SEQ ID NO: 2670 - RNA, 21 nt, synthetic construct
  misc_feature 1..21: note = Description of Artificial Sequence: Synthetic oligonucleotide
  source 1..21: mol_type = other RNA
  modified_base 1: mod_base = OTHER; note = 2'-O-methyluridine-3'-phosphorothioate
  modified_base 2: mod_base = OTHER; note = 2'-O-methylguanosine-3'- phosphorothioate
  modified_base 3: mod_base = OTHER; note = 2'-O-methylguanosine-3'-phosphate
  modified_base 4: mod_base = OTHER; note = 2'-O-methyladenosine-3'-phosphate
  modified_base 5: mod_base = OTHER; note = 2'-O-methyladenosine-3'-phosphate
  modified_base 6: mod_base = OTHER; note = 2'-O-methyluridine-3'-phosphate
  modified_base 7: mod_base = OTHER; note = 2'-fluoroguanosine-3'-phosphate
  modified_base 8: mod_base = OTHER; note = 2'-O-methylguanosine-3'-phosphate
  modified_base 9: mod_base = OTHER; note = 2'-fluoroguanosine-3'-phosphate
  modified_base 10: mod_base = OTHER; note = 2'-fluorouridine-3'-phosphate
  modified_base 11: mod_base = OTHER; note = 2'-fluoroguanosine-3'-phosphate
  modified_base 12: mod_base = OTHER; note = 2'-O-methylguanosine-3'-phosphate
  modified_base 13: mod_base = OTHER; note = 2'-O-methylcytidine-3'-phosphate
  modified_base 14: mod_base = OTHER; note = 2'-O-methylguanosine-3'-phosphate
  modified_base 15: mod_base = OTHER; note = 2'-O-methylguanosine-3'-phosphate
  modified_base 16: mod_base = OTHER; note = 2'-O-methyluridine-3'-phosphate
  modified_base 17: mod_base = OTHER; note = 2'-O-methyladenosine-3'-phosphate
  modified_base 18: mod_base = OTHER; note = 2'-O-methyladenosine-3'-phosphate
  modified_base 19: mod_base = OTHER; note = 2'-O-methyluridine-3'-phosphate
  modified_base 20: mod_base = OTHER; note = 2'-O-methyluridine-3'-phosphate
  modified_base 21: mod_base = OTHER; note = 2'-O-methylguanosine-3'-phosphate attached to N-[tris(N-acetylgalactosamine-alkyl)-amidodecanoyl)]-4-hydr oxyprolinol Hyp-(N-acetylgalactosamine-alkyl)3
tggaatgggtggcggtaattg

SEQ ID NO: 2671 - RNA, 23 nt, synthetic construct
  misc_feature 1..23: note = Description of Artificial Sequence: Synthetic oligonucleotide
  source 1..23: mol_type = other RNA
  modified_base 1: mod_base = OTHER; note = 2'-O-methylcytidine-3'- phosphorothioate
  modified_base 2: mod_base = OTHER; note = 2'-fluoroadenosine-3'-phosphorothioate
  modified_base 3: mod_base = OTHER; note = 2'-O-methyladenosine-3'-phosphate
  modified_base 4: mod_base = OTHER; note = 2'-O-methyluridine-3'-phosphate
  modified_base 5: mod_base = OTHER; note = 2'-O-methyluridine-3'-phosphate
  modified_base 6: mod_base = OTHER; note = 2'-fluoroadenosine-3'-phosphate
  modified_base 7: mod_base = OTHER; note = 2'-O-methylcytidine-3'-phosphate
  modified_base 8: mod_base = OTHER; note = 2'-fluorocytidine-3'-phosphate
  modified_base 9: mod_base = OTHER; note = 2'-fluoroguanosine-3'-phosphate
  modified_base 10: mod_base = OTHER; note = 2'-O-methylcytidine-3'-phosphate
  modified_base 11: mod_base = OTHER; note = 2'-O-methylcytidine-3'-phosphate
  modified_base 12: mod_base = OTHER; note = 2'-O-methyladenosine-3'-phosphate
  modified_base 13: mod_base = OTHER; note = 2'-O-methylcytidine-3'-phosphate
  modified_base 14: mod_base = OTHER; note = 2'-fluorocytidine-3'-phosphate
  modified_base 15: mod_base = OTHER; note = 2'-O-methylcytidine-3'-phosphate
  modified_base 16: mod_base = OTHER; note = 2'-fluoroadenosine-3'-phosphate
  modified_base 17: mod_base = OTHER; note = 2'-O-methyluridine-3'-phosphate
  modified_base 18: mod_base = OTHER; note = 2'-O-methyluridine-3'-phosphate
  modified_base 19: mod_base = OTHER; note = 2'-O-methylcytidine-3'-phosphate
  modified_base 20: mod_base = OTHER; note = 2'-O-methylcytidine-3'-phosphate
  modified_base 21: mod_base = OTHER; note = 2'-O-methyladenosine-3'- phosphorothioate
  modified_base 22: mod_base = OTHER; note = 2'-O-methyladenosine-3'- phosphorothioate
  modified_base 23: mod_base = OTHER; note = 2'-O-methyluridine-3'-phosphate
caattaccgccacccattccaat

SEQ ID NO: 2672 - RNA, 21 nt, synthetic construct
  misc_feature 1..21: note = Description of Artificial Sequence: Synthetic oligonucleotide
  source 1..21: mol_type = other RNA
  modified_base 1: mod_base = OTHER; note = 2'-O-methyluridine-3'-phosphorothioate
  modified_base 2: mod_base = OTHER; note = 2'-O-methyluridine-3'-phosphorothioate
  modified_base 3: mod_base = OTHER; note = 2'-O-methylguanosine-3'-phosphate
  modified_base 4: mod_base = OTHER; note = 2'-O-methylguanosine-3'-phosphate
  modified_base 5: mod_base = OTHER; note = 2'-O-methyladenosine-3'-phosphate
  modified_base 6: mod_base = OTHER; note = 2'-O-methyladenosine-3'-phosphate
  modified_base 7: mod_base = OTHER; note = 2'-fluorouridine-3'-phosphate
  modified_base 8: mod_base = OTHER; note = 2'-O-methylguanosine-3'-phosphate
  modified_base 9: mod_base = OTHER; note = 2'-fluoroguanosine-3'-phosphate
  modified_base 10: mod_base = OTHER; note = 2'-fluoroguanosine-3'-phosphate
  modified_base 11: mod_base = OTHER; note = 2'-fluorouridine-3'-phosphate
  modified_base 12: mod_base = OTHER; note = 2'-O-methylguanosine-3'-phosphate
  modified_base 13: mod_base = OTHER; note = 2'-O-methylguanosine-3'-phosphate
  modified_base 14: mod_base = OTHER; note = 2'-O-methylcytidine-3'-phosphate
  modified_base 15: mod_base = OTHER; note = 2'-O-methylguanosine-3'-phosphate
  modified_base 16: mod_base = OTHER; note = 2'-O-methylguanosine-3'-phosphate
  modified_base 17: mod_base = OTHER; note = 2'-O-methyluridine-3'-phosphate
  modified_base 18: mod_base = OTHER; note = 2'-O-methyladenosine-3'-phosphate
  modified_base 19: mod_base = OTHER; note = 2'-O-methyladenosine-3'-phosphate
  modified_base 20: mod_base = OTHER; note = 2'-O-methyluridine-3'-phosphate
  modified_base 21: mod_base = OTHER; note = 2'-O-methyluridine-3'-phosphate attached to N-[tris(N-acetylgalactosamine-alkyl)-amidodecanoyl)]-4-hydr oxyprolinol Hyp-(N-acetylgalactosamine-alkyl)3
ttggaatgggtggcggtaatt

SEQ ID NO: 2673 - RNA, 23 nt, synthetic construct
  misc_feature 1..23: note = Description of Artificial Sequence: Synthetic oligonucleotide
  source 1..23: mol_type = other RNA
  modified_base 1: mod_base = OTHER; note = 2'-O-methyladenosine-3'- phosphorothioate
  modified_base 2: mod_base = OTHER; note = 2'-fluoroadenosine-3'-phosphorothioate
  modified_base 3: mod_base = OTHER; note = 2'-O-methyluridine-3'-phosphate
  modified_base 4: mod_base = OTHER; note = 2'-O-methyluridine-3'-phosphate
  modified_base 5: mod_base = OTHER; note = 2'-O-methyladenosine-3'-phosphate
  modified_base 6: mod_base = OTHER; note = 2'-fluorocytidine-3'-phosphate
  modified_base 7: mod_base = OTHER; note = 2'-O-methylcytidine-3'-phosphate
  modified_base 8: mod_base = OTHER; note = 2'-fluoroguanosine-3'-phosphate
  modified_base 9: mod_base = OTHER; note = 2'-fluorocytidine-3'-phosphate
  modified_base 10: mod_base = OTHER; note = 2'-O-methylcytidine-3'-phosphate
  modified_base 11: mod_base = OTHER; note = 2'-O-methyladenosine-3'-phosphate
  modified_base 12: mod_base = OTHER; note = 2'-O-methylcytidine-3'-phosphate
  modified_base 13: mod_base = OTHER; note = 2'-O-methylcytidine-3'-phosphate
  modified_base 14: mod_base = OTHER; note = 2'-fluorocytidine-3'-phosphate
  modified_base 15: mod_base = OTHER; note = 2'-O-methyladenosine-3'-phosphate
  modified_base 16: mod_base = OTHER; note = 2'-fluorouridine-3'-phosphate
  modified_base 17: mod_base = OTHER; note = 2'-O-methyluridine-3'-phosphate
  modified_base 18: mod_base = OTHER; note = 2'-O-methylcytidine-3'-phosphate
  modified_base 19: mod_base = OTHER; note = 2'-O-methylcytidine-3'-phosphate
  modified_base 20: mod_base = OTHER; note = 2'-O-methyladenosine-3'-phosphate
  modified_base 21: mod_base = OTHER; note = 2'-O-methyladenosine-3'- phosphorothioate
  modified_base 22: mod_base = OTHER; note = 2'-O-methyluridine-3'-phosphorothioate
  modified_base 23: mod_base = OTHER; note = 2'-O-methyluridine-3'-phosphate
aattaccgccacccattccaatt

SEQ ID NO: 2674 - RNA, 21 nt, synthetic construct
  misc_feature 1..21: note = Description of Artificial Sequence: Synthetic oligonucleotide
  source 1..21: mol_type = other RNA
  modified_base 1: mod_base = OTHER; note = 2'-O-methyluridine-3'-phosphorothioate
  modified_base 2: mod_base = OTHER; note = 2'-O-methyluridine-3'-phosphorothioate
  modified_base 3: mod_base = OTHER; note = 2'-O-methylcytidine-3'-phosphate
  modified_base 4: mod_base = OTHER; note = 2'-O-methyladenosine-3'-phosphate
  modified_base 5: mod_base = OTHER; note = 2'-O-methyladenosine-3'-phosphate
  modified_base 6: mod_base = OTHER; note = 2'-O-methyladenosine-3'-phosphate
  modified_base 7: mod_base = OTHER; note = 2'-fluoroguanosine-3'-phosphate
  modified_base 8: mod_base = OTHER; note = 2'-O-methyluridine-3'-phosphate
  modified_base 9: mod_base = OTHER; note = 2'-fluoroguanosine-3'-phosphate
  modified_base 10: mod_base = OTHER; note = 2'-fluorouridine-3'-phosphate
  modified_base 11: mod_base = OTHER; note = 2'-fluorouridine-3'-phosphate
  modified_base 12: mod_base = OTHER; note = 2'-O-methylguanosine-3'-phosphate
  modified_base 13: mod_base = OTHER; note = 2'-O-methylguanosine-3'-phosphate
  modified_base 14: mod_base = OTHER; note = 2'-O-methyluridine-3'-phosphate
  modified_base 15: mod_base = OTHER; note = 2'-O-methyladenosine-3'-phosphate
  modified_base 16: mod_base = OTHER; note = 2'-O-methyladenosine-3'-phosphate
  modified_base 17: mod_base = OTHER; note = 2'-O-methyluridine-3'-phosphate
  modified_base 18: mod_base = OTHER; note = 2'-O-methylguanosine-3'-phosphate
  modified_base 19: mod_base = OTHER; note = 2'-O-methylcytidine-3'-phosphate
  modified_base 20: mod_base = OTHER; note = 2'-O-methylcytidine-3'-phosphate
  modified_base 21: mod_base = OTHER; note = 2'-O-methyluridine-3'-phosphate attached to N-[tris(N-acetylgalactosamine-alkyl)-amidodecanoyl)]-4-hydr oxyprolinol Hyp-(N-acetylgalactosamine-alkyl)3
ttcaaagtgttggtaatgcct

SEQ ID NO: 2675 - RNA, 23 nt, synthetic construct
  misc_feature 1..23: note = Description of Artificial Sequence: Synthetic oligonucleotide
  source 1..23: mol_type = other RNA
  modified_base 1: mod_base = OTHER; note = 2'-O-methyladenosine-3'- phosphorothioate
  modified_base 2: mod_base = OTHER; note = 2'-fluoroguanosine-3'-phosphorothioate
  modified_base 3: mod_base = OTHER; note = 2'-O-methylguanosine-3'-phosphate
  modified_base 4: mod_base = OTHER; note = 2'-O-methylcytidine-3'-phosphate
  modified_base 5: mod_base = OTHER; note = 2'-O-methyladenosine-3'-phosphate
  modified_base 6: mod_base = OTHER; note = 2'-fluorouridine-3'-phosphate
  modified_base 7: mod_base = OTHER; note = 2'-O-methyluridine-3'-phosphate
  modified_base 8: mod_base = OTHER; note = 2'-fluoroadenosine-3'-phosphate
  modified_base 9: mod_base = OTHER; note = 2'-fluorocytidine-3'-phosphate
  modified_base 10: mod_base = OTHER; note = 2'-O-methylcytidine-3'-phosphate
  modified_base 11: mod_base = OTHER; note = 2'-O-methyladenosine-3'-phosphate
  modified_base 12: mod_base = OTHER; note = 2'-O-methyladenosine-3'-phosphate
  modified_base 13: mod_base = OTHER; note = 2'-O-methylcytidine-3'-phosphate
  modified_base 14: mod_base = OTHER; note = 2'-fluoroadenosine-3'-phosphate
  modified_base 15: mod_base = OTHER; note = 2'-O-methylcytidine-3'-phosphate
  modified_base 16: mod_base = OTHER; note = 2'-fluorouridine-3'-phosphate
  modified_base 17: mod_base = OTHER; note = 2'-O-methyluridine-3'-phosphate
  modified_base 18: mod_base = OTHER; note = 2'-O-methyluridine-3'-phosphate
  modified_base 19: mod_base = OTHER; note = 2'-O-methylguanosine-3'-phosphate
  modified_base 20: mod_base = OTHER; note = 2'-O-methyladenosine-3'-phosphate
  modified_base 21: mod_base = OTHER; note = 2'-O-methyladenosine-3'- phosphorothioate
  modified_base 22: mod_base = OTHER; note = 2'-O-methylcytidine-3'- phosphorothioate
  modified_base 23: mod_base = OTHER; note = 2'-O-methylcytidine-3'-phosphate
aggcattaccaacactttgaacc

SEQ ID NO: 2676 - RNA, 21 nt, synthetic construct
  misc_feature 1..21: note = Description of Artificial Sequence: Synthetic oligonucleotide
  source 1..21: mol_type = other RNA
  modified_base 1: mod_base = OTHER; note = 2'-O-methyluridine-3'-phosphorothioate
  modified_base 2: mod_base = OTHER; note = 2'-O-methylcytidine-3'- phosphorothioate
  modified_base 3: mod_base = OTHER; note = 2'-O-methyladenosine-3'-phosphate
  modified_base 4: mod_base = OTHER; note = 2'-O-methyladenosine-3'-phosphate
  modified_base 5: mod_base = OTHER; note = 2'-O-methyladenosine-3'-phosphate
  modified_base 6: mod_base = OTHER; note = 2'-O-methylguanosine-3'-phosphate
  modified_base 7: mod_base = OTHER; note = 2'-fluorouridine-3'-phosphate
  modified_base 8: mod_base = OTHER; note = 2'-O-methylguanosine-3'-phosphate
  modified_base 9: mod_base = OTHER; note = 2'-fluorouridine-3'-phosphate
  modified_base 10: mod_base = OTHER; note = 2'-fluorouridine-3'-phosphate
  modified_base 11: mod_base = OTHER; note = 2'-fluoroguanosine-3'-phosphate
  modified_base 12: mod_base = OTHER; note = 2'-O-methylguanosine-3'-phosphate
  modified_base 13: mod_base = OTHER; note = 2'-O-methyluridine-3'-phosphate
  modified_base 14: mod_base = OTHER; note = 2'-O-methyladenosine-3'-phosphate
  modified_base 15: mod_base = OTHER; note = 2'-O-methyladenosine-3'-phosphate
  modified_base 16: mod_base = OTHER; note = 2'-O-methyluridine-3'-phosphate
  modified_base 17: mod_base = OTHER; note = 2'-O-methylguanosine-3'-phosphate
  modified_base 18: mod_base = OTHER; note = 2'-O-methylcytidine-3'-phosphate
  modified_base 19: mod_base = OTHER; note = 2'-O-methylcytidine-3'-phosphate
  modified_base 20: mod_base = OTHER; note = 2'-O-methyluridine-3'-phosphate
  modified_base 21: mod_base = OTHER; note = 2'-O-methylguanosine-3'-phosphate attached to N-[tris(N-acetylgalactosamine-alkyl)-amidodecanoyl)]-4-hydr oxyprolinol Hyp-(N-acetylgalactosamine-alkyl)3
tcaaagtgttggtaatgcctg

SEQ ID NO: 2677 - RNA, 23 nt, synthetic construct
  misc_feature 1..23: note = Description of Artificial Sequence: Synthetic oligonucleotide
  source 1..23: mol_type = other RNA
  modified_base 1: mod_base = OTHER; note = 2'-O-methylcytidine-3'- phosphorothioate
  modified_base 2: mod_base = OTHER; note = 2'-fluoroadenosine-3'-phosphorothioate
  modified_base 3: mod_base = OTHER; note = 2'-O-methylguanosine-3'-phosphate
  modified_base 4: mod_base = OTHER; note = 2'-O-methylguanosine-3'-phosphate
  modified_base 5: mod_base = OTHER; note = 2'-O-methylcytidine-3'-phosphate
  modified_base 6: mod_base = OTHER; note = 2'-fluoroadenosine-3'-phosphate
  modified_base 7: mod_base = OTHER; note = 2'-O-methyluridine-3'-phosphate
  modified_base 8: mod_base = OTHER; note = 2'-fluorouridine-3'-phosphate
  modified_base 9: mod_base = OTHER; note = 2'-fluoroadenosine-3'-phosphate
  modified_base 10: mod_base = OTHER; note = 2'-O-methylcytidine-3'-phosphate
  modified_base 11: mod_base = OTHER; note = 2'-O-methylcytidine-3'-phosphate
  modified_base 12: mod_base = OTHER; note = 2'-O-methyladenosine-3'-phosphate
  modified_base 13: mod_base = OTHER; note = 2'-O-methyladenosine-3'-phosphate
  modified_base 14: mod_base = OTHER; note = 2'-fluorocytidine-3'-phosphate
  modified_base 15: mod_base = OTHER; note = 2'-O-methyladenosine-3'-phosphate
  modified_base 16: mod_base = OTHER; note = 2'-fluorocytidine-3'-phosphate
  modified_base 17: mod_base = OTHER; note = 2'-O-methyluridine-3'-phosphate
  modified_base 18: mod_base = OTHER; note = 2'-O-methyluridine-3'-phosphate
  modified_base 19: mod_base = OTHER; note = 2'-O-methyluridine-3'-phosphate
  modified_base 20: mod_base = OTHER; note = 2'-O-methylguanosine-3'-phosphate
  modified_base 21: mod_base = OTHER; note = 2'-O-methyladenosine-3'- phosphorothioate
  modified_base 22: mod_base = OTHER; note = 2'-O-methyladenosine-3'- phosphorothioate
  modified_base 23: mod_base = OTHER; note = 2'-O-methylcytidine-3'-phosphate
caggcattaccaacactttgaac

SEQ ID NO: 2678 - RNA, 21 nt, synthetic construct
  misc_feature 1..21: note = Description of Artificial Sequence: Synthetic oligonucleotide
  source 1..21: mol_type = other RNA
  modified_base 1: mod_base = OTHER; note = 2'-O-methylcytidine-3'- phosphorothioate
  modified_base 2: mod_base = OTHER; note = 2'-O-methyladenosine-3'- phosphorothioate
  modified_base 3: mod_base = OTHER; note = 2'-O-methylguanosine-3'-phosphate
  modified_base 4: mod_base = OTHER; note = 2'-O-methylguanosine-3'-phosphate
  modified_base 5: mod_base = OTHER; note = 2'-O-methyluridine-3'-phosphate
  modified_base 6: mod_base = OTHER; note = 2'-O-methyluridine-3'-phosphate
  modified_base 7: mod_base = OTHER; note = 2'-fluorocytidine-3'-phosphate
  modified_base 8: mod_base = OTHER; note = 2'-O-methyladenosine-3'-phosphate
  modified_base 9: mod_base = OTHER; note = 2'-fluoroadenosine-3'-phosphate
  modified_base 10: mod_base = OTHER; note = 2'-fluoroadenosine-3'-phosphate
  modified_base 11: mod_base = OTHER; note = 2'-fluoroguanosine-3'-phosphate
  modified_base 12: mod_base = OTHER; note = 2'-O-methyluridine-3'-phosphate
  modified_base 13: mod_base = OTHER; note = 2'-O-methylguanosine-3'-phosphate
  modified_base 14: mod_base = OTHER; note = 2'-O-methyluridine-3'-phosphate
  modified_base 15: mod_base = OTHER; note = 2'-O-methyluridine-3'-phosphate
  modified_base 16: mod_base = OTHER; note = 2'-O-methylguanosine-3'-phosphate
  modified_base 17: mod_base = OTHER; note = 2'-O-methylguanosine-3'-phosphate
  modified_base 18: mod_base = OTHER; note = 2'-O-methyluridine-3'-phosphate
  modified_base 19: mod_base = OTHER; note = 2'-O-methyladenosine-3'-phosphate
  modified_base 20: mod_base = OTHER; note = 2'-O-methyladenosine-3'-phosphate
  modified_base 21: mod_base = OTHER; note = 2'-O-methyluridine-3'-phosphate attached to N-[tris(N-acetylgalactosamine-alkyl)-amidodecanoyl)]-4-hydr oxyprolinol Hyp-(N-acetylgalactosamine-alkyl)3
caggttcaaagtgttggtaat

SEQ ID NO: 2679 - RNA, 23 nt, synthetic construct
  misc_feature 1..23: note = Description of Artificial Sequence: Synthetic oligonucleotide
  source 1..23: mol_type = other RNA
  modified_base 1: mod_base = OTHER; note = 2'-O-methyladenosine-3'- phosphorothioate
  modified_base 2: mod_base = OTHER; note = 2'-fluorouridine -3'-phosphorothioate
  modified_base 3: mod_base = OTHER; note = 2'-O-methyluridine-3'-phosphate
  modified_base 4: mod_base = OTHER; note = 2'-O-methyladenosine-3'-phosphate
  modified_base 5: mod_base = OTHER; note = 2'-O-methylcytidine-3'-phosphate
  modified_base 6: mod_base = OTHER; note = 2'-fluorocytidine-3'-phosphate
  modified_base 7: mod_base = OTHER; note = 2'-O-methyladenosine-3'-phosphate
  modified_base 8: mod_base = OTHER; note = 2'-fluoroadenosine-3'-phosphate
  modified_base 9: mod_base = OTHER; note = 2'-fluorocytidine-3'-phosphate
  modified_base 10: mod_base = OTHER; note = 2'-O-methyladenosine-3'-phosphate
  modified_base 11: mod_base = OTHER; note = 2'-O-methylcytidine-3'-phosphate
  modified_base 12: mod_base = OTHER; note = 2'-O-methyluridine-3'-phosphate
  modified_base 13: mod_base = OTHER; note = 2'-O-methyluridine-3'-phosphate
  modified_base 14: mod_base = OTHER; note = 2'-fluorouridine-3'-phosphate
  modified_base 15: mod_base = OTHER; note = 2'-O-methylguanosine-3'-phosphate
  modified_base 16: mod_base = OTHER; note = 2'-fluoroadenosine-3'-phosphate
  modified_base 17: mod_base = OTHER; note = 2'-O-methyladenosine-3'-phosphate
  modified_base 18: mod_base = OTHER; note = 2'-O-methylcytidine-3'-phosphate
  modified_base 19: mod_base = OTHER; note = 2'-O-methylcytidine-3'-phosphate
  modified_base 20: mod_base = OTHER; note = 2'-O-methyluridine-3'-phosphate
  modified_base 21: mod_base = OTHER; note = 2'-O-methylguanosine-3'- phosphorothioate
  modified_base 22: mod_base = OTHER; note = 2'-O-methyladenosine-3'- phosphorothioate
  modified_base 23: mod_base = OTHER; note = 2'-O-methylguanosine-3'-phosphate
attaccaacactttgaacctgag

SEQ ID NO: 2680 - RNA, 21 nt, synthetic construct
  misc_feature 1..21: note = Description of Artificial Sequence: Synthetic oligonucleotide
  source 1..21: mol_type = other RNA
  modified_base 1: mod_base = OTHER; note = 2'-O-methyluridine-3'-phosphorothioate
  modified_base 2: mod_base = OTHER; note = 2'-O-methylcytidine-3'- phosphorothioate
  modified_base 3: mod_base = OTHER; note = 2'-O-methyladenosine-3'-phosphate
  modified_base 4: mod_base = OTHER; note = 2'-O-methylguanosine-3'-phosphate
  modified_base 5: mod_base = OTHER; note = 2'-O-methylguanosine-3'-phosphate
  modified_base 6: mod_base = OTHER; note = 2'-O-methyluridine-3'-phosphate
  modified_base 7: mod_base = OTHER; note = 2'-fluorouridine-3'-phosphate
  modified_base 8: mod_base = OTHER; note = 2'-O-methylcytidine-3'-phosphate
  modified_base 9: mod_base = OTHER; note = 2'-fluoroadenosine-3'-phosphate
  modified_base 10: mod_base = OTHER; note = 2'-fluoroadenosine-3'-phosphate
  modified_base 11: mod_base = OTHER; note = 2'-fluoroadenosine-3'-phosphate
  modified_base 12: mod_base = OTHER; note = 2'-O-methylguanosine-3'-phosphate
  modified_base 13: mod_base = OTHER; note = 2'-O-methyluridine-3'-phosphate
  modified_base 14: mod_base = OTHER; note = 2'-O-methylguanosine-3'-phosphate
  modified_base 15: mod_base = OTHER; note = 2'-O-methyluridine-3'-phosphate
  modified_base 16: mod_base = OTHER; note = 2'-O-methyluridine-3'-phosphate
  modified_base 17: mod_base = OTHER; note = 2'-O-methylguanosine-3'-phosphate
  modified_base 18: mod_base = OTHER; note = 2'-O-methylguanosine-3'-phosphate
  modified_base 19: mod_base = OTHER; note = 2'-O-methyluridine-3'-phosphate
  modified_base 20: mod_base = OTHER; note = 2'-O-methyladenosine-3'-phosphate
  modified_base 21: mod_base = OTHER; note = 2'-O-methyladenosine-3'-phosphate attached to N-[tris(N-acetylgalactosamine-alkyl)-amidodecanoyl)]-4-hydr oxyprolinol Hyp-(N-acetylgalactosamine-alkyl)3
tcaggttcaaagtgttggtaa

SEQ ID NO: 2681 - RNA, 23 nt, synthetic construct
  misc_feature 1..23: note = Description of Artificial Sequence: Synthetic oligonucleotide
  source 1..23: mol_type = other RNA
  modified_base 1: mod_base = OTHER; note = 2'-O-methyluridine-3'-phosphorothioate
  modified_base 2: mod_base = OTHER; note = 2'-fluorouridine -3'-phosphorothioate
  modified_base 3: mod_base = OTHER; note = 2'-O-methyladenosine-3'-phosphate
  modified_base 4: mod_base = OTHER; note = 2'-O-methylcytidine-3'-phosphate
  modified_base 5: mod_base = OTHER; note = 2'-O-methylcytidine-3'-phosphate
  modified_base 6: mod_base = OTHER; note = 2'-fluoroadenosine-3'-phosphate
  modified_base 7: mod_base = OTHER; note = 2'-O-methyladenosine-3'-phosphate
  modified_base 8: mod_base = OTHER; note = 2'-fluorocytidine-3'-phosphate
  modified_base 9: mod_base = OTHER; note = 2'-fluoroadenosine-3'-phosphate
  modified_base 10: mod_base = OTHER; note = 2'-O-methylcytidine-3'-phosphate
  modified_base 11: mod_base = OTHER; note = 2'-O-methyluridine-3'-phosphate
  modified_base 12: mod_base = OTHER; note = 2'-O-methyluridine-3'-phosphate
  modified_base 13: mod_base = OTHER; note = 2'-O-methyluridine-3'-phosphate
  modified_base 14: mod_base = OTHER; note = 2'-fluoroguanosine-3'-phosphate
  modified_base 15: mod_base = OTHER; note = 2'-O-methyladenosine-3'-phosphate
  modified_base 16: mod_base = OTHER; note = 2'-fluoroadenosine-3'-phosphate
  modified_base 17: mod_base = OTHER; note = 2'-O-methylcytidine-3'-phosphate
  modified_base 18: mod_base = OTHER; note = 2'-O-methylcytidine-3'-phosphate
  modified_base 19: mod_base = OTHER; note = 2'-O-methyluridine-3'-phosphate
  modified_base 20: mod_base = OTHER; note = 2'-O-methylguanosine-3'-phosphate
  modified_base 21: mod_base = OTHER; note = 2'-O-methyladenosine-3'- phosphorothioate
  modified_base 22: mod_base = OTHER; note = 2'-O-methylguanosine-3'- phosphorothioate
  modified_base 23: mod_base = OTHER; note = 2'-O-methylcytidine-3'-phosphate
ttaccaacactttgaacctgagc

SEQ ID NO: 2682 - RNA, 21 nt, synthetic construct
  misc_feature 1..21: note = Description of Artificial Sequence: Synthetic oligonucleotide
  source 1..21: mol_type = other RNA
  modified_base 1: mod_base = OTHER; note = 2'-O-methylcytidine-3'- phosphorothioate
  modified_base 2: mod_base = OTHER; note = 2'-O-methylcytidine-3'- phosphorothioate
  modified_base 3: mod_base = OTHER; note = 2'-O-methyladenosine-3'-phosphate
  modified_base 4: mod_base = OTHER; note = 2'-O-methylcytidine-3'-phosphate
  modified_base 5: mod_base = OTHER; note = 2'-O-methylcytidine-3'-phosphate
  modified_base 6: mod_base = OTHER; note = 2'-O-methyluridine-3'-phosphate
  modified_base 7: mod_base = OTHER; note = 2'-fluorocytidine-3'-phosphate
  modified_base 8: mod_base = OTHER; note = 2'-O-methylcytidine-3'-phosphate
  modified_base 9: mod_base = OTHER; note = 2'-fluorouridine-3'-phosphate
  modified_base 10: mod_base = OTHER; note = 2'-fluorocytidine-3'-phosphate
  modified_base 11: mod_base = OTHER; note = 2'-fluoroadenosine-3'-phosphate
  modified_base 12: mod_base = OTHER; note = 2'-O-methyladenosine-3'-phosphate
  modified_base 13: mod_base = OTHER; note = 2'-O-methyluridine-3'-phosphate
  modified_base 14: mod_base = OTHER; note = 2'-O-methyluridine-3'-phosphate
  modified_base 15: mod_base = OTHER; note = 2'-O-methylguanosine-3'-phosphate
  modified_base 16: mod_base = OTHER; note = 2'-O-methyladenosine-3'-phosphate
  modified_base 17: mod_base = OTHER; note = 2'-O-methyladenosine-3'-phosphate
  modified_base 18: mod_base = OTHER; note = 2'-O-methylguanosine-3'-phosphate
  modified_base 19: mod_base = OTHER; note = 2'-O-methyladenosine-3'-phosphate
  modified_base 20: mod_base = OTHER; note = 2'-O-methyladenosine-3'-phosphate
  modified_base 21: mod_base = OTHER; note = 2'-O-methylguanosine-3'-phosphate attached to N-[tris(N-acetylgalactosamine-alkyl)-amidodecanoyl)]-4-hydr oxyprolinol Hyp-(N-acetylgalactosamine-alkyl)3
ccacctcctcaattgaagaag

SEQ ID NO: 2683 - RNA, 23 nt, synthetic construct
  misc_feature 1..23: note = Description of Artificial Sequence: Synthetic oligonucleotide
  source 1..23: mol_type = other RNA
  modified_base 1: mod_base = OTHER; note = 2'-O-methylcytidine-3'- phosphorothioate
  modified_base 2: mod_base = OTHER; note = 2'-fluorouridine -3'-phosphorothioate
  modified_base 3: mod_base = OTHER; note = 2'-O-methyluridine-3'-phosphate
  modified_base 4: mod_base = OTHER; note = 2'-O-methylcytidine-3'-phosphate
  modified_base 5: mod_base = OTHER; note = 2'-O-methyluridine-3'-phosphate
  modified_base 6: mod_base = OTHER; note = 2'-fluorouridine-3'-phosphate
  modified_base 7: mod_base = OTHER; note = 2'-O-methylcytidine-3'-phosphate
  modified_base 8: mod_base = OTHER; note = 2'-fluoroadenosine-3'-phosphate
  modified_base 9: mod_base = OTHER; note = 2'-fluoroadenosine-3'-phosphate
  modified_base 10: mod_base = OTHER; note = 2'-O-methyluridine-3'-phosphate
  modified_base 11: mod_base = OTHER; note = 2'-O-methyluridine-3'-phosphate
  modified_base 12: mod_base = OTHER; note = 2'-O-methylguanosine-3'-phosphate
  modified_base 13: mod_base = OTHER; note = 2'-O-methyladenosine-3'-phosphate
  modified_base 14: mod_base = OTHER; note = 2'-fluoroguanosine-3'-phosphate
  modified_base 15: mod_base = OTHER; note = 2'-O-methylguanosine-3'-phosphate
  modified_base 16: mod_base = OTHER; note = 2'-fluoroadenosine-3'-phosphate
  modified_base 17: mod_base = OTHER; note = 2'-O-methylguanosine-3'-phosphate
  modified_base 18: mod_base = OTHER; note = 2'-O-methylguanosine-3'-phosphate
  modified_base 19: mod_base = OTHER; note = 2'-O-methyluridine-3'-phosphate
  modified_base 20: mod_base = OTHER; note = 2'-O-methylguanosine-3'-phosphate
  modified_base 21: mod_base = OTHER; note = 2'-O-methylguanosine-3'- phosphorothioate
  modified_base 22: mod_base = OTHER; note = 2'-O-methylcytidine-3'- phosphorothioate
  modified_base 23: mod_base = OTHER; note = 2'-O-methylcytidine-3'-phosphate
cttcttcaattgaggaggtggcc

SEQ ID NO: 2684 - RNA, 21 nt, synthetic construct
  misc_feature 1..21: note = Description of Artificial Sequence: Synthetic oligonucleotide
  source 1..21: mol_type = other RNA
  modified_base 1: mod_base = OTHER; note = 2'-O-methylcytidine-3'- phosphorothioate
  modified_base 2: mod_base = OTHER; note = 2'-O-methyladenosine-3'- phosphorothioate
  modified_base 3: mod_base = OTHER; note = 2'-O-methylcytidine-3'-phosphate
  modified_base 4: mod_base = OTHER; note = 2'-O-methylcytidine-3'-phosphate
  modified_base 5: mod_base = OTHER; note = 2'-O-methyluridine-3'-phosphate
  modified_base 6: mod_base = OTHER; note = 2'-O-methylcytidine-3'-phosphate
  modified_base 7: mod_base = OTHER; note = 2'-fluorocytidine-3'-phosphate
  modified_base 8: mod_base = OTHER; note = 2'-O-methyluridine-3'-phosphate
  modified_base 9: mod_base = OTHER; note = 2'-fluorocytidine-3'-phosphate
  modified_base 10: mod_base = OTHER; note = 2'-fluoroadenosine-3'-phosphate
  modified_base 11: mod_base = OTHER; note = 2'-fluoroadenosine-3'-phosphate
  modified_base 12: mod_base = OTHER; note = 2'-O-methyluridine-3'-phosphate
  modified_base 13: mod_base = OTHER; note = 2'-O-methyluridine-3'-phosphate
  modified_base 14: mod_base = OTHER; note = 2'-O-methylguanosine-3'-phosphate
  modified_base 15: mod_base = OTHER; note = 2'-O-methyladenosine-3'-phosphate
  modified_base 16: mod_base = OTHER; note = 2'-O-methyladenosine-3'-phosphate
  modified_base 17: mod_base = OTHER; note = 2'-O-methylguanosine-3'-phosphate
  modified_base 18: mod_base = OTHER; note = 2'-O-methyladenosine-3'-phosphate
  modified_base 19: mod_base = OTHER; note = 2'-O-methyladenosine-3'-phosphate
  modified_base 20: mod_base = OTHER; note = 2'-O-methylguanosine-3'-phosphate
  modified_base 21: mod_base = OTHER; note = 2'-O-methyluridine-3'-phosphate attached to N-[tris(N-acetylgalactosamine-alkyl)-amidodecanoyl)]-4-hydr oxyprolinol Hyp-(N-acetylgalactosamine-alkyl)3
cacctcctcaattgaagaagt

SEQ ID NO: 2685 - RNA, 23 nt, synthetic construct
  misc_feature 1..23: note = Description of Artificial Sequence: Synthetic oligonucleotide
  source 1..23: mol_type = other RNA
  modified_base 1: mod_base = OTHER; note = 2'-O-methyladenosine-3'- phosphorothioate
  modified_base 2: mod_base = OTHER; note = 2'-fluorocytidine-3'-phosphorothioate
  modified_base 3: mod_base = OTHER; note = 2'-O-methyluridine-3'-phosphate
  modified_base 4: mod_base = OTHER; note = 2'-O-methyluridine-3'-phosphate
  modified_base 5: mod_base = OTHER; note = 2'-O-methylcytidine-3'-phosphate
  modified_base 6: mod_base = OTHER; note = 2'-fluorouridine-3'-phosphate
  modified_base 7: mod_base = OTHER; note = 2'-O-methyluridine-3'-phosphate
  modified_base 8: mod_base = OTHER; note = 2'-fluorocytidine-3'-phosphate
  modified_base 9: mod_base = OTHER; note = 2'-fluoroadenosine-3'-phosphate
  modified_base 10: mod_base = OTHER; note = 2'-O-methyladenosine-3'-phosphate
  modified_base 11: mod_base = OTHER; note = 2'-O-methyluridine-3'-phosphate
  modified_base 12: mod_base = OTHER; note = 2'-O-methyluridine-3'-phosphate
  modified_base 13: mod_base = OTHER; note = 2'-O-methylguanosine-3'-phosphate
  modified_base 14: mod_base = OTHER; note = 2'-fluoroadenosine-3'-phosphate
  modified_base 15: mod_base = OTHER; note = 2'-O-methylguanosine-3'-phosphate
  modified_base 16: mod_base = OTHER; note = 2'-fluoroguanosine-3'-phosphate
  modified_base 17: mod_base = OTHER; note = 2'-O-methyladenosine-3'-phosphate
  modified_base 18: mod_base = OTHER; note = 2'-O-methylguanosine-3'-phosphate
  modified_base 19: mod_base = OTHER; note = 2'-O-methylguanosine-3'-phosphate
  modified_base 20: mod_base = OTHER; note = 2'-O-methyluridine-3'-phosphate
  modified_base 21: mod_base = OTHER; note = 2'-O-methylguanosine-3'- phosphorothioate
  modified_base 22: mod_base = OTHER; note = 2'-O-methylguanosine-3'- phosphorothioate
  modified_base 23: mod_base = OTHER; note = 2'-O-methylcytidine-3'-phosphate
acttcttcaattgaggaggtggc

SEQ ID NO: 2686 - RNA, 21 nt, synthetic construct
  misc_feature 1..21: note = Description of Artificial Sequence: Synthetic oligonucleotide
  source 1..21: mol_type = other RNA
  modified_base 1: mod_base = OTHER; note = 2'-O-methyluridine-3'-phosphorothioate
  modified_base 2: mod_base = OTHER; note = 2'-O-methylguanosine-3'- phosphorothioate
  modified_base 3: mod_base = OTHER; note = 2'-O-methylguanosine-3'-phosphate
  modified_base 4: mod_base = OTHER; note = 2'-O-methylguanosine-3'-phosphate
  modified_base 5: mod_base = OTHER; note = 2'-O-methylcytidine-3'-phosphate
  modified_base 6: mod_base = OTHER; note = 2'-O-methylcytidine-3'-phosphate
  modified_base 7: mod_base = OTHER; note = 2'-fluoroadenosine-3'-phosphate
  modified_base 8: mod_base = OTHER; note = 2'-O-methylcytidine-3'-phosphate
  modified_base 9: mod_base = OTHER; note = 2'-fluorocytidine-3'-phosphate
  modified_base 10: mod_base = OTHER; note = 2'-fluorouridine-3'-phosphate
  modified_base 11: mod_base = OTHER; note = 2'-fluorocytidine-3'-phosphate
  modified_base 12: mod_base = OTHER; note = 2'-O-methylcytidine-3'-phosphate
  modified_base 13: mod_base = OTHER; note = 2'-O-methyluridine-3'-phosphate
  modified_base 14: mod_base = OTHER; note = 2'-O-methylcytidine-3'-phosphate
  modified_base 15: mod_base = OTHER; note = 2'-O-methyladenosine-3'-phosphate
  modified_base 16: mod_base = OTHER; note = 2'-O-methyladenosine-3'-phosphate
  modified_base 17: mod_base = OTHER; note = 2'-O-methyluridine-3'-phosphate
  modified_base 18: mod_base = OTHER; note = 2'-O-methyluridine-3'-phosphate
  modified_base 19: mod_base = OTHER; note = 2'-O-methylguanosine-3'-phosphate
  modified_base 20: mod_base = OTHER; note = 2'-O-methyladenosine-3'-phosphate
  modified_base 21: mod_base = OTHER; note = 2'-O-methyladenosine-3'-phosphate attached to N-[tris(N-acetylgalactosamine-alkyl)-amidodecanoyl)]-4-hydr oxyprolinol Hyp-(N-acetylgalactosamine-alkyl)3
tgggccacctcctcaattgaa

SEQ ID NO: 2687 - RNA, 23 nt, synthetic construct
  misc_feature 1..23: note = Description of Artificial Sequence: Synthetic oligonucleotide
  source 1..23: mol_type = other RNA
  modified_base 1: mod_base = OTHER; note = 2'-O-methyluridine-3'-phosphorothioate
  modified_base 2: mod_base = OTHER; note = 2'-fluorouridine -3'-phosphorothioate
  modified_base 3: mod_base = OTHER; note = 2'-O-methylcytidine-3'-phosphate
  modified_base 4: mod_base = OTHER; note = 2'-O-methyladenosine-3'-phosphate
  modified_base 5: mod_base = OTHER; note = 2'-O-methyladenosine-3'-phosphate
  modified_base 6: mod_base = OTHER; note = 2'-fluorouridine-3'-phosphate
  modified_base 7: mod_base = OTHER; note = 2'-O-methyluridine-3'-phosphate
  modified_base 8: mod_base = OTHER; note = 2'-fluoroguanosine-3'-phosphate
  modified_base 9: mod_base = OTHER; note = 2'-fluoroadenosine-3'-phosphate
  modified_base 10: mod_base = OTHER; note = 2'-O-methylguanosine-3'-phosphate
  modified_base 11: mod_base = OTHER; note = 2'-O-methylguanosine-3'-phosphate
  modified_base 12: mod_base = OTHER; note = 2'-O-methyladenosine-3'-phosphate
  modified_base 13: mod_base = OTHER; note = 2'-O-methylguanosine-3'-phosphate
  modified_base 14: mod_base = OTHER; note = 2'-fluoroguanosine-3'-phosphate
  modified_base 15: mod_base = OTHER; note = 2'-O-methyluridine-3'-phosphate
  modified_base 16: mod_base = OTHER; note = 2'-fluoroguanosine-3'-phosphate
  modified_base 17: mod_base = OTHER; note = 2'-O-methylguanosine-3'-phosphate
  modified_base 18: mod_base = OTHER; note = 2'-O-methylcytidine-3'-phosphate
  modified_base 19: mod_base = OTHER; note = 2'-O-methylcytidine-3'-phosphate
  modified_base 20: mod_base = OTHER; note = 2'-O-methylcytidine-3'-phosphate
  modified_base 21: mod_base = OTHER; note = 2'-O-methyladenosine-3'- phosphorothioate
  modified_base 22: mod_base = OTHER; note = 2'-O-methylguanosine-3'- phosphorothioate
  modified_base 23: mod_base = OTHER; note = 2'-O-methylguanosine-3'-phosphate
ttcaattgaggaggtggcccagg

SEQ ID NO: 2688 - RNA, 21 nt, synthetic construct
  misc_feature 1..21: note = Description of Artificial Sequence: Synthetic oligonucleotide
  source 1..21: mol_type = other RNA
  modified_base 1: mod_base = OTHER; note = 2'-O-methylcytidine-3'- phosphorothioate
  modified_base 2: mod_base = OTHER; note = 2'-O-methyluridine-3'-phosphorothioate
  modified_base 3: mod_base = OTHER; note = 2'-O-methylguanosine-3'-phosphate
  modified_base 4: mod_base = OTHER; note = 2'-O-methylguanosine-3'-phosphate
  modified_base 5: mod_base = OTHER; note = 2'-O-methylguanosine-3'-phosphate
  modified_base 6: mod_base = OTHER; note = 2'-O-methylcytidine-3'-phosphate
  modified_base 7: mod_base = OTHER; note = 2'-fluorocytidine-3'-phosphate
  modified_base 8: mod_base = OTHER; note = 2'-O-methyladenosine-3'-phosphate
  modified_base 9: mod_base = OTHER; note = 2'-fluorocytidine-3'-phosphate
  modified_base 10: mod_base = OTHER; note = 2'-fluorocytidine-3'-phosphate
  modified_base 11: mod_base = OTHER; note = 2'-fluorouridine-3'-phosphate
  modified_base 12: mod_base = OTHER; note = 2'-O-methylcytidine-3'-phosphate
  modified_base 13: mod_base = OTHER; note = 2'-O-methylcytidine-3'-phosphate
  modified_base 14: mod_base = OTHER; note = 2'-O-methyluridine-3'-phosphate
  modified_base 15: mod_base = OTHER; note = 2'-O-methylcytidine-3'-phosphate
  modified_base 16: mod_base = OTHER; note = 2'-O-methyladenosine-3'-phosphate
  modified_base 17: mod_base = OTHER; note = 2'-O-methyladenosine-3'-phosphate
  modified_base 18: mod_base = OTHER; note = 2'-O-methyluridine-3'-phosphate
  modified_base 19: mod_base = OTHER; note = 2'-O-methyluridine-3'-phosphate
  modified_base 20: mod_base = OTHER; note = 2'-O-methylguanosine-3'-phosphate
  modified_base 21: mod_base = OTHER; note = 2'-O-methyladenosine-3'-phosphate attached to N-[tris(N-acetylgalactosamine-alkyl)-amidodecanoyl)]-4-hydr oxyprolinol Hyp-(N-acetylgalactosamine-alkyl)3
ctgggccacctcctcaattga

SEQ ID NO: 2689 - RNA, 23 nt, synthetic construct
  misc_feature 1..23: note = Description of Artificial Sequence: Synthetic oligonucleotide
  source 1..23: mol_type = other RNA
  modified_base 1: mod_base = OTHER; note = 2'-O-methyluridine-3'-phosphorothioate
  modified_base 2: mod_base = OTHER; note = 2'-fluorocytidine-3'-phosphorothioate
  modified_base 3: mod_base = OTHER; note = 2'-O-methyladenosine-3'-phosphate
  modified_base 4: mod_base = OTHER; note = 2'-O-methyladenosine-3'-phosphate
  modified_base 5: mod_base = OTHER; note = 2'-O-methyluridine-3'-phosphate
  modified_base 6: mod_base = OTHER; note = 2'-fluorouridine-3'-phosphate
  modified_base 7: mod_base = OTHER; note = 2'-O-methylguanosine-3'-phosphate
  modified_base 8: mod_base = OTHER; note = 2'-fluoroadenosine-3'-phosphate
  modified_base 9: mod_base = OTHER; note = 2'-fluoroguanosine-3'-phosphate
  modified_base 10: mod_base = OTHER; note = 2'-O-methylguanosine-3'-phosphate
  modified_base 11: mod_base = OTHER; note = 2'-O-methyladenosine-3'-phosphate
  modified_base 12: mod_base = OTHER; note = 2'-O-methylguanosine-3'-phosphate
  modified_base 13: mod_base = OTHER; note = 2'-O-methylguanosine-3'-phosphate
  modified_base 14: mod_base = OTHER; note = 2'-fluorouridine-3'-phosphate
  modified_base 15: mod_base = OTHER; note = 2'-O-methylguanosine-3'-phosphate
  modified_base 16: mod_base = OTHER; note = 2'-fluoroguanosine-3'-phosphate
  modified_base 17: mod_base = OTHER; note = 2'-O-methylcytidine-3'-phosphate
  modified_base 18: mod_base = OTHER; note = 2'-O-methylcytidine-3'-phosphate
  modified_base 19: mod_base = OTHER; note = 2'-O-methylcytidine-3'-phosphate
  modified_base 20: mod_base = OTHER; note = 2'-O-methyladenosine-3'-phosphate
  modified_base 21: mod_base = OTHER; note = 2'-O-methylguanosine-3'- phosphorothioate
  modified_base 22: mod_base = OTHER; note = 2'-O-methylguanosine-3'- phosphorothioate
  modified_base 23: mod_base = OTHER; note = 2'-O-methyladenosine-3'-phosphate
tcaattgaggaggtggcccagga

SEQ ID NO: 2690 - RNA, 21 nt, synthetic construct
  misc_feature 1..21: note = Description of Artificial Sequence: Synthetic oligonucleotide
  source 1..21: mol_type = other RNA
  modified_base 1: mod_base = OTHER; note = 2'-O-methylguanosine-3'- phosphorothioate
  modified_base 2: mod_base = OTHER; note = 2'-O-methyladenosine-3'- phosphorothioate
  modified_base 3: mod_base = OTHER; note = 2'-O-methylguanosine-3'-phosphate
  modified_base 4: mod_base = OTHER; note = 2'-O-methyluridine-3'-phosphate
  modified_base 5: mod_base = OTHER; note = 2'-O-methylguanosine-3'-phosphate
  modified_base 6: mod_base = OTHER; note = 2'-O-methylguanosine-3'-phosphate
  modified_base 7: mod_base = OTHER; note = 2'-fluoroguanosine-3'-phosphate
  modified_base 8: mod_base = OTHER; note = 2'-O-methyluridine-3'-phosphate
  modified_base 9: mod_base = OTHER; note = 2'-fluoroguanosine-3'-phosphate
  modified_base 10: mod_base = OTHER; note = 2'-fluorocytidine-3'-phosphate
  modified_base 11: mod_base = OTHER; note = 2'-fluorocytidine-3'-phosphate
  modified_base 12: mod_base = OTHER; note = 2'-O-methyladenosine-3'-phosphate
  modified_base 13: mod_base = OTHER; note = 2'-O-methylguanosine-3'-phosphate
  modified_base 14: mod_base = OTHER; note = 2'-O-methyladenosine-3'-phosphate
  modified_base 15: mod_base = OTHER; note = 2'-O-methyladenosine-3'-phosphate
  modified_base 16: mod_base = OTHER; note = 2'-O-methyluridine-3'-phosphate
  modified_base 17: mod_base = OTHER; note = 2'-O-methylguanosine-3'-phosphate
  modified_base 18: mod_base = OTHER; note = 2'-O-methyluridine-3'-phosphate
  modified_base 19: mod_base = OTHER; note = 2'-O-methylguanosine-3'-phosphate
  modified_base 20: mod_base = OTHER; note = 2'-O-methyladenosine-3'-phosphate
  modified_base 21: mod_base = OTHER; note = 2'-O-methyladenosine-3'-phosphate attached to N-[tris(N-acetylgalactosamine-alkyl)-amidodecanoyl)]-4-hydr oxyprolinol Hyp-(N-acetylgalactosamine-alkyl)3
gagtgggtgccagaatgtgaa

SEQ ID NO: 2691 - RNA, 23 nt, synthetic construct
  misc_feature 1..23: note = Description of Artificial Sequence: Synthetic oligonucleotide
  source 1..23: mol_type = other RNA
  modified_base 1: mod_base = OTHER; note = 2'-O-methyluridine-3'-phosphorothioate
  modified_base 2: mod_base = OTHER; note = 2'-fluorouridine -3'-phosphorothioate
  modified_base 3: mod_base = OTHER; note = 2'-O-methylcytidine-3'-phosphate
  modified_base 4: mod_base = OTHER; note = 2'-O-methyladenosine-3'-phosphate
  modified_base 5: mod_base = OTHER; note = 2'-O-methylcytidine-3'-phosphate
  modified_base 6: mod_base = OTHER; note = 2'-fluoroadenosine-3'-phosphate
  modified_base 7: mod_base = OTHER; note = 2'-O-methyluridine-3'-phosphate
  modified_base 8: mod_base = OTHER; note = 2'-fluorouridine-3'-phosphate
  modified_base 9: mod_base = OTHER; note = 2'-fluorocytidine-3'-phosphate
  modified_base 10: mod_base = OTHER; note = 2'-O-methyluridine-3'-phosphate
  modified_base 11: mod_base = OTHER; note = 2'-O-methylguanosine-3'-phosphate
  modified_base 12: mod_base = OTHER; note = 2'-O-methylguanosine-3'-phosphate
  modified_base 13: mod_base = OTHER; note = 2'-O-methylcytidine-3'-phosphate
  modified_base 14: mod_base = OTHER; note = 2'-fluoroadenosine-3'-phosphate
  modified_base 15: mod_base = OTHER; note = 2'-O-methylcytidine-3'-phosphate
  modified_base 16: mod_base = OTHER; note = 2'-fluorocytidine-3'-phosphate
  modified_base 17: mod_base = OTHER; note = 2'-O-methylcytidine-3'-phosphate
  modified_base 18: mod_base = OTHER; note = 2'-O-methyladenosine-3'-phosphate
  modified_base 19: mod_base = OTHER; note = 2'-O-methylcytidine-3'-phosphate
  modified_base 20: mod_base = OTHER; note = 2'-O-methyluridine-3'-phosphate
  modified_base 21: mod_base = OTHER; note = 2'-O-methylcytidine-3'- phosphorothioate
  modified_base 22: mod_base = OTHER; note = 2'-O-methyladenosine-3'- phosphorothioate
  modified_base 23: mod_base = OTHER; note = 2'-O-methylguanosine-3'-phosphate
ttcacattctggcacccactcag

SEQ ID NO: 2692 - RNA, 21 nt, synthetic construct
  misc_feature 1..21: note = Description of Artificial Sequence: Synthetic oligonucleotide
  source 1..21: mol_type = other RNA
  modified_base 1: mod_base = OTHER; note = 2'-O-methyladenosine-3'- phosphorothioate
  modified_base 2: mod_base = OTHER; note = 2'-O-methylguanosine-3'- phosphorothioate
  modified_base 3: mod_base = OTHER; note = 2'-O-methyluridine-3'-phosphate
  modified_base 4: mod_base = OTHER; note = 2'-O-methylguanosine-3'-phosphate
  modified_base 5: mod_base = OTHER; note = 2'-O-methylguanosine-3'-phosphate
  modified_base 6: mod_base = OTHER; note = 2'-O-methylguanosine-3'-phosphate
  modified_base 7: mod_base = OTHER; note = 2'-fluorouridine-3'-phosphate
  modified_base 8: mod_base = OTHER; note = 2'-O-methylguanosine-3'-phosphate
  modified_base 9: mod_base = OTHER; note = 2'-fluorocytidine-3'-phosphate
  modified_base 10: mod_base = OTHER; note = 2'-fluorocytidine-3'-phosphate
  modified_base 11: mod_base = OTHER; note = 2'-fluoroadenosine-3'-phosphate
  modified_base 12: mod_base = OTHER; note = 2'-O-methylguanosine-3'-phosphate
  modified_base 13: mod_base = OTHER; note = 2'-O-methyladenosine-3'-phosphate
  modified_base 14: mod_base = OTHER; note = 2'-O-methyladenosine-3'-phosphate
  modified_base 15: mod_base = OTHER; note = 2'-O-methyluridine-3'-phosphate
  modified_base 16: mod_base = OTHER; note = 2'-O-methylguanosine-3'-phosphate
  modified_base 17: mod_base = OTHER; note = 2'-O-methyluridine-3'-phosphate
  modified_base 18: mod_base = OTHER; note = 2'-O-methylguanosine-3'-phosphate
  modified_base 19: mod_base = OTHER; note = 2'-O-methyladenosine-3'-phosphate
  modified_base 20: mod_base = OTHER; note = 2'-O-methyladenosine-3'-phosphate
  modified_base 21: mod_base = OTHER; note = 2'-O-methyladenosine-3'-phosphate attached to N-[tris(N-acetylgalactosamine-alkyl)-amidodecanoyl)]-4-hydr oxyprolinol Hyp-(N-acetylgalactosamine-alkyl)3
agtgggtgccagaatgtgaaa

SEQ ID NO: 2693 - RNA, 23 nt, synthetic construct
  misc_feature 1..23: note = Description of Artificial Sequence: Synthetic oligonucleotide
  source 1..23: mol_type = other RNA
  modified_base 1: mod_base = OTHER; note = 2'-O-methyluridine-3'-phosphorothioate
  modified_base 2: mod_base = OTHER; note = 2'-fluorouridine -3'-phosphorothioate
  modified_base 3: mod_base = OTHER; note = 2'-O-methyluridine-3'-phosphate
  modified_base 4: mod_base = OTHER; note = 2'-O-methylcytidine-3'-phosphate
  modified_base 5: mod_base = OTHER; note = 2'-O-methyladenosine-3'-phosphate
  modified_base 6: mod_base = OTHER; note = 2'-fluorocytidine-3'-phosphate
  modified_base 7: mod_base = OTHER; note = 2'-O-methyladenosine-3'-phosphate
  modified_base 8: mod_base = OTHER; note = 2'-fluorouridine-3'-phosphate
  modified_base 9: mod_base = OTHER; note = 2'-fluorouridine-3'-phosphate
  modified_base 10: mod_base = OTHER; note = 2'-O-methylcytidine-3'-phosphate
  modified_base 11: mod_base = OTHER; note = 2'-O-methyluridine-3'-phosphate
  modified_base 12: mod_base = OTHER; note = 2'-O-methylguanosine-3'-phosphate
  modified_base 13: mod_base = OTHER; note = 2'-O-methylguanosine-3'-phosphate
  modified_base 14: mod_base = OTHER; note = 2'-fluorocytidine-3'-phosphate
  modified_base 15: mod_base = OTHER; note = 2'-O-methyladenosine-3'-phosphate
  modified_base 16: mod_base = OTHER; note = 2'-fluorocytidine-3'-phosphate
  modified_base 17: mod_base = OTHER; note = 2'-O-methylcytidine-3'-phosphate
  modified_base 18: mod_base = OTHER; note = 2'-O-methylcytidine-3'-phosphate
  modified_base 19: mod_base = OTHER; note = 2'-O-methyladenosine-3'-phosphate
  modified_base 20: mod_base = OTHER; note = 2'-O-methylcytidine-3'-phosphate
  modified_base 21: mod_base = OTHER; note = 2'-O-methyluridine-3'-phosphorothioate
  modified_base 22: mod_base = OTHER; note = 2'-O-methylcytidine-3'- phosphorothioate
  modified_base 23: mod_base = OTHER; note = 2'-O-methyladenosine-3'-phosphate
tttcacattctggcacccactca

SEQ ID NO: 2694 - RNA, 21 nt, synthetic construct
  misc_feature 1..21: note = Description of Artificial Sequence: Synthetic oligonucleotide
  source 1..21: mol_type = other RNA
  modified_base 1: mod_base = OTHER; note = 2'-O-methylcytidine-3'- phosphorothioate
  modified_base 2: mod_base = OTHER; note = 2'-O-methyluridine-3'-phosphorothioate
  modified_base 3: mod_base = OTHER; note = 2'-O-methylcytidine-3'-phosphate
  modified_base 4: mod_base = OTHER; note = 2'-O-methyluridine-3'-phosphate
  modified_base 5: mod_base = OTHER; note = 2'-O-methylguanosine-3'-phosphate
  modified_base 6: mod_base = OTHER; note = 2'-O-methyladenosine-3'-phosphate
  modified_base 7: mod_base = OTHER; note = 2'-fluoroguanosine-3'-phosphate
  modified_base 8: mod_base = OTHER; note = 2'-O-methyluridine-3'-phosphate
  modified_base 9: mod_base = OTHER; note = 2'-fluoroguanosine-3'-phosphate
  modified_base 10: mod_base = OTHER; note = 2'-fluoroguanosine-3'-phosphate
  modified_base 11: mod_base = OTHER; note = 2'-fluoroguanosine-3'-phosphate
  modified_base 12: mod_base = OTHER; note = 2'-O-methyluridine-3'-phosphate
  modified_base 13: mod_base = OTHER; note = 2'-O-methylguanosine-3'-phosphate
  modified_base 14: mod_base = OTHER; note = 2'-O-methylcytidine-3'-phosphate
  modified_base 15: mod_base = OTHER; note = 2'-O-methylcytidine-3'-phosphate
  modified_base 16: mod_base = OTHER; note = 2'-O-methyladenosine-3'-phosphate
  modified_base 17: mod_base = OTHER; note = 2'-O-methylguanosine-3'-phosphate
  modified_base 18: mod_base = OTHER; note = 2'-O-methyladenosine-3'-phosphate
  modified_base 19: mod_base = OTHER; note = 2'-O-methyladenosine-3'-phosphate
  modified_base 20: mod_base = OTHER; note = 2'-O-methyluridine-3'-phosphate
  modified_base 21: mod_base = OTHER; note = 2'-O-methylguanosine-3'-phosphate attached to N-[tris(N-acetylgalactosamine-alkyl)-amidodecanoyl)]-4-hydr oxyprolinol Hyp-(N-acetylgalactosamine-alkyl)3
ctctgagtgggtgccagaatg

SEQ ID NO: 2695 - RNA, 23 nt, synthetic construct
  misc_feature 1..23: note = Description of Artificial Sequence: Synthetic oligonucleotide
  source 1..23: mol_type = other RNA
  modified_base 1: mod_base = OTHER; note = 2'-O-methylcytidine-3'- phosphorothioate
  modified_base 2: mod_base = OTHER; note = 2'-fluoroadenosine-3'-phosphorothioate
  modified_base 3: mod_base = OTHER; note = 2'-O-methyluridine-3'-phosphate
  modified_base 4: mod_base = OTHER; note = 2'-O-methyluridine-3'-phosphate
  modified_base 5: mod_base = OTHER; note = 2'-O-methylcytidine-3'-phosphate
  modified_base 6: mod_base = OTHER; note = 2'-fluorouridine-3'-phosphate
  modified_base 7: mod_base = OTHER; note = 2'-O-methylguanosine-3'-phosphate
  modified_base 8: mod_base = OTHER; note = 2'-fluoroguanosine-3'-phosphate
  modified_base 9: mod_base = OTHER; note = 2'-fluorocytidine-3'-phosphate
  modified_base 10: mod_base = OTHER; note = 2'-O-methyladenosine-3'-phosphate
  modified_base 11: mod_base = OTHER; note = 2'-O-methylcytidine-3'-phosphate
  modified_base 12: mod_base = OTHER; note = 2'-O-methylcytidine-3'-phosphate
  modified_base 13: mod_base = OTHER; note = 2'-O-methylcytidine-3'-phosphate
  modified_base 14: mod_base = OTHER; note = 2'-fluoroadenosine-3'-phosphate
  modified_base 15: mod_base = OTHER; note = 2'-O-methylcytidine-3'-phosphate
  modified_base 16: mod_base = OTHER; note = 2'-fluorouridine-3'-phosphate
  modified_base 17: mod_base = OTHER; note = 2'-O-methylcytidine-3'-phosphate
  modified_base 18: mod_base = OTHER; note = 2'-O-methyladenosine-3'-phosphate
  modified_base 19: mod_base = OTHER; note = 2'-O-methylguanosine-3'-phosphate
  modified_base 20: mod_base = OTHER; note = 2'-O-methyladenosine-3'-phosphate
  modified_base 21: mod_base = OTHER; note = 2'-O-methylguanosine-3'- phosphorothioate
  modified_base 22: mod_base = OTHER; note = 2'-O-methylcytidine-3'- phosphorothioate
  modified_base 23: mod_base = OTHER; note = 2'-O-methylcytidine-3'-phosphate
cattctggcacccactcagagcc

SEQ ID NO: 2696 - RNA, 21 nt, synthetic construct
  misc_feature 1..21: note = Description of Artificial Sequence: Synthetic oligonucleotide
  source 1..21: mol_type = other RNA
  modified_base 1: mod_base = OTHER; note = 2'-O-methylguanosine-3'- phosphorothioate
  modified_base 2: mod_base = OTHER; note = 2'-O-methylcytidine-3'- phosphorothioate
  modified_base 3: mod_base = OTHER; note = 2'-O-methyluridine-3'-phosphate
  modified_base 4: mod_base = OTHER; note = 2'-O-methylcytidine-3'-phosphate
  modified_base 5: mod_base = OTHER; note = 2'-O-methyluridine-3'-phosphate
  modified_base 6: mod_base = OTHER; note = 2'-O-methylguanosine-3'-phosphate
  modified_base 7: mod_base = OTHER; note = 2'-fluoroadenosine-3'-phosphate
  modified_base 8: mod_base = OTHER; note = 2'-O-methylguanosine-3'-phosphate
  modified_base 9: mod_base = OTHER; note = 2'-fluorouridine-3'-phosphate
  modified_base 10: mod_base = OTHER; note = 2'-fluoroguanosine-3'-phosphate
  modified_base 11: mod_base = OTHER; note = 2'-fluoroguanosine-3'-phosphate
  modified_base 12: mod_base = OTHER; note = 2'-O-methylguanosine-3'-phosphate
  modified_base 13: mod_base = OTHER; note = 2'-O-methyluridine-3'-phosphate
  modified_base 14: mod_base = OTHER; note = 2'-O-methylguanosine-3'-phosphate
  modified_base 15: mod_base = OTHER; note = 2'-O-methylcytidine-3'-phosphate
  modified_base 16: mod_base = OTHER; note = 2'-O-methylcytidine-3'-phosphate
  modified_base 17: mod_base = OTHER; note = 2'-O-methyladenosine-3'-phosphate
  modified_base 18: mod_base = OTHER; note = 2'-O-methylguanosine-3'-phosphate
  modified_base 19: mod_base = OTHER; note = 2'-O-methyladenosine-3'-phosphate
  modified_base 20: mod_base = OTHER; note = 2'-O-methyladenosine-3'-phosphate
  modified_base 21: mod_base = OTHER; note = 2'-O-methyluridine-3'-phosphate attached to N-[tris(N-acetylgalactosamine-alkyl)-amidodecanoyl)]-4-hydr oxyprolinol Hyp-(N-acetylgalactosamine-alkyl)3
gctctgagtgggtgccagaat

SEQ ID NO: 2697 - RNA, 23 nt, synthetic construct
  misc_feature 1..23: note = Description of Artificial Sequence: Synthetic oligonucleotide
  source 1..23: mol_type = other RNA
  modified_base 1: mod_base = OTHER; note = 2'-O-methyladenosine-3'- phosphorothioate
  modified_base 2: mod_base = OTHER; note = 2'-fluorouridine -3'-phosphorothioate
  modified_base 3: mod_base = OTHER; note = 2'-O-methyluridine-3'-phosphate
  modified_base 4: mod_base = OTHER; note = 2'-O-methylcytidine-3'-phosphate
  modified_base 5: mod_base = OTHER; note = 2'-O-methyluridine-3'-phosphate
  modified_base 6: mod_base = OTHER; note = 2'-fluoroguanosine-3'-phosphate
  modified_base 7: mod_base = OTHER; note = 2'-O-methylguanosine-3'-phosphate
  modified_base 8: mod_base = OTHER; note = 2'-fluorocytidine-3'-phosphate
  modified_base 9: mod_base = OTHER; note = 2'-fluoroadenosine-3'-phosphate
  modified_base 10: mod_base = OTHER; note = 2'-O-methylcytidine-3'-phosphate
  modified_base 11: mod_base = OTHER; note = 2'-O-methylcytidine-3'-phosphate
  modified_base 12: mod_base = OTHER; note = 2'-O-methylcytidine-3'-phosphate
  modified_base 13: mod_base = OTHER; note = 2'-O-methyladenosine-3'-phosphate
  modified_base 14: mod_base = OTHER; note = 2'-fluorocytidine-3'-phosphate
  modified_base 15: mod_base = OTHER; note = 2'-O-methyluridine-3'-phosphate
  modified_base 16: mod_base = OTHER; note = 2'-fluorocytidine-3'-phosphate
  modified_base 17: mod_base = OTHER; note = 2'-O-methyladenosine-3'-phosphate
  modified_base 18: mod_base = OTHER; note = 2'-O-methylguanosine-3'-phosphate
  modified_base 19: mod_base = OTHER; note = 2'-O-methyladenosine-3'-phosphate
  modified_base 20: mod_base = OTHER; note = 2'-O-methylguanosine-3'-phosphate
  modified_base 21: mod_base = OTHER; note = 2'-O-methylcytidine-3'- phosphorothioate
  modified_base 22: mod_base = OTHER; note = 2'-O-methylcytidine-3'- phosphorothioate
  modified_base 23: mod_base = OTHER; note = 2'-O-methyladenosine-3'-phosphate
attctggcacccactcagagcca

SEQ ID NO: 2698 - RNA, 21 nt, synthetic construct
  misc_feature 1..21: note = Description of Artificial Sequence: Synthetic oligonucleotide
  source 1..21: mol_type = other RNA
  modified_base 1: mod_base = OTHER; note = 2'-O-methylguanosine-3'- phosphorothioate
  modified_base 2: mod_base = OTHER; note = 2'-O-methylcytidine-3'- phosphorothioate
  modified_base 3: mod_base = OTHER; note = 2'-O-methyladenosine-3'-phosphate
  modified_base 4: mod_base = OTHER; note = 2'-O-methylcytidine-3'-phosphate
  modified_base 5: mod_base = OTHER; note = 2'-O-methyluridine-3'-phosphate
  modified_base 6: mod_base = OTHER; note = 2'-O-methylguanosine-3'-phosphate
  modified_base 7: mod_base = OTHER; note = 2'-fluoroadenosine-3'-phosphate
  modified_base 8: mod_base = OTHER; note = 2'-O-methyluridine-3'-phosphate
  modified_base 9: mod_base = OTHER; note = 2'-fluoroguanosine-3'-phosphate
  modified_base 10: mod_base = OTHER; note = 2'-fluorouridine-3'-phosphate
  modified_base 11: mod_base = OTHER; note = 2'-fluorouridine-3'-phosphate
  modified_base 12: mod_base = OTHER; note = 2'-O-methylcytidine-3'-phosphate
  modified_base 13: mod_base = OTHER; note = 2'-O-methyluridine-3'-phosphate
  modified_base 14: mod_base = OTHER; note = 2'-O-methylguanosine-3'-phosphate
  modified_base 15: mod_base = OTHER; note = 2'-O-methyladenosine-3'-phosphate
  modified_base 16: mod_base = OTHER; note = 2'-O-methyladenosine-3'-phosphate
  modified_base 17: mod_base = OTHER; note = 2'-O-methyladenosine-3'-phosphate
  modified_base 18: mod_base = OTHER; note = 2'-O-methylguanosine-3'-phosphate
  modified_base 19: mod_base = OTHER; note = 2'-O-methylcytidine-3'-phosphate
  modified_base 20: mod_base = OTHER; note = 2'-O-methyluridine-3'-phosphate
  modified_base 21: mod_base = OTHER; note = 2'-O-methylcytidine-3'-phosphate attached to N-[tris(N-acetylgalactosamine-alkyl)-amidodecanoyl)]-4-hydr oxyprolinol Hyp-(N-acetylgalactosamine-alkyl)3
gcactgatgttctgaaagctc

SEQ ID NO: 2699 - RNA, 23 nt, synthetic construct
  misc_feature 1..23: note = Description of Artificial Sequence: Synthetic oligonucleotide
  source 1..23: mol_type = other RNA
  modified_base 1: mod_base = OTHER; note = 2'-O-methylguanosine-3'- phosphorothioate
  modified_base 2: mod_base = OTHER; note = 2'-fluoroadenosine-3'-phosphorothioate
  modified_base 3: mod_base = OTHER; note = 2'-O-methylguanosine-3'-phosphate
  modified_base 4: mod_base = OTHER; note = 2'-O-methylcytidine-3'-phosphate
  modified_base 5: mod_base = OTHER; note = 2'-O-methyluridine-3'-phosphate
  modified_base 6: mod_base = OTHER; note = 2'-fluorouridine-3'-phosphate
  modified_base 7: mod_base = OTHER; note = 2'-O-methyluridine-3'-phosphate
  modified_base 8: mod_base = OTHER; note = 2'-fluorocytidine-3'-phosphate
  modified_base 9: mod_base = OTHER; note = 2'-fluoroadenosine-3'-phosphate
  modified_base 10: mod_base = OTHER; note = 2'-O-methylguanosine-3'-phosphate
  modified_base 11: mod_base = OTHER; note = 2'-O-methyladenosine-3'-phosphate
  modified_base 12: mod_base = OTHER; note = 2'-O-methyladenosine-3'-phosphate
  modified_base 13: mod_base = OTHER; note = 2'-O-methylcytidine-3'-phosphate
  modified_base 14: mod_base = OTHER; note = 2'-fluoroadenosine-3'-phosphate
  modified_base 15: mod_base = OTHER; note = 2'-O-methyluridine-3'-phosphate
  modified_base 16: mod_base = OTHER; note = 2'-fluorocytidine-3'-phosphate
  modified_base 17: mod_base = OTHER; note = 2'-O-methyladenosine-3'-phosphate
  modified_base 18: mod_base = OTHER; note = 2'-O-methylguanosine-3'-phosphate
  modified_base 19: mod_base = OTHER; note = 2'-O-methyluridine-3'-phosphate
  modified_base 20: mod_base = OTHER; note = 2'-O-methylguanosine-3'-phosphate
  modified_base 21: mod_base = OTHER; note = 2'-O-methylcytidine-3'- phosphorothioate
  modified_base 22: mod_base = OTHER; note = 2'-O-methylcytidine-3'- phosphorothioate
  modified_base 23: mod_base = OTHER; note = 2'-O-methyluridine-3'-phosphate
gagctttcagaacatcagtgcct

SEQ ID NO: 2700 - RNA, 21 nt, synthetic construct
  misc_feature 1..21: note = Description of Artificial Sequence: Synthetic oligonucleotide
  source 1..21: mol_type = other RNA
  modified_base 1: mod_base = OTHER; note = 2'-O-methylcytidine-3'- phosphorothioate
  modified_base 2: mod_base = OTHER; note = 2'-O-methyladenosine-3'- phosphorothioate
  modified_base 3: mod_base = OTHER; note = 2'-O-methylcytidine-3'-phosphate
  modified_base 4: mod_base = OTHER; note = 2'-O-methyluridine-3'-phosphate
  modified_base 5: mod_base = OTHER; note = 2'-O-methylguanosine-3'-phosphate
  modified_base 6: mod_base = OTHER; note = 2'-O-methyladenosine-3'-phosphate
  modified_base 7: mod_base = OTHER; note = 2'-fluorouridine-3'-phosphate
  modified_base 8: mod_base = OTHER; note = 2'-O-methylguanosine-3'-phosphate
  modified_base 9: mod_base = OTHER; note = 2'-fluorouridine-3'-phosphate
  modified_base 10: mod_base = OTHER; note = 2'-fluorouridine-3'-phosphate
  modified_base 11: mod_base = OTHER; note = 2'-fluorocytidine-3'-phosphate
  modified_base 12: mod_base = OTHER; note = 2'-O-methyluridine-3'-phosphate
  modified_base 13: mod_base = OTHER; note = 2'-O-methylguanosine-3'-phosphate
  modified_base 14: mod_base = OTHER; note = 2'-O-methyladenosine-3'-phosphate
  modified_base 15: mod_base = OTHER; note = 2'-O-methyladenosine-3'-phosphate
  modified_base 16: mod_base = OTHER; note = 2'-O-methyladenosine-3'-phosphate
  modified_base 17: mod_base = OTHER; note = 2'-O-methylguanosine-3'-phosphate
  modified_base 18: mod_base = OTHER; note = 2'-O-methylcytidine-3'-phosphate
  modified_base 19: mod_base = OTHER; note = 2'-O-methyluridine-3'-phosphate
  modified_base 20: mod_base = OTHER; note = 2'-O-methylcytidine-3'-phosphate
  modified_base 21: mod_base = OTHER; note = 2'-O-methyluridine-3'-phosphate attached to N-[tris(N-acetylgalactosamine-alkyl)-amidodecanoyl)]-4-hydr oxyprolinol Hyp-(N-acetylgalactosamine-alkyl)3
cactgatgttctgaaagctct

SEQ ID NO: 2701 - RNA, 23 nt, synthetic construct
  misc_feature 1..23: note = Description of Artificial Sequence: Synthetic oligonucleotide
  source 1..23: mol_type = other RNA
  modified_base 1: mod_base = OTHER; note = 2'-O-methyladenosine-3'- phosphorothioate
  modified_base 2: mod_base = OTHER; note = 2'-fluoroguanosine-3'-phosphorothioate
  modified_base 3: mod_base = OTHER; note = 2'-O-methyladenosine-3'-phosphate
  modified_base 4: mod_base = OTHER; note = 2'-O-methylguanosine-3'-phosphate
  modified_base 5: mod_base = OTHER; note = 2'-O-methylcytidine-3'-phosphate
  modified_base 6: mod_base = OTHER; note = 2'-fluorouridine-3'-phosphate
  modified_base 7: mod_base = OTHER; note = 2'-O-methyluridine-3'-phosphate
  modified_base 8: mod_base = OTHER; note = 2'-fluorouridine-3'-phosphate
  modified_base 9: mod_base = OTHER; note = 2'-fluorocytidine-3'-phosphate
  modified_base 10: mod_base = OTHER; note = 2'-O-methyladenosine-3'-phosphate
  modified_base 11: mod_base = OTHER; note = 2'-O-methylguanosine-3'-phosphate
  modified_base 12: mod_base = OTHER; note = 2'-O-methyladenosine-3'-phosphate
  modified_base 13: mod_base = OTHER; note = 2'-O-methyladenosine-3'-phosphate
  modified_base 14: mod_base = OTHER; note = 2'-fluorocytidine-3'-phosphate
  modified_base 15: mod_base = OTHER; note = 2'-O-methyladenosine-3'-phosphate
  modified_base 16: mod_base = OTHER; note = 2'-fluorouridine-3'-phosphate
  modified_base 17: mod_base = OTHER; note = 2'-O-methylcytidine-3'-phosphate
  modified_base 18: mod_base = OTHER; note = 2'-O-methyladenosine-3'-phosphate
  modified_base 19: mod_base = OTHER; note = 2'-O-methylguanosine-3'-phosphate
  modified_base 20: mod_base = OTHER; note = 2'-O-methyluridine-3'-phosphate
  modified_base 21: mod_base = OTHER; note = 2'-O-methylguanosine-3'- phosphorothioate
  modified_base 22: mod_base = OTHER; note = 2'-O-methylcytidine-3'- phosphorothioate
  modified_base 23: mod_base = OTHER; note = 2'-O-methylcytidine-3'-phosphate
agagctttcagaacatcagtgcc

SEQ ID NO: 2702 - RNA, 21 nt, synthetic construct
  misc_feature 1..21: note = Description of Artificial Sequence: Synthetic oligonucleotide
  source 1..21: mol_type = other RNA
  modified_base 1: mod_base = OTHER; note = 2'-O-methyladenosine-3'- phosphorothioate
  modified_base 2: mod_base = OTHER; note = 2'-O-methyladenosine-3'- phosphorothioate
  modified_base 3: mod_base = OTHER; note = 2'-O-methyladenosine-3'-phosphate
  modified_base 4: mod_base = OTHER; note = 2'-O-methylguanosine-3'-phosphate
  modified_base 5: mod_base = OTHER; note = 2'-O-methylguanosine-3'-phosphate
  modified_base 6: mod_base = OTHER; note = 2'-O-methylcytidine-3'-phosphate
  modified_base 7: mod_base = OTHER; note = 2'-fluoroadenosine-3'-phosphate
  modified_base 8: mod_base = OTHER; note = 2'-O-methylcytidine-3'-phosphate
  modified_base 9: mod_base = OTHER; note = 2'-fluorouridine-3'-phosphate
  modified_base 10: mod_base = OTHER; note = 2'-fluoroguanosine-3'-phosphate
  modified_base 11: mod_base = OTHER; note = 2'-fluoroadenosine-3'-phosphate
  modified_base 12: mod_base = OTHER; note = 2'-O-methyluridine-3'-phosphate
  modified_base 13: mod_base = OTHER; note = 2'-O-methylguanosine-3'-phosphate
  modified_base 14: mod_base = OTHER; note = 2'-O-methyluridine-3'-phosphate
  modified_base 15: mod_base = OTHER; note = 2'-O-methyluridine-3'-phosphate
  modified_base 16: mod_base = OTHER; note = 2'-O-methylcytidine-3'-phosphate
  modified_base 17: mod_base = OTHER; note = 2'-O-methyluridine-3'-phosphate
  modified_base 18: mod_base = OTHER; note = 2'-O-methylguanosine-3'-phosphate
  modified_base 19: mod_base = OTHER; note = 2'-O-methyladenosine-3'-phosphate
  modified_base 20: mod_base = OTHER; note = 2'-O-methyladenosine-3'-phosphate
  modified_base 21: mod_base = OTHER; note = 2'-O-methyladenosine-3'-phosphate attached to N-[tris(N-acetylgalactosamine-alkyl)-amidodecanoyl)]-4-hydr oxyprolinol Hyp-(N-acetylgalactosamine-alkyl)3
aaaggcactgatgttctgaaa

SEQ ID NO: 2703 - RNA, 23 nt, synthetic construct
  misc_feature 1..23: note = Description of Artificial Sequence: Synthetic oligonucleotide
  source 1..23: mol_type = other RNA
  modified_base 1: mod_base = OTHER; note = 2'-O-methyluridine-3'-phosphorothioate
  modified_base 2: mod_base = OTHER; note = 2'-fluorouridine -3'-phosphorothioate
  modified_base 3: mod_base = OTHER; note = 2'-O-methyluridine-3'-phosphate
  modified_base 4: mod_base = OTHER; note = 2'-O-methylcytidine-3'-phosphate
  modified_base 5: mod_base = OTHER; note = 2'-O-methyladenosine-3'-phosphate
  modified_base 6: mod_base = OTHER; note = 2'-fluoroguanosine-3'-phosphate
  modified_base 7: mod_base = OTHER; note = 2'-O-methyladenosine-3'-phosphate
  modified_base 8: mod_base = OTHER; note = 2'-fluoroadenosine-3'-phosphate
  modified_base 9: mod_base = OTHER; note = 2'-fluorocytidine-3'-phosphate
  modified_base 10: mod_base = OTHER; note = 2'-O-methyladenosine-3'-phosphate
  modified_base 11: mod_base = OTHER; note = 2'-O-methyluridine-3'-phosphate
  modified_base 12: mod_base = OTHER; note = 2'-O-methylcytidine-3'-phosphate
  modified_base 13: mod_base = OTHER; note = 2'-O-methyladenosine-3'-phosphate
  modified_base 14: mod_base = OTHER; note = 2'-fluoroguanosine-3'-phosphate
  modified_base 15: mod_base = OTHER; note = 2'-O-methyluridine-3'-phosphate
  modified_base 16: mod_base = OTHER; note = 2'-fluoroguanosine-3'-phosphate
  modified_base 17: mod_base = OTHER; note = 2'-O-methylcytidine-3'-phosphate
  modified_base 18: mod_base = OTHER; note = 2'-O-methylcytidine-3'-phosphate
  modified_base 19: mod_base = OTHER; note = 2'-O-methyluridine-3'-phosphate
  modified_base 20: mod_base = OTHER; note = 2'-O-methyluridine-3'-phosphate
  modified_base 21: mod_base = OTHER; note = 2'-O-methyluridine-3'-phosphorothioate
  modified_base 22: mod_base = OTHER; note = 2'-O-methylcytidine-3'- phosphorothioate
  modified_base 23: mod_base = OTHER; note = 2'-O-methylcytidine-3'-phosphate
tttcagaacatcagtgcctttcc

SEQ ID NO: 2704 - RNA, 21 nt, synthetic construct
  misc_feature 1..21: note = Description of Artificial Sequence: Synthetic oligonucleotide
  source 1..21: mol_type = other RNA
  modified_base 1: mod_base = OTHER; note = 2'-O-methylguanosine-3'- phosphorothioate
  modified_base 2: mod_base = OTHER; note = 2'-O-methyladenosine-3'- phosphorothioate
  modified_base 3: mod_base = OTHER; note = 2'-O-methyladenosine-3'-phosphate
  modified_base 4: mod_base = OTHER; note = 2'-O-methyladenosine-3'-phosphate
  modified_base 5: mod_base = OTHER; note = 2'-O-methylguanosine-3'-phosphate
  modified_base 6: mod_base = OTHER; note = 2'-O-methylguanosine-3'-phosphate
  modified_base 7: mod_base = OTHER; note = 2'-fluorocytidine-3'-phosphate
  modified_base 8: mod_base = OTHER; note = 2'-O-methyladenosine-3'-phosphate
  modified_base 9: mod_base = OTHER; note = 2'-fluorocytidine-3'-phosphate
  modified_base 10: mod_base = OTHER; note = 2'-fluorouridine-3'-phosphate
  modified_base 11: mod_base = OTHER; note = 2'-fluoroguanosine-3'-phosphate
  modified_base 12: mod_base = OTHER; note = 2'-O-methyladenosine-3'-phosphate
  modified_base 13: mod_base = OTHER; note = 2'-O-methyluridine-3'-phosphate
  modified_base 14: mod_base = OTHER; note = 2'-O-methylguanosine-3'-phosphate
  modified_base 15: mod_base = OTHER; note = 2'-O-methyluridine-3'-phosphate
  modified_base 16: mod_base = OTHER; note = 2'-O-methyluridine-3'-phosphate
  modified_base 17: mod_base = OTHER; note = 2'-O-methylcytidine-3'-phosphate
  modified_base 18: mod_base = OTHER; note = 2'-O-methyluridine-3'-phosphate
  modified_base 19: mod_base = OTHER; note = 2'-O-methylguanosine-3'-phosphate
  modified_base 20: mod_base = OTHER; note = 2'-O-methyladenosine-3'-phosphate
  modified_base 21: mod_base = OTHER; note = 2'-O-methyladenosine-3'-phosphate attached to N-[tris(N-acetylgalactosamine-alkyl)-amidodecanoyl)]-4-hydr oxyprolinol Hyp-(N-acetylgalactosamine-alkyl)3
gaaaggcactgatgttctgaa

SEQ ID NO: 2705 - RNA, 23 nt, synthetic construct
  misc_feature 1..23: note = Description of Artificial Sequence: Synthetic oligonucleotide
  source 1..23: mol_type = other RNA
  modified_base 1: mod_base = OTHER; note = 2'-O-methyluridine-3'-phosphorothioate
  modified_base 2: mod_base = OTHER; note = 2'-fluorouridine -3'-phosphorothioate
  modified_base 3: mod_base = OTHER; note = 2'-O-methylcytidine-3'-phosphate
  modified_base 4: mod_base = OTHER; note = 2'-O-methyladenosine-3'-phosphate
  modified_base 5: mod_base = OTHER; note = 2'-O-methylguanosine-3'-phosphate
  modified_base 6: mod_base = OTHER; note = 2'-fluoroadenosine-3'-phosphate
  modified_base 7: mod_base = OTHER; note = 2'-O-methyladenosine-3'-phosphate
  modified_base 8: mod_base = OTHER; note = 2'-fluorocytidine-3'-phosphate
  modified_base 9: mod_base = OTHER; note = 2'-fluoroadenosine-3'-phosphate
  modified_base 10: mod_base = OTHER; note = 2'-O-methyluridine-3'-phosphate
  modified_base 11: mod_base = OTHER; note = 2'-O-methylcytidine-3'-phosphate
  modified_base 12: mod_base = OTHER; note = 2'-O-methyladenosine-3'-phosphate
  modified_base 13: mod_base = OTHER; note = 2'-O-methylguanosine-3'-phosphate
  modified_base 14: mod_base = OTHER; note = 2'-fluorouridine-3'-phosphate
  modified_base 15: mod_base = OTHER; note = 2'-O-methylguanosine-3'-phosphate
  modified_base 16: mod_base = OTHER; note = 2'-fluorocytidine-3'-phosphate
  modified_base 17: mod_base = OTHER; note = 2'-O-methylcytidine-3'-phosphate
  modified_base 18: mod_base = OTHER; note = 2'-O-methyluridine-3'-phosphate
  modified_base 19: mod_base = OTHER; note = 2'-O-methyluridine-3'-phosphate
  modified_base 20: mod_base = OTHER; note = 2'-O-methyluridine-3'-phosphate
  modified_base 21: mod_base = OTHER; note = 2'-O-methylcytidine-3'- phosphorothioate
  modified_base 22: mod_base = OTHER; note = 2'-O-methylcytidine-3'- phosphorothioate
  modified_base 23: mod_base = OTHER; note = 2'-O-methylguanosine-3'-phosphate
ttcagaacatcagtgcctttccg

SEQ ID NO: 2706 - RNA, 21 nt, synthetic construct
  misc_feature 1..21: note = Description of Artificial Sequence: Synthetic oligonucleotide
  source 1..21: mol_type = other RNA
  modified_base 1: mod_base = OTHER; note = 2'-O-methylguanosine-3'- phosphorothioate
  modified_base 2: mod_base = OTHER; note = 2'-O-methylguanosine-3'- phosphorothioate
  modified_base 3: mod_base = OTHER; note = 2'-O-methylguanosine-3'-phosphate
  modified_base 4: mod_base = OTHER; note = 2'-O-methyladenosine-3'-phosphate
  modified_base 5: mod_base = OTHER; note = 2'-O-methyladenosine-3'-phosphate
  modified_base 6: mod_base = OTHER; note = 2'-O-methylguanosine-3'-phosphate
  modified_base 7: mod_base = OTHER; note = 2'-fluoroguanosine-3'-phosphate
  modified_base 8: mod_base = OTHER; note = 2'-O-methyluridine-3'-phosphate
  modified_base 9: mod_base = OTHER; note = 2'-fluoroguanosine-3'-phosphate
  modified_base 10: mod_base = OTHER; note = 2'-fluoroguanosine-3'-phosphate
  modified_base 11: mod_base = OTHER; note = 2'-fluoroadenosine-3'-phosphate
  modified_base 12: mod_base = OTHER; note = 2'-O-methyladenosine-3'-phosphate
  modified_base 13: mod_base = OTHER; note = 2'-O-methylguanosine-3'-phosphate
  modified_base 14: mod_base = OTHER; note = 2'-O-methyluridine-3'-phosphate
  modified_base 15: mod_base = OTHER; note = 2'-O-methylcytidine-3'-phosphate
  modified_base 16: mod_base = OTHER; note = 2'-O-methyluridine-3'-phosphate
  modified_base 17: mod_base = OTHER; note = 2'-O-methyluridine-3'-phosphate
  modified_base 18: mod_base = OTHER; note = 2'-O-methylcytidine-3'-phosphate
  modified_base 19: mod_base = OTHER; note = 2'-O-methylcytidine-3'-phosphate
  modified_base 20: mod_base = OTHER; note = 2'-O-methyluridine-3'-phosphate
  modified_base 21: mod_base = OTHER; note = 2'-O-methylguanosine-3'-phosphate attached to N-[tris(N-acetylgalactosamine-alkyl)-amidodecanoyl)]-4-hydr oxyprolinol Hyp-(N-acetylgalactosamine-alkyl)3
gggaaggtggaagtcttcctg

SEQ ID NO: 2707 - RNA, 23 nt, synthetic construct
  misc_feature 1..23: note = Description of Artificial Sequence: Synthetic oligonucleotide
  source 1..23: mol_type = other RNA
  modified_base 1: mod_base = OTHER; note = 2'-O-methylcytidine-3'- phosphorothioate
  modified_base 2: mod_base = OTHER; note = 2'-fluoroadenosine-3'-phosphorothioate
  modified_base 3: mod_base = OTHER; note = 2'-O-methylguanosine-3'-phosphate
  modified_base 4: mod_base = OTHER; note = 2'-O-methylguanosine-3'-phosphate
  modified_base 5: mod_base = OTHER; note = 2'-O-methyladenosine-3'-phosphate
  modified_base 6: mod_base = OTHER; note = 2'-fluoroadenosine-3'-phosphate
  modified_base 7: mod_base = OTHER; note = 2'-O-methylguanosine-3'-phosphate
  modified_base 8: mod_base = OTHER; note = 2'-fluoroadenosine-3'-phosphate
  modified_base 9: mod_base = OTHER; note = 2'-fluorocytidine-3'-phosphate
  modified_base 10: mod_base = OTHER; note = 2'-O-methyluridine-3'-phosphate
  modified_base 11: mod_base = OTHER; note = 2'-O-methyluridine-3'-phosphate
  modified_base 12: mod_base = OTHER; note = 2'-O-methylcytidine-3'-phosphate
  modified_base 13: mod_base = OTHER; note = 2'-O-methylcytidine-3'-phosphate
  modified_base 14: mod_base = OTHER; note = 2'-fluoroadenosine-3'-phosphate
  modified_base 15: mod_base = OTHER; note = 2'-O-methylcytidine-3'-phosphate
  modified_base 16: mod_base = OTHER; note = 2'-fluorocytidine-3'-phosphate
  modified_base 17: mod_base = OTHER; note = 2'-O-methyluridine-3'-phosphate
  modified_base 18: mod_base = OTHER; note = 2'-O-methyluridine-3'-phosphate
  modified_base 19: mod_base = OTHER; note = 2'-O-methylcytidine-3'-phosphate
  modified_base 20: mod_base = OTHER; note = 2'-O-methylcytidine-3'-phosphate
  modified_base 21: mod_base = OTHER; note = 2'-O-methylcytidine-3'- phosphorothioate
  modified_base 22: mod_base = OTHER; note = 2'-O-methyluridine-3'-phosphorothioate
  modified_base 23: mod_base = OTHER; note = 2'-O-methyluridine-3'-phosphate
caggaagacttccaccttccctt

SEQ ID NO: 2708 - RNA, 21 nt, synthetic construct
  misc_feature 1..21: note = Description of Artificial Sequence: Synthetic oligonucleotide
  source 1..21: mol_type = other RNA
  modified_base 1: mod_base = OTHER; note = 2'-O-methylguanosine-3'- phosphorothioate
  modified_base 2: mod_base = OTHER; note = 2'-O-methylguanosine-3'- phosphorothioate
  modified_base 3: mod_base = OTHER; note = 2'-O-methyladenosine-3'-phosphate
  modified_base 4: mod_base = OTHER; note = 2'-O-methyladenosine-3'-phosphate
  modified_base 5: mod_base = OTHER; note = 2'-O-methylguanosine-3'-phosphate
  modified_base 6: mod_base = OTHER; note = 2'-O-methylguanosine-3'-phosphate
  modified_base 7: mod_base = OTHER; note = 2'-fluorouridine-3'-phosphate
  modified_base 8: mod_base = OTHER; note = 2'-O-methylguanosine-3'-phosphate
  modified_base 9: mod_base = OTHER; note = 2'-fluoroguanosine-3'-phosphate
  modified_base 10: mod_base = OTHER; note = 2'-fluoroadenosine-3'-phosphate
  modified_base 11: mod_base = OTHER; note = 2'-fluoroadenosine-3'-phosphate
  modified_base 12: mod_base = OTHER; note = 2'-O-methylguanosine-3'-phosphate
  modified_base 13: mod_base = OTHER; note = 2'-O-methyluridine-3'-phosphate
  modified_base 14: mod_base = OTHER; note = 2'-O-methylcytidine-3'-phosphate
  modified_base 15: mod_base = OTHER; note = 2'-O-methyluridine-3'-phosphate
  modified_base 16: mod_base = OTHER; note = 2'-O-methyluridine-3'-phosphate
  modified_base 17: mod_base = OTHER; note = 2'-O-methylcytidine-3'-phosphate
  modified_base 18: mod_base = OTHER; note = 2'-O-methylcytidine-3'-phosphate
  modified_base 19: mod_base = OTHER; note = 2'-O-methyluridine-3'-phosphate
  modified_base 20: mod_base = OTHER; note = 2'-O-methylguanosine-3'-phosphate
  modified_base 21: mod_base = OTHER; note = 2'-O-methylguanosine-3'-phosphate attached to N-[tris(N-acetylgalactosamine-alkyl)-amidodecanoyl)]-4-hydr oxyprolinol Hyp-(N-acetylgalactosamine-alkyl)3
ggaaggtggaagtcttcctgg

SEQ ID NO: 2709 - RNA, 23 nt, synthetic construct
  misc_feature 1..23: note = Description of Artificial Sequence: Synthetic oligonucleotide
  source 1..23: mol_type = other RNA
  modified_base 1: mod_base = OTHER; note = 2'-O-methylcytidine-3'- phosphorothioate
  modified_base 2: mod_base = OTHER; note = 2'-fluorocytidine-3'-phosphorothioate
  modified_base 3: mod_base = OTHER; note = 2'-O-methyladenosine-3'-phosphate
  modified_base 4: mod_base = OTHER; note = 2'-O-methylguanosine-3'-phosphate
  modified_base 5: mod_base = OTHER; note = 2'-O-methylguanosine-3'-phosphate
  modified_base 6: mod_base = OTHER; note = 2'-fluoroadenosine-3'-phosphate
  modified_base 7: mod_base = OTHER; note = 2'-O-methyladenosine-3'-phosphate
  modified_base 8: mod_base = OTHER; note = 2'-fluoroguanosine-3'-phosphate
  modified_base 9: mod_base = OTHER; note = 2'-fluoroadenosine-3'-phosphate
  modified_base 10: mod_base = OTHER; note = 2'-O-methylcytidine-3'-phosphate
  modified_base 11: mod_base = OTHER; note = 2'-O-methyluridine-3'-phosphate
  modified_base 12: mod_base = OTHER; note = 2'-O-methyluridine-3'-phosphate
  modified_base 13: mod_base = OTHER; note = 2'-O-methylcytidine-3'-phosphate
  modified_base 14: mod_base = OTHER; note = 2'-fluorocytidine-3'-phosphate
  modified_base 15: mod_base = OTHER; note = 2'-O-methyladenosine-3'-phosphate
  modified_base 16: mod_base = OTHER; note = 2'-fluorocytidine-3'-phosphate
  modified_base 17: mod_base = OTHER; note = 2'-O-methylcytidine-3'-phosphate
  modified_base 18: mod_base = OTHER; note = 2'-O-methyluridine-3'-phosphate
  modified_base 19: mod_base = OTHER; note = 2'-O-methyluridine-3'-phosphate
  modified_base 20: mod_base = OTHER; note = 2'-O-methylcytidine-3'-phosphate
  modified_base 21: mod_base = OTHER; note = 2'-O-methylcytidine-3'- phosphorothioate
  modified_base 22: mod_base = OTHER; note = 2'-O-methylcytidine-3'- phosphorothioate
  modified_base 23: mod_base = OTHER; note = 2'-O-methyluridine-3'-phosphate
ccaggaagacttccaccttccct

SEQ ID NO: 2710 - RNA, 21 nt, synthetic construct
  misc_feature 1..21: note = Description of Artificial Sequence: Synthetic oligonucleotide
  source 1..21: mol_type = other RNA
  modified_base 1: mod_base = OTHER; note = 2'-O-methylguanosine-3'- phosphorothioate
  modified_base 2: mod_base = OTHER; note = 2'-O-methylguanosine-3'- phosphorothioate
  modified_base 3: mod_base = OTHER; note = 2'-O-methyladenosine-3'-phosphate
  modified_base 4: mod_base = OTHER; note = 2'-O-methyladenosine-3'-phosphate
  modified_base 5: mod_base = OTHER; note = 2'-O-methylguanosine-3'-phosphate
  modified_base 6: mod_base = OTHER; note = 2'-O-methylguanosine-3'-phosphate
  modified_base 7: mod_base = OTHER; note = 2'-fluoroguanosine-3'-phosphate
  modified_base 8: mod_base = OTHER; note = 2'-O-methyladenosine-3'-phosphate
  modified_base 9: mod_base = OTHER; note = 2'-fluoroadenosine-3'-phosphate
  modified_base 10: mod_base = OTHER; note = 2'-fluoroguanosine-3'-phosphate
  modified_base 11: mod_base = OTHER; note = 2'-fluoroguanosine-3'-phosphate
  modified_base 12: mod_base = OTHER; note = 2'-O-methyluridine-3'-phosphate
  modified_base 13: mod_base = OTHER; note = 2'-O-methylguanosine-3'-phosphate
  modified_base 14: mod_base = OTHER; note = 2'-O-methylguanosine-3'-phosphate
  modified_base 15: mod_base = OTHER; note = 2'-O-methyladenosine-3'-phosphate
  modified_base 16: mod_base = OTHER; note = 2'-O-methyladenosine-3'-phosphate
  modified_base 17: mod_base = OTHER; note = 2'-O-methylguanosine-3'-phosphate
  modified_base 18: mod_base = OTHER; note = 2'-O-methyluridine-3'-phosphate
  modified_base 19: mod_base = OTHER; note = 2'-O-methylcytidine-3'-phosphate
  modified_base 20: mod_base = OTHER; note = 2'-O-methyluridine-3'-phosphate
  modified_base 21: mod_base = OTHER; note = 2'-O-methyluridine-3'-phosphate attached to N-[tris(N-acetylgalactosamine-alkyl)-amidodecanoyl)]-4-hydr oxyprolinol Hyp-(N-acetylgalactosamine-alkyl)3
ggaagggaaggtggaagtctt

SEQ ID NO: 2711 - RNA, 23 nt, synthetic construct
  misc_feature 1..23: note = Description of Artificial Sequence: Synthetic oligonucleotide
  source 1..23: mol_type = other RNA
  modified_base 1: mod_base = OTHER; note = 2'-O-methyladenosine-3'- phosphorothioate
  modified_base 2: mod_base = OTHER; note = 2'-fluoroadenosine-3'-phosphorothioate
  modified_base 3: mod_base = OTHER; note = 2'-O-methylguanosine-3'-phosphate
  modified_base 4: mod_base = OTHER; note = 2'-O-methyladenosine-3'-phosphate
  modified_base 5: mod_base = OTHER; note = 2'-O-methylcytidine-3'-phosphate
  modified_base 6: mod_base = OTHER; note = 2'-fluorouridine-3'-phosphate
  modified_base 7: mod_base = OTHER; note = 2'-O-methyluridine-3'-phosphate
  modified_base 8: mod_base = OTHER; note = 2'-fluorocytidine-3'-phosphate
  modified_base 9: mod_base = OTHER; note = 2'-fluorocytidine-3'-phosphate
  modified_base 10: mod_base = OTHER; note = 2'-O-methyladenosine-3'-phosphate
  modified_base 11: mod_base = OTHER; note = 2'-O-methylcytidine-3'-phosphate
  modified_base 12: mod_base = OTHER; note = 2'-O-methylcytidine-3'-phosphate
  modified_base 13: mod_base = OTHER; note = 2'-O-methyluridine-3'-phosphate
  modified_base 14: mod_base = OTHER; note = 2'-fluorouridine-3'-phosphate
  modified_base 15: mod_base = OTHER; note = 2'-O-methylcytidine-3'-phosphate
  modified_base 16: mod_base = OTHER; note = 2'-fluorocytidine-3'-phosphate
  modified_base 17: mod_base = OTHER; note = 2'-O-methylcytidine-3'-phosphate
  modified_base 18: mod_base = OTHER; note = 2'-O-methyluridine-3'-phosphate
  modified_base 19: mod_base = OTHER; note = 2'-O-methyluridine-3'-phosphate
  modified_base 20: mod_base = OTHER; note = 2'-O-methylcytidine-3'-phosphate
  modified_base 21: mod_base = OTHER; note = 2'-O-methylcytidine-3'- phosphorothioate
  modified_base 22: mod_base = OTHER; note = 2'-O-methyladenosine-3'- phosphorothioate
  modified_base 23: mod_base = OTHER; note = 2'-O-methylcytidine-3'-phosphate
aagacttccaccttcccttccac

SEQ ID NO: 2712 - RNA, 21 nt, synthetic construct
  misc_feature 1..21: note = Description of Artificial Sequence: Synthetic oligonucleotide
  source 1..21: mol_type = other RNA
  modified_base 1: mod_base = OTHER; note = 2'-O-methyluridine-3'-phosphorothioate
  modified_base 2: mod_base = OTHER; note = 2'-O-methylguanosine-3'- phosphorothioate
  modified_base 3: mod_base = OTHER; note = 2'-O-methylguanosine-3'-phosphate
  modified_base 4: mod_base = OTHER; note = 2'-O-methyladenosine-3'-phosphate
  modified_base 5: mod_base = OTHER; note = 2'-O-methyladenosine-3'-phosphate
  modified_base 6: mod_base = OTHER; note = 2'-O-methylguanosine-3'-phosphate
  modified_base 7: mod_base = OTHER; note = 2'-fluoroguanosine-3'-phosphate
  modified_base 8: mod_base = OTHER; note = 2'-O-methylguanosine-3'-phosphate
  modified_base 9: mod_base = OTHER; note = 2'-fluoroadenosine-3'-phosphate
  modified_base 10: mod_base = OTHER; note = 2'-fluoroadenosine-3'-phosphate
  modified_base 11: mod_base = OTHER; note = 2'-fluoroguanosine-3'-phosphate
  modified_base 12: mod_base = OTHER; note = 2'-O-methylguanosine-3'-phosphate
  modified_base 13: mod_base = OTHER; note = 2'-O-methyluridine-3'-phosphate
  modified_base 14: mod_base = OTHER; note = 2'-O-methylguanosine-3'-phosphate
  modified_base 15: mod_base = OTHER; note = 2'-O-methylguanosine-3'-phosphate
  modified_base 16: mod_base = OTHER; note = 2'-O-methyladenosine-3'-phosphate
  modified_base 17: mod_base = OTHER; note = 2'-O-methyladenosine-3'-phosphate
  modified_base 18: mod_base = OTHER; note = 2'-O-methylguanosine-3'-phosphate
  modified_base 19: mod_base = OTHER; note = 2'-O-methyluridine-3'-phosphate
  modified_base 20: mod_base = OTHER; note = 2'-O-methylcytidine-3'-phosphate
  modified_base 21: mod_base = OTHER; note = 2'-O-methyluridine-3'-phosphate attached to N-[tris(N-acetylgalactosamine-alkyl)-amidodecanoyl)]-4-hydr oxyprolinol Hyp-(N-acetylgalactosamine-alkyl)3
tggaagggaaggtggaagtct

SEQ ID NO: 2713 - RNA, 23 nt, synthetic construct
  misc_feature 1..23: note = Description of Artificial Sequence: Synthetic oligonucleotide
  source 1..23: mol_type = other RNA
  modified_base 1: mod_base = OTHER; note = 2'-O-methyladenosine-3'- phosphorothioate
  modified_base 2: mod_base = OTHER; note = 2'-fluoroguanosine-3'-phosphorothioate
  modified_base 3: mod_base = OTHER; note = 2'-O-methyladenosine-3'-phosphate
  modified_base 4: mod_base = OTHER; note = 2'-O-methylcytidine-3'-phosphate
  modified_base 5: mod_base = OTHER; note = 2'-O-methyluridine-3'-phosphate
  modified_base 6: mod_base = OTHER; note = 2'-fluorouridine-3'-phosphate
  modified_base 7: mod_base = OTHER; note = 2'-O-methylcytidine-3'-phosphate
  modified_base 8: mod_base = OTHER; note = 2'-fluorocytidine-3'-phosphate
  modified_base 9: mod_base = OTHER; note = 2'-fluoroadenosine-3'-phosphate
  modified_base 10: mod_base = OTHER; note = 2'-O-methylcytidine-3'-phosphate
  modified_base 11: mod_base = OTHER; note = 2'-O-methylcytidine-3'-phosphate
  modified_base 12: mod_base = OTHER; note = 2'-O-methyluridine-3'-phosphate
  modified_base 13: mod_base = OTHER; note = 2'-O-methyluridine-3'-phosphate
  modified_base 14: mod_base = OTHER; note = 2'-fluorocytidine-3'-phosphate
  modified_base 15: mod_base = OTHER; note = 2'-O-methylcytidine-3'-phosphate
  modified_base 16: mod_base = OTHER; note = 2'-fluorocytidine-3'-phosphate
  modified_base 17: mod_base = OTHER; note = 2'-O-methyluridine-3'-phosphate
  modified_base 18: mod_base = OTHER; note = 2'-O-methyluridine-3'-phosphate
  modified_base 19: mod_base = OTHER; note = 2'-O-methylcytidine-3'-phosphate
  modified_base 20: mod_base = OTHER; note = 2'-O-methylcytidine-3'-phosphate
  modified_base 21: mod_base = OTHER; note = 2'-O-methyladenosine-3'- phosphorothioate
  modified_base 22: mod_base = OTHER; note = 2'-O-methylcytidine-3'- phosphorothioate
  modified_base 23: mod_base = OTHER; note = 2'-O-methyladenosine-3'-phosphate
agacttccaccttcccttccaca

SEQ ID NO: 2714 - RNA, 21 nt, synthetic construct
  misc_feature 1..21: note = Description of Artificial Sequence: Synthetic oligonucleotide
  source 1..21: mol_type = other RNA
  modified_base 1: mod_base = OTHER; note = 2'-O-methyluridine-3'-phosphorothioate
  modified_base 2: mod_base = OTHER; note = 2'-O-methylguanosine-3'- phosphorothioate
  modified_base 3: mod_base = OTHER; note = 2'-O-methylcytidine-3'-phosphate
  modified_base 4: mod_base = OTHER; note = 2'-O-methyluridine-3'-phosphate
  modified_base 5: mod_base = OTHER; note = 2'-O-methyladenosine-3'-phosphate
  modified_base 6: mod_base = OTHER; note = 2'-O-methyladenosine-3'-phosphate
  modified_base 7: mod_base = OTHER; note = 2'-fluoroadenosine-3'-phosphate
  modified_base 8: mod_base = OTHER; note = 2'-O-methyluridine-3'-phosphate
  modified_base 9: mod_base = OTHER; note = 2'-fluorocytidine-3'-phosphate
  modified_base 10: mod_base = OTHER; note = 2'-fluoroadenosine-3'-phosphate
  modified_base 11: mod_base = OTHER; note = 2'-fluoroguanosine-3'-phosphate
  modified_base 12: mod_base = OTHER; note = 2'-O-methyluridine-3'-phosphate
  modified_base 13: mod_base = OTHER; note = 2'-O-methyladenosine-3'-phosphate
  modified_base 14: mod_base = OTHER; note = 2'-O-methylcytidine-3'-phosphate
  modified_base 15: mod_base = OTHER; note = 2'-O-methyluridine-3'-phosphate
  modified_base 16: mod_base = OTHER; note = 2'-O-methyluridine-3'-phosphate
  modified_base 17: mod_base = OTHER; note = 2'-O-methylcytidine-3'-phosphate
  modified_base 18: mod_base = OTHER; note = 2'-O-methylcytidine-3'-phosphate
  modified_base 19: mod_base = OTHER; note = 2'-O-methyladenosine-3'-phosphate
  modified_base 20: mod_base = OTHER; note = 2'-O-methyladenosine-3'-phosphate
  modified_base 21: mod_base = OTHER; note = 2'-O-methyladenosine-3'-phosphate attached to N-[tris(N-acetylgalactosamine-alkyl)-amidodecanoyl)]-4-hydr oxyprolinol Hyp-(N-acetylgalactosamine-alkyl)3
tgctaaatcagtacttccaaa

SEQ ID NO: 2715 - RNA, 23 nt, synthetic construct
  misc_feature 1..23: note = Description of Artificial Sequence: Synthetic oligonucleotide
  source 1..23: mol_type = other RNA
  modified_base 1: mod_base = OTHER; note = 2'-O-methyluridine-3'-phosphorothioate
  modified_base 2: mod_base = OTHER; note = 2'-fluorouridine -3'-phosphorothioate
  modified_base 3: mod_base = OTHER; note = 2'-O-methyluridine-3'-phosphate
  modified_base 4: mod_base = OTHER; note = 2'-O-methylguanosine-3'-phosphate
  modified_base 5: mod_base = OTHER; note = 2'-O-methylguanosine-3'-phosphate
  modified_base 6: mod_base = OTHER; note = 2'-fluoroadenosine-3'-phosphate
  modified_base 7: mod_base = OTHER; note = 2'-O-methyladenosine-3'-phosphate
  modified_base 8: mod_base = OTHER; note = 2'-fluoroguanosine-3'-phosphate
  modified_base 9: mod_base = OTHER; note = 2'-fluorouridine-3'-phosphate
  modified_base 10: mod_base = OTHER; note = 2'-O-methyladenosine-3'-phosphate
  modified_base 11: mod_base = OTHER; note = 2'-O-methylcytidine-3'-phosphate
  modified_base 12: mod_base = OTHER; note = 2'-O-methyluridine-3'-phosphate
  modified_base 13: mod_base = OTHER; note = 2'-O-methylguanosine-3'-phosphate
  modified_base 14: mod_base = OTHER; note = 2'-fluoroadenosine-3'-phosphate
  modified_base 15: mod_base = OTHER; note = 2'-O-methyluridine-3'-phosphate
  modified_base 16: mod_base = OTHER; note = 2'-fluorouridine-3'-phosphate
  modified_base 17: mod_base = OTHER; note = 2'-O-methyluridine-3'-phosphate
  modified_base 18: mod_base = OTHER; note = 2'-O-methyladenosine-3'-phosphate
  modified_base 19: mod_base = OTHER; note = 2'-O-methylguanosine-3'-phosphate
  modified_base 20: mod_base = OTHER; note = 2'-O-methylcytidine-3'-phosphate
  modified_base 21: mod_base = OTHER; note = 2'-O-methyladenosine-3'- phosphorothioate
  modified_base 22: mod_base = OTHER; note = 2'-O-methyluridine-3'-phosphorothioate
  modified_base 23: mod_base = OTHER; note = 2'-O-methylguanosine-3'-phosphate
tttggaagtactgatttagcatg

SEQ ID NO: 2716 - RNA, 21 nt, synthetic construct
  misc_feature 1..21: note = Description of Artificial Sequence: Synthetic oligonucleotide
  source 1..21: mol_type = other RNA
  modified_base 1: mod_base = OTHER; note = 2'-O-methylguanosine-3'- phosphorothioate
  modified_base 2: mod_base = OTHER; note = 2'-O-methylcytidine-3'- phosphorothioate
  modified_base 3: mod_base = OTHER; note = 2'-O-methyluridine-3'-phosphate
  modified_base 4: mod_base = OTHER; note = 2'-O-methyladenosine-3'-phosphate
  modified_base 5: mod_base = OTHER; note = 2'-O-methyladenosine-3'-phosphate
  modified_base 6: mod_base = OTHER; note = 2'-O-methyladenosine-3'-phosphate
  modified_base 7: mod_base = OTHER; note = 2'-fluorouridine-3'-phosphate
  modified_base 8: mod_base = OTHER; note = 2'-O-methylcytidine-3'-phosphate
  modified_base 9: mod_base = OTHER; note = 2'-fluoroadenosine-3'-phosphate
  modified_base 10: mod_base = OTHER; note = 2'-fluoroguanosine-3'-phosphate
  modified_base 11: mod_base = OTHER; note = 2'-fluorouridine-3'-phosphate
  modified_base 12: mod_base = OTHER; note = 2'-O-methyladenosine-3'-phosphate
  modified_base 13: mod_base = OTHER; note = 2'-O-methylcytidine-3'-phosphate
  modified_base 14: mod_base = OTHER; note = 2'-O-methyluridine-3'-phosphate
  modified_base 15: mod_base = OTHER; note = 2'-O-methyluridine-3'-phosphate
  modified_base 16: mod_base = OTHER; note = 2'-O-methylcytidine-3'-phosphate
  modified_base 17: mod_base = OTHER; note = 2'-O-methylcytidine-3'-phosphate
  modified_base 18: mod_base = OTHER; note = 2'-O-methyladenosine-3'-phosphate
  modified_base 19: mod_base = OTHER; note = 2'-O-methyladenosine-3'-phosphate
  modified_base 20: mod_base = OTHER; note = 2'-O-methyladenosine-3'-phosphate
  modified_base 21: mod_base = OTHER; note = 2'-O-methylguanosine-3'-phosphate attached to N-[tris(N-acetylgalactosamine-alkyl)-amidodecanoyl)]-4-hydr oxyprolinol Hyp-(N-acetylgalactosamine-alkyl)3
gctaaatcagtacttccaaag

SEQ ID NO: 2717 - RNA, 23 nt, synthetic construct
  misc_feature 1..23: note = Description of Artificial Sequence: Synthetic oligonucleotide
  source 1..23: mol_type = other RNA
  modified_base 1: mod_base = OTHER; note = 2'-O-methylcytidine-3'- phosphorothioate
  modified_base 2: mod_base = OTHER; note = 2'-fluorouridine -3'-phosphorothioate
  modified_base 3: mod_base = OTHER; note = 2'-O-methyluridine-3'-phosphate
  modified_base 4: mod_base = OTHER; note = 2'-O-methyluridine-3'-phosphate
  modified_base 5: mod_base = OTHER; note = 2'-O-methylguanosine-3'-phosphate
  modified_base 6: mod_base = OTHER; note = 2'-fluoroguanosine-3'-phosphate
  modified_base 7: mod_base = OTHER; note = 2'-O-methyladenosine-3'-phosphate
  modified_base 8: mod_base = OTHER; note = 2'-fluoroadenosine-3'-phosphate
  modified_base 9: mod_base = OTHER; note = 2'-fluoroguanosine-3'-phosphate
  modified_base 10: mod_base = OTHER; note = 2'-O-methyluridine-3'-phosphate
  modified_base 11: mod_base = OTHER; note = 2'-O-methyladenosine-3'-phosphate
  modified_base 12: mod_base = OTHER; note = 2'-O-methylcytidine-3'-phosphate
  modified_base 13: mod_base = OTHER; note = 2'-O-methyluridine-3'-phosphate
  modified_base 14: mod_base = OTHER; note = 2'-fluoroguanosine-3'-phosphate
  modified_base 15: mod_base = OTHER; note = 2'-O-methyladenosine-3'-phosphate
  modified_base 16: mod_base = OTHER; note = 2'-fluorouridine-3'-phosphate
  modified_base 17: mod_base = OTHER; note = 2'-O-methyluridine-3'-phosphate
  modified_base 18: mod_base = OTHER; note = 2'-O-methyluridine-3'-phosphate
  modified_base 19: mod_base = OTHER; note = 2'-O-methyladenosine-3'-phosphate
  modified_base 20: mod_base = OTHER; note = 2'-O-methylguanosine-3'-phosphate
  modified_base 21: mod_base = OTHER; note = 2'-O-methylcytidine-3'- phosphorothioate
  modified_base 22: mod_base = OTHER; note = 2'-O-methyladenosine-3'- phosphorothioate
  modified_base 23: mod_base = OTHER; note = 2'-O-methyluridine-3'-phosphate
ctttggaagtactgatttagcat

SEQ ID NO: 2718 - RNA, 21 nt, synthetic construct
  misc_feature 1..21: note = Description of Artificial Sequence: Synthetic oligonucleotide
  source 1..21: mol_type = other RNA
  modified_base 1: mod_base = OTHER; note = 2'-O-methyladenosine-3'- phosphorothioate
  modified_base 2: mod_base = OTHER; note = 2'-O-methyladenosine-3'- phosphorothioate
  modified_base 3: mod_base = OTHER; note = 2'-O-methylcytidine-3'-phosphate
  modified_base 4: mod_base = OTHER; note = 2'-O-methyladenosine-3'-phosphate
  modified_base 5: mod_base = OTHER; note = 2'-O-methyluridine-3'-phosphate
  modified_base 6: mod_base = OTHER; note = 2'-O-methylguanosine-3'-phosphate
  modified_base 7: mod_base = OTHER; note = 2'-fluorocytidine-3'-phosphate
  modified_base 8: mod_base = OTHER; note = 2'-O-methyluridine-3'-phosphate
  modified_base 9: mod_base = OTHER; note = 2'-fluoroadenosine-3'-phosphate
  modified_base 10: mod_base = OTHER; note = 2'-fluoroadenosine-3'-phosphate
  modified_base 11: mod_base = OTHER; note = 2'-fluoroadenosine-3'-phosphate
  modified_base 12: mod_base = OTHER; note = 2'-O-methyluridine-3'-phosphate
  modified_base 13: mod_base = OTHER; note = 2'-O-methylcytidine-3'-phosphate
  modified_base 14: mod_base = OTHER; note = 2'-O-methyladenosine-3'-phosphate
  modified_base 15: mod_base = OTHER; note = 2'-O-methylguanosine-3'-phosphate
  modified_base 16: mod_base = OTHER; note = 2'-O-methyluridine-3'-phosphate
  modified_base 17: mod_base = OTHER; note = 2'-O-methyladenosine-3'-phosphate
  modified_base 18: mod_base = OTHER; note = 2'-O-methylcytidine-3'-phosphate
  modified_base 19: mod_base = OTHER; note = 2'-O-methyluridine-3'-phosphate
  modified_base 20: mod_base = OTHER; note = 2'-O-methyluridine-3'-phosphate
  modified_base 21: mod_base = OTHER; note = 2'-O-methylcytidine-3'-phosphate attached to N-[tris(N-acetylgalactosamine-alkyl)-amidodecanoyl)]-4-hydr oxyprolinol Hyp-(N-acetylgalactosamine-alkyl)3
aacatgctaaatcagtacttc

SEQ ID NO: 2719 - RNA, 23 nt, synthetic construct
  misc_feature 1..23: note = Description of Artificial Sequence: Synthetic oligonucleotide
  source 1..23: mol_type = other RNA
  modified_base 1: mod_base = OTHER; note = 2'-O-methylguanosine-3'- phosphorothioate
  modified_base 2: mod_base = OTHER; note = 2'-fluoroadenosine-3'-phosphorothioate
  modified_base 3: mod_base = OTHER; note = 2'-O-methyladenosine-3'-phosphate
  modified_base 4: mod_base = OTHER; note = 2'-O-methylguanosine-3'-phosphate
  modified_base 5: mod_base = OTHER; note = 2'-O-methyluridine-3'-phosphate
  modified_base 6: mod_base = OTHER; note = 2'-fluoroadenosine-3'-phosphate
  modified_base 7: mod_base = OTHER; note = 2'-O-methylcytidine-3'-phosphate
  modified_base 8: mod_base = OTHER; note = 2'-fluorouridine-3'-phosphate
  modified_base 9: mod_base = OTHER; note = 2'-fluoroguanosine-3'-phosphate
  modified_base 10: mod_base = OTHER; note = 2'-O-methyladenosine-3'-phosphate
  modified_base 11: mod_base = OTHER; note = 2'-O-methyluridine-3'-phosphate
  modified_base 12: mod_base = OTHER; note = 2'-O-methyluridine-3'-phosphate
  modified_base 13: mod_base = OTHER; note = 2'-O-methyluridine-3'-phosphate
  modified_base 14: mod_base = OTHER; note = 2'-fluoroadenosine-3'-phosphate
  modified_base 15: mod_base = OTHER; note = 2'-O-methylguanosine-3'-phosphate
  modified_base 16: mod_base = OTHER; note = 2'-fluorocytidine-3'-phosphate
  modified_base 17: mod_base = OTHER; note = 2'-O-methyladenosine-3'-phosphate
  modified_base 18: mod_base = OTHER; note = 2'-O-methyluridine-3'-phosphate
  modified_base 19: mod_base = OTHER; note = 2'-O-methylguanosine-3'-phosphate
  modified_base 20: mod_base = OTHER; note = 2'-O-methyluridine-3'-phosphate
  modified_base 21: mod_base = OTHER; note = 2'-O-methyluridine-3'-phosphorothioate
  modified_base 22: mod_base = OTHER; note = 2'-O-methylguanosine-3'- phosphorothioate
  modified_base 23: mod_base = OTHER; note = 2'-O-methyluridine-3'-phosphate
gaagtactgatttagcatgttgt

SEQ ID NO: 2720 - RNA, 21 nt, synthetic construct
  misc_feature 1..21: note = Description of Artificial Sequence: Synthetic oligonucleotide
  source 1..21: mol_type = other RNA
  modified_base 1: mod_base = OTHER; note = 2'-O-methylcytidine-3'- phosphorothioate
  modified_base 2: mod_base = OTHER; note = 2'-O-methyladenosine-3'- phosphorothioate
  modified_base 3: mod_base = OTHER; note = 2'-O-methyladenosine-3'-phosphate
  modified_base 4: mod_base = OTHER; note = 2'-O-methylcytidine-3'-phosphate
  modified_base 5: mod_base = OTHER; note = 2'-O-methyladenosine-3'-phosphate
  modified_base 6: mod_base = OTHER; note = 2'-O-methyluridine-3'-phosphate
  modified_base 7: mod_base = OTHER; note = 2'-fluoroguanosine-3'-phosphate
  modified_base 8: mod_base = OTHER; note = 2'-O-methylcytidine-3'-phosphate
  modified_base 9: mod_base = OTHER; note = 2'-fluorouridine-3'-phosphate
  modified_base 10: mod_base = OTHER; note = 2'-fluoroadenosine-3'-phosphate
  modified_base 11: mod_base = OTHER; note = 2'-fluoroadenosine-3'-phosphate
  modified_base 12: mod_base = OTHER; note = 2'-O-methyladenosine-3'-phosphate
  modified_base 13: mod_base = OTHER; note = 2'-O-methyluridine-3'-phosphate
  modified_base 14: mod_base = OTHER; note = 2'-O-methylcytidine-3'-phosphate
  modified_base 15: mod_base = OTHER; note = 2'-O-methyladenosine-3'-phosphate
  modified_base 16: mod_base = OTHER; note = 2'-O-methylguanosine-3'-phosphate
  modified_base 17: mod_base = OTHER; note = 2'-O-methyluridine-3'-phosphate
  modified_base 18: mod_base = OTHER; note = 2'-O-methyladenosine-3'-phosphate
  modified_base 19: mod_base = OTHER; note = 2'-O-methylcytidine-3'-phosphate
  modified_base 20: mod_base = OTHER; note = 2'-O-methyluridine-3'-phosphate
  modified_base 21: mod_base = OTHER; note = 2'-O-methyluridine-3'-phosphate attached to N-[tris(N-acetylgalactosamine-alkyl)-amidodecanoyl)]-4-hydr oxyprolinol Hyp-(N-acetylgalactosamine-alkyl)3
caacatgctaaatcagtactt

SEQ ID NO: 2721 - RNA, 23 nt, synthetic construct
  misc_feature 1..23: note = Description of Artificial Sequence: Synthetic oligonucleotide
  source 1..23: mol_type = other RNA
  modified_base 1: mod_base = OTHER; note = 2'-O-methyladenosine-3'- phosphorothioate
  modified_base 2: mod_base = OTHER; note = 2'-fluoroadenosine-3'-phosphorothioate
  modified_base 3: mod_base = OTHER; note = 2'-O-methylguanosine-3'-phosphate
  modified_base 4: mod_base = OTHER; note = 2'-O-methyluridine-3'-phosphate
  modified_base 5: mod_base = OTHER; note = 2'-O-methyladenosine-3'-phosphate
  modified_base 6: mod_base = OTHER; note = 2'-fluorocytidine-3'-phosphate
  modified_base 7: mod_base = OTHER; note = 2'-O-methyluridine-3'-phosphate
  modified_base 8: mod_base = OTHER; note = 2'-fluoroguanosine-3'-phosphate
  modified_base 9: mod_base = OTHER; note = 2'-fluoroadenosine-3'-phosphate
  modified_base 10: mod_base = OTHER; note = 2'-O-methyluridine-3'-phosphate
  modified_base 11: mod_base = OTHER; note = 2'-O-methyluridine-3'-phosphate
  modified_base 12: mod_base = OTHER; note = 2'-O-methyluridine-3'-phosphate
  modified_base 13: mod_base = OTHER; note = 2'-O-methyladenosine-3'-phosphate
  modified_base 14: mod_base = OTHER; note = 2'-fluoroguanosine-3'-phosphate
  modified_base 15: mod_base = OTHER; note = 2'-O-methylcytidine-3'-phosphate
  modified_base 16: mod_base = OTHER; note = 2'-fluoroadenosine-3'-phosphate
  modified_base 17: mod_base = OTHER; note = 2'-O-methyluridine-3'-phosphate
  modified_base 18: mod_base = OTHER; note = 2'-O-methylguanosine-3'-phosphate
  modified_base 19: mod_base = OTHER; note = 2'-O-methyluridine-3'-phosphate
  modified_base 20: mod_base = OTHER; note = 2'-O-methyluridine-3'-phosphate
  modified_base 21: mod_base = OTHER; note = 2'-O-methylguanosine-3'- phosphorothioate
  modified_base 22: mod_base = OTHER; note = 2'-O-methyluridine-3'-phosphorothioate
  modified_base 23: mod_base = OTHER; note = 2'-O-methyluridine-3'-phosphate
aagtactgatttagcatgttgtt

SEQ ID NO: 2722 - RNA, 21 nt, synthetic construct
  misc_feature 1..21: note = Description of Artificial Sequence: Synthetic oligonucleotide
  source 1..21: mol_type = other RNA
  modified_base 1: mod_base = OTHER; note = 2'-O-methylcytidine-3'- phosphorothioate
  modified_base 2: mod_base = OTHER; note = 2'-O-methylcytidine-3'- phosphorothioate
  modified_base 3: mod_base = OTHER; note = 2'-O-methyladenosine-3'-phosphate
  modified_base 4: mod_base = OTHER; note = 2'-O-methylcytidine-3'-phosphate
  modified_base 5: mod_base = OTHER; note = 2'-O-methyladenosine-3'-phosphate
  modified_base 6: mod_base = OTHER; note = 2'-O-methyladenosine-3'-phosphate
  modified_base 7: mod_base = OTHER; note = 2'-fluorocytidine-3'-phosphate
  modified_base 8: mod_base = OTHER; note = 2'-O-methyluridine-3'-phosphate
  modified_base 9: mod_base = OTHER; note = 2'-fluorocytidine-3'-phosphate
  modified_base 10: mod_base = OTHER; note = 2'-fluoroadenosine-3'-phosphate
  modified_base 11: mod_base = OTHER; note = 2'-fluoroguanosine-3'-phosphate
  modified_base 12: mod_base = OTHER; note = 2'-O-methylguanosine-3'-phosphate
  modified_base 13: mod_base = OTHER; note = 2'-O-methyladenosine-3'-phosphate
  modified_base 14: mod_base = OTHER; note = 2'-O-methyluridine-3'-phosphate
  modified_base 15: mod_base = OTHER; note = 2'-O-methylguanosine-3'-phosphate
  modified_base 16: mod_base = OTHER; note = 2'-O-methyladenosine-3'-phosphate
  modified_base 17: mod_base = OTHER; note = 2'-O-methyladenosine-3'-phosphate
  modified_base 18: mod_base = OTHER; note = 2'-O-methyladenosine-3'-phosphate
  modified_base 19: mod_base = OTHER; note = 2'-O-methyladenosine-3'-phosphate
  modified_base 20: mod_base = OTHER; note = 2'-O-methyladenosine-3'-phosphate
  modified_base 21: mod_base = OTHER; note = 2'-O-methyluridine-3'-phosphate attached to N-[tris(N-acetylgalactosamine-alkyl)-amidodecanoyl)]-4-hydr oxyprolinol Hyp-(N-acetylgalactosamine-alkyl)3
ccacaactcaggatgaaaaat

SEQ ID NO: 2723 - RNA, 23 nt, synthetic construct
  misc_feature 1..23: note = Description of Artificial Sequence: Synthetic oligonucleotide
  source 1..23: mol_type = other RNA
  modified_base 1: mod_base = OTHER; note = 2'-O-methyladenosine-3'- phosphorothioate
  modified_base 2: mod_base = OTHER; note = 2'-fluorouridine -3'-phosphorothioate
  modified_base 3: mod_base = OTHER; note = 2'-O-methyluridine-3'-phosphate
  modified_base 4: mod_base = OTHER; note = 2'-O-methyluridine-3'-phosphate
  modified_base 5: mod_base = OTHER; note = 2'-O-methyluridine-3'-phosphate
  modified_base 6: mod_base = OTHER; note = 2'-fluorouridine-3'-phosphate
  modified_base 7: mod_base = OTHER; note = 2'-O-methylcytidine-3'-phosphate
  modified_base 8: mod_base = OTHER; note = 2'-fluoroadenosine-3'-phosphate
  modified_base 9: mod_base = OTHER; note = 2'-fluorouridine-3'-phosphate
  modified_base 10: mod_base = OTHER; note = 2'-O-methylcytidine-3'-phosphate
  modified_base 11: mod_base = OTHER; note = 2'-O-methylcytidine-3'-phosphate
  modified_base 12: mod_base = OTHER; note = 2'-O-methyluridine-3'-phosphate
  modified_base 13: mod_base = OTHER; note = 2'-O-methylguanosine-3'-phosphate
  modified_base 14: mod_base = OTHER; note = 2'-fluoroadenosine-3'-phosphate
  modified_base 15: mod_base = OTHER; note = 2'-O-methylguanosine-3'-phosphate
  modified_base 16: mod_base = OTHER; note = 2'-fluorouridine-3'-phosphate
  modified_base 17: mod_base = OTHER; note = 2'-O-methyluridine-3'-phosphate
  modified_base 18: mod_base = OTHER; note = 2'-O-methylguanosine-3'-phosphate
  modified_base 19: mod_base = OTHER; note = 2'-O-methyluridine-3'-phosphate
  modified_base 20: mod_base = OTHER; note = 2'-O-methylguanosine-3'-phosphate
  modified_base 21: mod_base = OTHER; note = 2'-O-methylguanosine-3'- phosphorothioate
  modified_base 22: mod_base = OTHER; note = 2'-O-methylcytidine-3'- phosphorothioate
  modified_base 23: mod_base = OTHER; note = 2'-O-methylguanosine-3'-phosphate
atttttcatcctgagttgtggcg

SEQ ID NO: 2724 - RNA, 21 nt, synthetic construct
  misc_feature 1..21: note = Description of Artificial Sequence: Synthetic oligonucleotide
  source 1..21: mol_type = other RNA
  modified_base 1: mod_base = OTHER; note = 2'-O-methylcytidine-3'- phosphorothioate
  modified_base 2: mod_base = OTHER; note = 2'-O-methyladenosine-3'- phosphorothioate
  modified_base 3: mod_base = OTHER; note = 2'-O-methylcytidine-3'-phosphate
  modified_base 4: mod_base = OTHER; note = 2'-O-methyladenosine-3'-phosphate
  modified_base 5: mod_base = OTHER; note = 2'-O-methyladenosine-3'-phosphate
  modified_base 6: mod_base = OTHER; note = 2'-O-methylcytidine-3'-phosphate
  modified_base 7: mod_base = OTHER; note = 2'-fluorouridine-3'-phosphate
  modified_base 8: mod_base = OTHER; note = 2'-O-methylcytidine-3'-phosphate
  modified_base 9: mod_base = OTHER; note = 2'-fluoroadenosine-3'-phosphate
  modified_base 10: mod_base = OTHER; note = 2'-fluoroguanosine-3'-phosphate
  modified_base 11: mod_base = OTHER; note = 2'-fluoroguanosine-3'-phosphate
  modified_base 12: mod_base = OTHER; note = 2'-O-methyladenosine-3'-phosphate
  modified_base 13: mod_base = OTHER; note = 2'-O-methyluridine-3'-phosphate
  modified_base 14: mod_base = OTHER; note = 2'-O-methylguanosine-3'-phosphate
  modified_base 15: mod_base = OTHER; note = 2'-O-methyladenosine-3'-phosphate
  modified_base 16: mod_base = OTHER; note = 2'-O-methyladenosine-3'-phosphate
  modified_base 17: mod_base = OTHER; note = 2'-O-methyladenosine-3'-phosphate
  modified_base 18: mod_base = OTHER; note = 2'-O-methyladenosine-3'-phosphate
  modified_base 19: mod_base = OTHER; note = 2'-O-methyladenosine-3'-phosphate
  modified_base 20: mod_base = OTHER; note = 2'-O-methyluridine-3'-phosphate
  modified_base 21: mod_base = OTHER; note = 2'-O-methyluridine-3'-phosphate attached to N-[tris(N-acetylgalactosamine-alkyl)-amidodecanoyl)]-4-hydr oxyprolinol Hyp-(N-acetylgalactosamine-alkyl)3
cacaactcaggatgaaaaatt

SEQ ID NO: 2725 - RNA, 23 nt, synthetic construct
  misc_feature 1..23: note = Description of Artificial Sequence: Synthetic oligonucleotide
  source 1..23: mol_type = other RNA
  modified_base 1: mod_base = OTHER; note = 2'-O-methyladenosine-3'- phosphorothioate
  modified_base 2: mod_base = OTHER; note = 2'-fluoroadenosine-3'-phosphorothioate
  modified_base 3: mod_base = OTHER; note = 2'-O-methyluridine-3'-phosphate
  modified_base 4: mod_base = OTHER; note = 2'-O-methyluridine-3'-phosphate
  modified_base 5: mod_base = OTHER; note = 2'-O-methyluridine-3'-phosphate
  modified_base 6: mod_base = OTHER; note = 2'-fluorouridine-3'-phosphate
  modified_base 7: mod_base = OTHER; note = 2'-O-methyluridine-3'-phosphate
  modified_base 8: mod_base = OTHER; note = 2'-fluorocytidine-3'-phosphate
  modified_base 9: mod_base = OTHER; note = 2'-fluoroadenosine-3'-phosphate
  modified_base 10: mod_base = OTHER; note = 2'-O-methyluridine-3'-phosphate
  modified_base 11: mod_base = OTHER; note = 2'-O-methylcytidine-3'-phosphate
  modified_base 12: mod_base = OTHER; note = 2'-O-methylcytidine-3'-phosphate
  modified_base 13: mod_base = OTHER; note = 2'-O-methyluridine-3'-phosphate
  modified_base 14: mod_base = OTHER; note = 2'-fluoroguanosine-3'-phosphate
  modified_base 15: mod_base = OTHER; note = 2'-O-methyladenosine-3'-phosphate
  modified_base 16: mod_base = OTHER; note = 2'-fluoroguanosine-3'-phosphate
  modified_base 17: mod_base = OTHER; note = 2'-O-methyluridine-3'-phosphate
  modified_base 18: mod_base = OTHER; note = 2'-O-methyluridine-3'-phosphate
  modified_base 19: mod_base = OTHER; note = 2'-O-methylguanosine-3'-phosphate
  modified_base 20: mod_base = OTHER; note = 2'-O-methyluridine-3'-phosphate
  modified_base 21: mod_base = OTHER; note = 2'-O-methylguanosine-3'- phosphorothioate
  modified_base 22: mod_base = OTHER; note = 2'-O-methylguanosine-3'- phosphorothioate
  modified_base 23: mod_base = OTHER; note = 2'-O-methylcytidine-3'-phosphate
aatttttcatcctgagttgtggc

SEQ ID NO: 2726 - RNA, 21 nt, synthetic construct
  misc_feature 1..21: note = Description of Artificial Sequence: Synthetic oligonucleotide
  source 1..21: mol_type = other RNA
  modified_base 1: mod_base = OTHER; note = 2'-O-methylguanosine-3'- phosphorothioate
  modified_base 2: mod_base = OTHER; note = 2'-O-methylcytidine-3'- phosphorothioate
  modified_base 3: mod_base = OTHER; note = 2'-O-methylcytidine-3'-phosphate
  modified_base 4: mod_base = OTHER; note = 2'-O-methylguanosine-3'-phosphate
  modified_base 5: mod_base = OTHER; note = 2'-O-methylcytidine-3'-phosphate
  modified_base 6: mod_base = OTHER; note = 2'-O-methylcytidine-3'-phosphate
  modified_base 7: mod_base = OTHER; note = 2'-fluoroadenosine-3'-phosphate
  modified_base 8: mod_base = OTHER; note = 2'-O-methylcytidine-3'-phosphate
  modified_base 9: mod_base = OTHER; note = 2'-fluoroadenosine-3'-phosphate
  modified_base 10: mod_base = OTHER; note = 2'-fluoroadenosine-3'-phosphate
  modified_base 11: mod_base = OTHER; note = 2'-fluorocytidine-3'-phosphate
  modified_base 12: mod_base = OTHER; note = 2'-O-methyluridine-3'-phosphate
  modified_base 13: mod_base = OTHER; note = 2'-O-methylcytidine-3'-phosphate
  modified_base 14: mod_base = OTHER; note = 2'-O-methyladenosine-3'-phosphate
  modified_base 15: mod_base = OTHER; note = 2'-O-methylguanosine-3'-phosphate
  modified_base 16: mod_base = OTHER; note = 2'-O-methylguanosine-3'-phosphate
  modified_base 17: mod_base = OTHER; note = 2'-O-methyladenosine-3'-phosphate
  modified_base 18: mod_base = OTHER; note = 2'-O-methyluridine-3'-phosphate
  modified_base 19: mod_base = OTHER; note = 2'-O-methylguanosine-3'-phosphate
  modified_base 20: mod_base = OTHER; note = 2'-O-methyladenosine-3'-phosphate
  modified_base 21: mod_base = OTHER; note = 2'-O-methyladenosine-3'-phosphate attached to N-[tris(N-acetylgalactosamine-alkyl)-amidodecanoyl)]-4-hydr oxyprolinol Hyp-(N-acetylgalactosamine-alkyl)3
gccgccacaactcaggatgaa

SEQ ID NO: 2727 - RNA, 23 nt, synthetic construct
  misc_feature 1..23: note = Description of Artificial Sequence: Synthetic oligonucleotide
  source 1..23: mol_type = other RNA
  modified_base 1: mod_base = OTHER; note = 2'-O-methyluridine-3'-phosphorothioate
  modified_base 2: mod_base = OTHER; note = 2'-fluorouridine -3'-phosphorothioate
  modified_base 3: mod_base = OTHER; note = 2'-O-methylcytidine-3'-phosphate
  modified_base 4: mod_base = OTHER; note = 2'-O-methyladenosine-3'-phosphate
  modified_base 5: mod_base = OTHER; note = 2'-O-methyluridine-3'-phosphate
  modified_base 6: mod_base = OTHER; note = 2'-fluorocytidine-3'-phosphate
  modified_base 7: mod_base = OTHER; note = 2'-O-methylcytidine-3'-phosphate
  modified_base 8: mod_base = OTHER; note = 2'-fluorouridine-3'-phosphate
  modified_base 9: mod_base = OTHER; note = 2'-fluoroguanosine-3'-phosphate
  modified_base 10: mod_base = OTHER; note = 2'-O-methyladenosine-3'-phosphate
  modified_base 11: mod_base = OTHER; note = 2'-O-methylguanosine-3'-phosphate
  modified_base 12: mod_base = OTHER; note = 2'-O-methyluridine-3'-phosphate
  modified_base 13: mod_base = OTHER; note = 2'-O-methyluridine-3'-phosphate
  modified_base 14: mod_base = OTHER; note = 2'-fluoroguanosine-3'-phosphate
  modified_base 15: mod_base = OTHER; note = 2'-O-methyluridine-3'-phosphate
  modified_base 16: mod_base = OTHER; note = 2'-fluoroguanosine-3'-phosphate
  modified_base 17: mod_base = OTHER; note = 2'-O-methylguanosine-3'-phosphate
  modified_base 18: mod_base = OTHER; note = 2'-O-methylcytidine-3'-phosphate
  modified_base 19: mod_base = OTHER; note = 2'-O-methylguanosine-3'-phosphate
  modified_base 20: mod_base = OTHER; note = 2'-O-methylguanosine-3'-phosphate
  modified_base 21: mod_base = OTHER; note = 2'-O-methylcytidine-3'- phosphorothioate
  modified_base 22: mod_base = OTHER; note = 2'-O-methyladenosine-3'- phosphorothioate
  modified_base 23: mod_base = OTHER; note = 2'-O-methylguanosine-3'-phosphate
ttcatcctgagttgtggcggcag

SEQ ID NO: 2728 - RNA, 21 nt, synthetic construct
  misc_feature 1..21: note = Description of Artificial Sequence: Synthetic oligonucleotide
  source 1..21: mol_type = other RNA
  modified_base 1: mod_base = OTHER; note = 2'-O-methyluridine-3'-phosphorothioate
  modified_base 2: mod_base = OTHER; note = 2'-O-methylguanosine-3'- phosphorothioate
  modified_base 3: mod_base = OTHER; note = 2'-O-methylcytidine-3'-phosphate
  modified_base 4: mod_base = OTHER; note = 2'-O-methylcytidine-3'-phosphate
  modified_base 5: mod_base = OTHER; note = 2'-O-methylguanosine-3'-phosphate
  modified_base 6: mod_base = OTHER; note = 2'-O-methylcytidine-3'-phosphate
  modified_base 7: mod_base = OTHER; note = 2'-fluorocytidine-3'-phosphate
  modified_base 8: mod_base = OTHER; note = 2'-O-methyladenosine-3'-phosphate
  modified_base 9: mod_base = OTHER; note = 2'-fluorocytidine-3'-phosphate
  modified_base 10: mod_base = OTHER; note = 2'-fluoroadenosine-3'-phosphate
  modified_base 11: mod_base = OTHER; note = 2'-fluoroadenosine-3'-phosphate
  modified_base 12: mod_base = OTHER; note = 2'-O-methylcytidine-3'-phosphate
  modified_base 13: mod_base = OTHER; note = 2'-O-methyluridine-3'-phosphate
  modified_base 14: mod_base = OTHER; note = 2'-O-methylcytidine-3'-phosphate
  modified_base 15: mod_base = OTHER; note = 2'-O-methyladenosine-3'-phosphate
  modified_base 16: mod_base = OTHER; note = 2'-O-methylguanosine-3'-phosphate
  modified_base 17: mod_base = OTHER; note = 2'-O-methylguanosine-3'-phosphate
  modified_base 18: mod_base = OTHER; note = 2'-O-methyladenosine-3'-phosphate
  modified_base 19: mod_base = OTHER; note = 2'-O-methyluridine-3'-phosphate
  modified_base 20: mod_base = OTHER; note = 2'-O-methylguanosine-3'-phosphate
  modified_base 21: mod_base = OTHER; note = 2'-O-methyladenosine-3'-phosphate attached to N-[tris(N-acetylgalactosamine-alkyl)-amidodecanoyl)]-4-hydr oxyprolinol Hyp-(N-acetylgalactosamine-alkyl)3
tgccgccacaactcaggatga

SEQ ID NO: 2729 - RNA, 23 nt, synthetic construct
  misc_feature 1..23: note = Description of Artificial Sequence: Synthetic oligonucleotide
  source 1..23: mol_type = other RNA
  modified_base 1: mod_base = OTHER; note = 2'-O-methyluridine-3'-phosphorothioate
  modified_base 2: mod_base = OTHER; note = 2'-fluorocytidine-3'-phosphorothioate
  modified_base 3: mod_base = OTHER; note = 2'-O-methyladenosine-3'-phosphate
  modified_base 4: mod_base = OTHER; note = 2'-O-methyluridine-3'-phosphate
  modified_base 5: mod_base = OTHER; note = 2'-O-methylcytidine-3'-phosphate
  modified_base 6: mod_base = OTHER; note = 2'-fluorocytidine-3'-phosphate
  modified_base 7: mod_base = OTHER; note = 2'-O-methyluridine-3'-phosphate
  modified_base 8: mod_base = OTHER; note = 2'-fluoroguanosine-3'-phosphate
  modified_base 9: mod_base = OTHER; note = 2'-fluoroadenosine-3'-phosphate
  modified_base 10: mod_base = OTHER; note = 2'-O-methylguanosine-3'-phosphate
  modified_base 11: mod_base = OTHER; note = 2'-O-methyluridine-3'-phosphate
  modified_base 12: mod_base = OTHER; note = 2'-O-methyluridine-3'-phosphate
  modified_base 13: mod_base = OTHER; note = 2'-O-methylguanosine-3'-phosphate
  modified_base 14: mod_base = OTHER; note = 2'-fluorouridine-3'-phosphate
  modified_base 15: mod_base = OTHER; note = 2'-O-methylguanosine-3'-phosphate
  modified_base 16: mod_base = OTHER; note = 2'-fluoroguanosine-3'-phosphate
  modified_base 17: mod_base = OTHER; note = 2'-O-methylcytidine-3'-phosphate
  modified_base 18: mod_base = OTHER; note = 2'-O-methylguanosine-3'-phosphate
  modified_base 19: mod_base = OTHER; note = 2'-O-methylguanosine-3'-phosphate
  modified_base 20: mod_base = OTHER; note = 2'-O-methylcytidine-3'-phosphate
  modified_base 21: mod_base = OTHER; note = 2'-O-methyladenosine-3'- phosphorothioate
  modified_base 22: mod_base = OTHER; note = 2'-O-methylguanosine-3'- phosphorothioate
  modified_base 23: mod_base = OTHER; note = 2'-O-methyluridine-3'-phosphate
tcatcctgagttgtggcggcagt

SEQ ID NO: 2730 - RNA, 21 nt, synthetic construct
  misc_feature 1..21: note = Description of Artificial Sequence: Synthetic oligonucleotide
  source 1..21: mol_type = other RNA
  modified_base 1: mod_base = OTHER; note = 2'-O-methylguanosine-3'- phosphorothioate
  modified_base 2: mod_base = OTHER; note = 2'-O-methylcytidine-3'- phosphorothioate
  modified_base 3: mod_base = OTHER; note = 2'-O-methyladenosine-3'-phosphate
  modified_base 4: mod_base = OTHER; note = 2'-O-methyladenosine-3'-phosphate
  modified_base 5: mod_base = OTHER; note = 2'-O-methylcytidine-3'-phosphate
  modified_base 6: mod_base = OTHER; note = 2'-O-methylcytidine-3'-phosphate
  modified_base 7: mod_base = OTHER; note = 2'-fluoroguanosine-3'-phosphate
  modified_base 8: mod_base = OTHER; note = 2'-O-methyluridine-3'-phosphate
  modified_base 9: mod_base = OTHER; note = 2'-fluorocytidine-3'-phosphate
  modified_base 10: mod_base = OTHER; note = 2'-fluorouridine-3'-phosphate
  modified_base 11: mod_base = OTHER; note = 2'-fluoroguanosine-3'-phosphate
  modified_base 12: mod_base = OTHER; note = 2'-O-methylguanosine-3'-phosphate
  modified_base 13: mod_base = OTHER; note = 2'-O-methyladenosine-3'-phosphate
  modified_base 14: mod_base = OTHER; note = 2'-O-methyluridine-3'-phosphate
  modified_base 15: mod_base = OTHER; note = 2'-O-methylguanosine-3'-phosphate
  modified_base 16: mod_base = OTHER; note = 2'-O-methyladenosine-3'-phosphate
  modified_base 17: mod_base = OTHER; note = 2'-O-methyluridine-3'-phosphate
  modified_base 18: mod_base = OTHER; note = 2'-O-methylguanosine-3'-phosphate
  modified_base 19: mod_base = OTHER; note = 2'-O-methyluridine-3'-phosphate
  modified_base 20: mod_base = OTHER; note = 2'-O-methylguanosine-3'-phosphate
  modified_base 21: mod_base = OTHER; note = 2'-O-methylcytidine-3'-phosphate attached to N-[tris(N-acetylgalactosamine-alkyl)-amidodecanoyl)]-4-hydr oxyprolinol Hyp-(N-acetylgalactosamine-alkyl)3
gcaaccgtctggatgatgtgc

SEQ ID NO: 2731 - RNA, 23 nt, synthetic construct
  misc_feature 1..23: note = Description of Artificial Sequence: Synthetic oligonucleotide
  source 1..23: mol_type = other RNA
  modified_base 1: mod_base = OTHER; note = 2'-O-methylguanosine-3'- phosphorothioate
  modified_base 2: mod_base = OTHER; note = 2'-fluorocytidine-3'-phosphorothioate
  modified_base 3: mod_base = OTHER; note = 2'-O-methyladenosine-3'-phosphate
  modified_base 4: mod_base = OTHER; note = 2'-O-methylcytidine-3'-phosphate
  modified_base 5: mod_base = OTHER; note = 2'-O-methyladenosine-3'-phosphate
  modified_base 6: mod_base = OTHER; note = 2'-fluorouridine-3'-phosphate
  modified_base 7: mod_base = OTHER; note = 2'-O-methylcytidine-3'-phosphate
  modified_base 8: mod_base = OTHER; note = 2'-fluoroadenosine-3'-phosphate
  modified_base 9: mod_base = OTHER; note = 2'-fluorouridine-3'-phosphate
  modified_base 10: mod_base = OTHER; note = 2'-O-methylcytidine-3'-phosphate
  modified_base 11: mod_base = OTHER; note = 2'-O-methylcytidine-3'-phosphate
  modified_base 12: mod_base = OTHER; note = 2'-O-methyladenosine-3'-phosphate
  modified_base 13: mod_base = OTHER; note = 2'-O-methylguanosine-3'-phosphate
  modified_base 14: mod_base = OTHER; note = 2'-fluoroadenosine-3'-phosphate
  modified_base 15: mod_base = OTHER; note = 2'-O-methylcytidine-3'-phosphate
  modified_base 16: mod_base = OTHER; note = 2'-fluoroguanosine-3'-phosphate
  modified_base 17: mod_base = OTHER; note = 2'-O-methylguanosine-3'-phosphate
  modified_base 18: mod_base = OTHER; note = 2'-O-methyluridine-3'-phosphate
  modified_base 19: mod_base = OTHER; note = 2'-O-methyluridine-3'-phosphate
  modified_base 20: mod_base = OTHER; note = 2'-O-methylguanosine-3'-phosphate
  modified_base 21: mod_base = OTHER; note = 2'-O-methylcytidine-3'- phosphorothioate
  modified_base 22: mod_base = OTHER; note = 2'-O-methylcytidine-3'- phosphorothioate
  modified_base 23: mod_base = OTHER; note = 2'-O-methylcytidine-3'-phosphate
gcacatcatccagacggttgccc

SEQ ID NO: 2732 - RNA, 21 nt, synthetic construct
  misc_feature 1..21: note = Description of Artificial Sequence: Synthetic oligonucleotide
  source 1..21: mol_type = other RNA
  modified_base 1: mod_base = OTHER; note = 2'-O-methylcytidine-3'- phosphorothioate
  modified_base 2: mod_base = OTHER; note = 2'-O-methyladenosine-3'- phosphorothioate
  modified_base 3: mod_base = OTHER; note = 2'-O-methyladenosine-3'-phosphate
  modified_base 4: mod_base = OTHER; note = 2'-O-methylcytidine-3'-phosphate
  modified_base 5: mod_base = OTHER; note = 2'-O-methylcytidine-3'-phosphate
  modified_base 6: mod_base = OTHER; note = 2'-O-methylguanosine-3'-phosphate
  modified_base 7: mod_base = OTHER; note = 2'-fluorouridine-3'-phosphate
  modified_base 8: mod_base = OTHER; note = 2'-O-methylcytidine-3'-phosphate
  modified_base 9: mod_base = OTHER; note = 2'-fluorouridine-3'-phosphate
  modified_base 10: mod_base = OTHER; note = 2'-fluoroguanosine-3'-phosphate
  modified_base 11: mod_base = OTHER; note = 2'-fluoroguanosine-3'-phosphate
  modified_base 12: mod_base = OTHER; note = 2'-O-methyladenosine-3'-phosphate
  modified_base 13: mod_base = OTHER; note = 2'-O-methyluridine-3'-phosphate
  modified_base 14: mod_base = OTHER; note = 2'-O-methylguanosine-3'-phosphate
  modified_base 15: mod_base = OTHER; note = 2'-O-methyladenosine-3'-phosphate
  modified_base 16: mod_base = OTHER; note = 2'-O-methyluridine-3'-phosphate
  modified_base 17: mod_base = OTHER; note = 2'-O-methylguanosine-3'-phosphate
  modified_base 18: mod_base = OTHER; note = 2'-O-methyluridine-3'-phosphate
  modified_base 19: mod_base = OTHER; note = 2'-O-methylguanosine-3'-phosphate
  modified_base 20: mod_base = OTHER; note = 2'-O-methylcytidine-3'-phosphate
  modified_base 21: mod_base = OTHER; note = 2'-O-methylguanosine-3'-phosphate attached to N-[tris(N-acetylgalactosamine-alkyl)-amidodecanoyl)]-4-hydr oxyprolinol Hyp-(N-acetylgalactosamine-alkyl)3
caaccgtctggatgatgtgcg

SEQ ID NO: 2733 - RNA, 23 nt, synthetic construct
  misc_feature 1..23: note = Description of Artificial Sequence: Synthetic oligonucleotide
  source 1..23: mol_type = other RNA
  modified_base 1: mod_base = OTHER; note = 2'-O-methylcytidine-3'- phosphorothioate
  modified_base 2: mod_base = OTHER; note = 2'-fluoroguanosine-3'-phosphorothioate
  modified_base 3: mod_base = OTHER; note = 2'-O-methylcytidine-3'-phosphate
  modified_base 4: mod_base = OTHER; note = 2'-O-methyladenosine-3'-phosphate
  modified_base 5: mod_base = OTHER; note = 2'-O-methylcytidine-3'-phosphate
  modified_base 6: mod_base = OTHER; note = 2'-fluoroadenosine-3'-phosphate
  modified_base 7: mod_base = OTHER; note = 2'-O-methyluridine-3'-phosphate
  modified_base 8: mod_base = OTHER; note = 2'-fluorocytidine-3'-phosphate
  modified_base 9: mod_base = OTHER; note = 2'-fluoroadenosine-3'-phosphate
  modified_base 10: mod_base = OTHER; note = 2'-O-methyluridine-3'-phosphate
  modified_base 11: mod_base = OTHER; note = 2'-O-methylcytidine-3'-phosphate
  modified_base 12: mod_base = OTHER; note = 2'-O-methylcytidine-3'-phosphate
  modified_base 13: mod_base = OTHER; note = 2'-O-methyladenosine-3'-phosphate
  modified_base 14: mod_base = OTHER; note = 2'-fluoroguanosine-3'-phosphate
  modified_base 15: mod_base = OTHER; note = 2'-O-methyladenosine-3'-phosphate
  modified_base 16: mod_base = OTHER; note = 2'-fluorocytidine-3'-phosphate
  modified_base 17: mod_base = OTHER; note = 2'-O-methylguanosine-3'-phosphate
  modified_base 18: mod_base = OTHER; note = 2'-O-methylguanosine-3'-phosphate
  modified_base 19: mod_base = OTHER; note = 2'-O-methyluridine-3'-phosphate
  modified_base 20: mod_base = OTHER; note = 2'-O-methyluridine-3'-phosphate
  modified_base 21: mod_base = OTHER; note = 2'-O-methylguanosine-3'- phosphorothioate
  modified_base 22: mod_base = OTHER; note = 2'-O-methylcytidine-3'- phosphorothioate
  modified_base 23: mod_base = OTHER; note = 2'-O-methylcytidine-3'-phosphate
cgcacatcatccagacggttgcc

SEQ ID NO: 2734 - RNA, 21 nt, synthetic construct
  misc_feature 1..21: note = Description of Artificial Sequence: Synthetic oligonucleotide
  source 1..21: mol_type = other RNA
  modified_base 1: mod_base = OTHER; note = 2'-O-methylcytidine-3'- phosphorothioate
  modified_base 2: mod_base = OTHER; note = 2'-O-methyluridine-3'-phosphorothioate
  modified_base 3: mod_base = OTHER; note = 2'-O-methylguanosine-3'-phosphate
  modified_base 4: mod_base = OTHER; note = 2'-O-methylguanosine-3'-phosphate
  modified_base 5: mod_base = OTHER; note = 2'-O-methylguanosine-3'-phosphate
  modified_base 6: mod_base = OTHER; note = 2'-O-methylcytidine-3'-phosphate
  modified_base 7: mod_base = OTHER; note = 2'-fluoroadenosine-3'-phosphate
  modified_base 8: mod_base = OTHER; note = 2'-O-methyladenosine-3'-phosphate
  modified_base 9: mod_base = OTHER; note = 2'-fluorocytidine-3'-phosphate
  modified_base 10: mod_base = OTHER; note = 2'-fluorocytidine-3'-phosphate
  modified_base 11: mod_base = OTHER; note = 2'-fluoroguanosine-3'-phosphate
  modified_base 12: mod_base = OTHER; note = 2'-O-methyluridine-3'-phosphate
  modified_base 13: mod_base = OTHER; note = 2'-O-methylcytidine-3'-phosphate
  modified_base 14: mod_base = OTHER; note = 2'-O-methyluridine-3'-phosphate
  modified_base 15: mod_base = OTHER; note = 2'-O-methylguanosine-3'-phosphate
  modified_base 16: mod_base = OTHER; note = 2'-O-methylguanosine-3'-phosphate
  modified_base 17: mod_base = OTHER; note = 2'-O-methyladenosine-3'-phosphate
  modified_base 18: mod_base = OTHER; note = 2'-O-methyluridine-3'-phosphate
  modified_base 19: mod_base = OTHER; note = 2'-O-methylguanosine-3'-phosphate
  modified_base 20: mod_base = OTHER; note = 2'-O-methyladenosine-3'-phosphate
  modified_base 21: mod_base = OTHER; note = 2'-O-methyluridine-3'-phosphate attached to N-[tris(N-acetylgalactosamine-alkyl)-amidodecanoyl)]-4-hydr oxyprolinol Hyp-(N-acetylgalactosamine-alkyl)3
ctgggcaaccgtctggatgat

SEQ ID NO: 2735 - RNA, 23 nt, synthetic construct
  misc_feature 1..23: note = Description of Artificial Sequence: Synthetic oligonucleotide
  source 1..23: mol_type = other RNA
  modified_base 1: mod_base = OTHER; note = 2'-O-methyladenosine-3'- phosphorothioate
  modified_base 2: mod_base = OTHER; note = 2'-fluorouridine -3'-phosphorothioate
  modified_base 3: mod_base = OTHER; note = 2'-O-methylcytidine-3'-phosphate
  modified_base 4: mod_base = OTHER; note = 2'-O-methyladenosine-3'-phosphate
  modified_base 5: mod_base = OTHER; note = 2'-O-methyluridine-3'-phosphate
  modified_base 6: mod_base = OTHER; note = 2'-fluorocytidine-3'-phosphate
  modified_base 7: mod_base = OTHER; note = 2'-O-methylcytidine-3'-phosphate
  modified_base 8: mod_base = OTHER; note = 2'-fluoroadenosine-3'-phosphate
  modified_base 9: mod_base = OTHER; note = 2'-fluoroguanosine-3'-phosphate
  modified_base 10: mod_base = OTHER; note = 2'-O-methyladenosine-3'-phosphate
  modified_base 11: mod_base = OTHER; note = 2'-O-methylcytidine-3'-phosphate
  modified_base 12: mod_base = OTHER; note = 2'-O-methylguanosine-3'-phosphate
  modified_base 13: mod_base = OTHER; note = 2'-O-methylguanosine-3'-phosphate
  modified_base 14: mod_base = OTHER; note = 2'-fluorouridine-3'-phosphate
  modified_base 15: mod_base = OTHER; note = 2'-O-methyluridine-3'-phosphate
  modified_base 16: mod_base = OTHER; note = 2'-fluoroguanosine-3'-phosphate
  modified_base 17: mod_base = OTHER; note = 2'-O-methylcytidine-3'-phosphate
  modified_base 18: mod_base = OTHER; note = 2'-O-methylcytidine-3'-phosphate
  modified_base 19: mod_base = OTHER; note = 2'-O-methylcytidine-3'-phosphate
  modified_base 20: mod_base = OTHER; note = 2'-O-methyladenosine-3'-phosphate
  modified_base 21: mod_base = OTHER; note = 2'-O-methylguanosine-3'- phosphorothioate
  modified_base 22: mod_base = OTHER; note = 2'-O-methylguanosine-3'- phosphorothioate
  modified_base 23: mod_base = OTHER; note = 2'-O-methyluridine-3'-phosphate
atcatccagacggttgcccaggt

SEQ ID NO: 2736 - RNA, 21 nt, synthetic construct
  misc_feature 1..21: note = Description of Artificial Sequence: Synthetic oligonucleotide
  source 1..21: mol_type = other RNA
  modified_base 1: mod_base = OTHER; note = 2'-O-methylcytidine-3'- phosphorothioate
  modified_base 2: mod_base = OTHER; note = 2'-O-methylcytidine-3'- phosphorothioate
  modified_base 3: mod_base = OTHER; note = 2'-O-methyluridine-3'-phosphate
  modified_base 4: mod_base = OTHER; note = 2'-O-methylguanosine-3'-phosphate
  modified_base 5: mod_base = OTHER; note = 2'-O-methylguanosine-3'-phosphate
  modified_base 6: mod_base = OTHER; note = 2'-O-methylguanosine-3'-phosphate
  modified_base 7: mod_base = OTHER; note = 2'-fluorocytidine-3'-phosphate
  modified_base 8: mod_base = OTHER; note = 2'-O-methyladenosine-3'-phosphate
  modified_base 9: mod_base = OTHER; note = 2'-fluoroadenosine-3'-phosphate
  modified_base 10: mod_base = OTHER; note = 2'-fluorocytidine-3'-phosphate
  modified_base 11: mod_base = OTHER; note = 2'-fluorocytidine-3'-phosphate
  modified_base 12: mod_base = OTHER; note = 2'-O-methylguanosine-3'-phosphate
  modified_base 13: mod_base = OTHER; note = 2'-O-methyluridine-3'-phosphate
  modified_base 14: mod_base = OTHER; note = 2'-O-methylcytidine-3'-phosphate
  modified_base 15: mod_base = OTHER; note = 2'-O-methyluridine-3'-phosphate
  modified_base 16: mod_base = OTHER; note = 2'-O-methylguanosine-3'-phosphate
  modified_base 17: mod_base = OTHER; note = 2'-O-methylguanosine-3'-phosphate
  modified_base 18: mod_base = OTHER; note = 2'-O-methyladenosine-3'-phosphate
  modified_base 19: mod_base = OTHER; note = 2'-O-methyluridine-3'-phosphate
  modified_base 20: mod_base = OTHER; note = 2'-O-methylguanosine-3'-phosphate
  modified_base 21: mod_base = OTHER; note = 2'-O-methyladenosine-3'-phosphate attached to N-[tris(N-acetylgalactosamine-alkyl)-amidodecanoyl)]-4-hydr oxyprolinol Hyp-(N-acetylgalactosamine-alkyl)3
cctgggcaaccgtctggatga

SEQ ID NO: 2737 - RNA, 23 nt, synthetic construct
  misc_feature 1..23: note = Description of Artificial Sequence: Synthetic oligonucleotide
  source 1..23: mol_type = other RNA
  modified_base 1: mod_base = OTHER; note = 2'-O-methyluridine-3'-phosphorothioate
  modified_base 2: mod_base = OTHER; note = 2'-fluorocytidine-3'-phosphorothioate
  modified_base 3: mod_base = OTHER; note = 2'-O-methyladenosine-3'-phosphate
  modified_base 4: mod_base = OTHER; note = 2'-O-methyluridine-3'-phosphate
  modified_base 5: mod_base = OTHER; note = 2'-O-methylcytidine-3'-phosphate
  modified_base 6: mod_base = OTHER; note = 2'-fluorocytidine-3'-phosphate
  modified_base 7: mod_base = OTHER; note = 2'-O-methyladenosine-3'-phosphate
  modified_base 8: mod_base = OTHER; note = 2'-fluoroguanosine-3'-phosphate
  modified_base 9: mod_base = OTHER; note = 2'-fluoroadenosine-3'-phosphate
  modified_base 10: mod_base = OTHER; note = 2'-O-methylcytidine-3'-phosphate
  modified_base 11: mod_base = OTHER; note = 2'-O-methylguanosine-3'-phosphate
  modified_base 12: mod_base = OTHER; note = 2'-O-methylguanosine-3'-phosphate
  modified_base 13: mod_base = OTHER; note = 2'-O-methyluridine-3'-phosphate
  modified_base 14: mod_base = OTHER; note = 2'-fluorouridine-3'-phosphate
  modified_base 15: mod_base = OTHER; note = 2'-O-methylguanosine-3'-phosphate
  modified_base 16: mod_base = OTHER; note = 2'-fluorocytidine-3'-phosphate
  modified_base 17: mod_base = OTHER; note = 2'-O-methylcytidine-3'-phosphate
  modified_base 18: mod_base = OTHER; note = 2'-O-methylcytidine-3'-phosphate
  modified_base 19: mod_base = OTHER; note = 2'-O-methyladenosine-3'-phosphate
  modified_base 20: mod_base = OTHER; note = 2'-O-methylguanosine-3'-phosphate
  modified_base 21: mod_base = OTHER; note = 2'-O-methylguanosine-3'- phosphorothioate
  modified_base 22: mod_base = OTHER; note = 2'-O-methyluridine-3'-phosphorothioate
  modified_base 23: mod_base = OTHER; note = 2'-O-methyladenosine-3'-phosphate
tcatccagacggttgcccaggta

SEQ ID NO: 2738 - RNA, 21 nt, synthetic construct
  misc_feature 1..21: note = Description of Artificial Sequence: Synthetic oligonucleotide
  source 1..21: mol_type = other RNA
  modified_base 1: mod_base = OTHER; note = 2'-O-methylguanosine-3'- phosphorothioate
  modified_base 2: mod_base = OTHER; note = 2'-O-methylcytidine-3'- phosphorothioate
  modified_base 3: mod_base = OTHER; note = 2'-O-methyladenosine-3'-phosphate
  modified_base 4: mod_base = OTHER; note = 2'-O-methyladenosine-3'-phosphate
  modified_base 5: mod_base = OTHER; note = 2'-O-methyladenosine-3'-phosphate
  modified_base 6: mod_base = OTHER; note = 2'-O-methyluridine-3'-phosphate
  modified_base 7: mod_base = OTHER; note = 2'-fluoroguanosine-3'-phosphate
  modified_base 8: mod_base = OTHER; note = 2'-O-methyladenosine-3'-phosphate
  modified_base 9: mod_base = OTHER; note = 2'-fluorouridine-3'-phosphate
  modified_base 10: mod_base = OTHER; note = 2'-fluoroguanosine-3'-phosphate
  modified_base 11: mod_base = OTHER; note = 2'-fluoroadenosine-3'-phosphate
  modified_base 12: mod_base = OTHER; note = 2'-O-methyladenosine-3'-phosphate
  modified_base 13: mod_base = OTHER; note = 2'-O-methylguanosine-3'-phosphate
  modified_base 14: mod_base = OTHER; note = 2'-O-methyladenosine-3'-phosphate
  modified_base 15: mod_base = OTHER; note = 2'-O-methyladenosine-3'-phosphate
  modified_base 16: mod_base = OTHER; note = 2'-O-methyladenosine-3'-phosphate
  modified_base 17: mod_base = OTHER; note = 2'-O-methylcytidine-3'-phosphate
  modified_base 18: mod_base = OTHER; note = 2'-O-methyluridine-3'-phosphate
  modified_base 19: mod_base = OTHER; note = 2'-O-methyluridine-3'-phosphate
  modified_base 20: mod_base = OTHER; note = 2'-O-methyluridine-3'-phosphate
  modified_base 21: mod_base = OTHER; note = 2'-O-methylguanosine-3'-phosphate attached to N-[tris(N-acetylgalactosamine-alkyl)-amidodecanoyl)]-4-hydr oxyprolinol Hyp-(N-acetylgalactosamine-alkyl)3
gcaaatgatgaagaaactttg

SEQ ID NO: 2739 - RNA, 23 nt, synthetic construct
  misc_feature 1..23: note = Description of Artificial Sequence: Synthetic oligonucleotide
  source 1..23: mol_type = other RNA
  modified_base 1: mod_base = OTHER; note = 2'-O-methylcytidine-3'- phosphorothioate
  modified_base 2: mod_base = OTHER; note = 2'-fluoroadenosine-3'-phosphorothioate
  modified_base 3: mod_base = OTHER; note = 2'-O-methyladenosine-3'-phosphate
  modified_base 4: mod_base = OTHER; note = 2'-O-methyladenosine-3'-phosphate
  modified_base 5: mod_base = OTHER; note = 2'-O-methylguanosine-3'-phosphate
  modified_base 6: mod_base = OTHER; note = 2'-fluorouridine-3'-phosphate
  modified_base 7: mod_base = OTHER; note = 2'-O-methyluridine-3'-phosphate
  modified_base 8: mod_base = OTHER; note = 2'-fluorouridine-3'-phosphate
  modified_base 9: mod_base = OTHER; note = 2'-fluorocytidine-3'-phosphate
  modified_base 10: mod_base = OTHER; note = 2'-O-methyluridine-3'-phosphate
  modified_base 11: mod_base = OTHER; note = 2'-O-methyluridine-3'-phosphate
  modified_base 12: mod_base = OTHER; note = 2'-O-methylcytidine-3'-phosphate
  modified_base 13: mod_base = OTHER; note = 2'-O-methyladenosine-3'-phosphate
  modified_base 14: mod_base = OTHER; note = 2'-fluorouridine-3'-phosphate
  modified_base 15: mod_base = OTHER; note = 2'-O-methylcytidine-3'-phosphate
  modified_base 16: mod_base = OTHER; note = 2'-fluoroadenosine-3'-phosphate
  modified_base 17: mod_base = OTHER; note = 2'-O-methyluridine-3'-phosphate
  modified_base 18: mod_base = OTHER; note = 2'-O-methyluridine-3'-phosphate
  modified_base 19: mod_base = OTHER; note = 2'-O-methyluridine-3'-phosphate
  modified_base 20: mod_base = OTHER; note = 2'-O-methylguanosine-3'-phosphate
  modified_base 21: mod_base = OTHER; note = 2'-O-methylcytidine-3'- phosphorothioate
  modified_base 22: mod_base = OTHER; note = 2'-O-methylcytidine-3'- phosphorothioate
  modified_base 23: mod_base = OTHER; note = 2'-O-methylcytidine-3'-phosphate
caaagtttcttcatcatttgccc

SEQ ID NO: 2740 - RNA, 21 nt, synthetic construct
  misc_feature 1..21: note = Description of Artificial Sequence: Synthetic oligonucleotide
  source 1..21: mol_type = other RNA
  modified_base 1: mod_base = OTHER; note = 2'-O-methylcytidine-3'- phosphorothioate
  modified_base 2: mod_base = OTHER; note = 2'-O-methyladenosine-3'- phosphorothioate
  modified_base 3: mod_base = OTHER; note = 2'-O-methyladenosine-3'-phosphate
  modified_base 4: mod_base = OTHER; note = 2'-O-methyladenosine-3'-phosphate
  modified_base 5: mod_base = OTHER; note = 2'-O-methyluridine-3'-phosphate
  modified_base 6: mod_base = OTHER; note = 2'-O-methylguanosine-3'-phosphate
  modified_base 7: mod_base = OTHER; note = 2'-fluoroadenosine-3'-phosphate
  modified_base 8: mod_base = OTHER; note = 2'-O-methyluridine-3'-phosphate
  modified_base 9: mod_base = OTHER; note = 2'-fluoroguanosine-3'-phosphate
  modified_base 10: mod_base = OTHER; note = 2'-fluoroadenosine-3'-phosphate
  modified_base 11: mod_base = OTHER; note = 2'-fluoroadenosine-3'-phosphate
  modified_base 12: mod_base = OTHER; note = 2'-O-methylguanosine-3'-phosphate
  modified_base 13: mod_base = OTHER; note = 2'-O-methyladenosine-3'-phosphate
  modified_base 14: mod_base = OTHER; note = 2'-O-methyladenosine-3'-phosphate
  modified_base 15: mod_base = OTHER; note = 2'-O-methyladenosine-3'-phosphate
  modified_base 16: mod_base = OTHER; note = 2'-O-methylcytidine-3'-phosphate
  modified_base 17: mod_base = OTHER; note = 2'-O-methyluridine-3'-phosphate
  modified_base 18: mod_base = OTHER; note = 2'-O-methyluridine-3'-phosphate
  modified_base 19: mod_base = OTHER; note = 2'-O-methyluridine-3'-phosphate
  modified_base 20: mod_base = OTHER; note = 2'-O-methylguanosine-3'-phosphate
  modified_base 21: mod_base = OTHER; note = 2'-O-methylguanosine-3'-phosphate attached to N-[tris(N-acetylgalactosamine-alkyl)-amidodecanoyl)]-4-hydr oxyprolinol Hyp-(N-acetylgalactosamine-alkyl)3
caaatgatgaagaaactttgg

SEQ ID NO: 2741 - RNA, 23 nt, synthetic construct
  misc_feature 1..23: note = Description of Artificial Sequence: Synthetic oligonucleotide
  source 1..23: mol_type = other RNA
  modified_base 1: mod_base = OTHER; note = 2'-O-methylcytidine-3'- phosphorothioate
  modified_base 2: mod_base = OTHER; note = 2'-fluorocytidine-3'-phosphorothioate
  modified_base 3: mod_base = OTHER; note = 2'-O-methyladenosine-3'-phosphate
  modified_base 4: mod_base = OTHER; note = 2'-O-methyladenosine-3'-phosphate
  modified_base 5: mod_base = OTHER; note = 2'-O-methyladenosine-3'-phosphate
  modified_base 6: mod_base = OTHER; note = 2'-fluoroguanosine-3'-phosphate
  modified_base 7: mod_base = OTHER; note = 2'-O-methyluridine-3'-phosphate
  modified_base 8: mod_base = OTHER; note = 2'-fluorouridine-3'-phosphate
  modified_base 9: mod_base = OTHER; note = 2'-fluorouridine-3'-phosphate
  modified_base 10: mod_base = OTHER; note = 2'-O-methylcytidine-3'-phosphate
  modified_base 11: mod_base = OTHER; note = 2'-O-methyluridine-3'-phosphate
  modified_base 12: mod_base = OTHER; note = 2'-O-methyluridine-3'-phosphate
  modified_base 13: mod_base = OTHER; note = 2'-O-methylcytidine-3'-phosphate
  modified_base 14: mod_base = OTHER; note = 2'-fluoroadenosine-3'-phosphate
  modified_base 15: mod_base = OTHER; note = 2'-O-methyluridine-3'-phosphate
  modified_base 16: mod_base = OTHER; note = 2'-fluorocytidine-3'-phosphate
  modified_base 17: mod_base = OTHER; note = 2'-O-methyladenosine-3'-phosphate
  modified_base 18: mod_base = OTHER; note = 2'-O-methyluridine-3'-phosphate
  modified_base 19: mod_base = OTHER; note = 2'-O-methyluridine-3'-phosphate
  modified_base 20: mod_base = OTHER; note = 2'-O-methyluridine-3'-phosphate
  modified_base 21: mod_base = OTHER; note = 2'-O-methylguanosine-3'- phosphorothioate
  modified_base 22: mod_base = OTHER; note = 2'-O-methylcytidine-3'- phosphorothioate
  modified_base 23: mod_base = OTHER; note = 2'-O-methylcytidine-3'-phosphate
ccaaagtttcttcatcatttgcc

SEQ ID NO: 2742 - RNA, 21 nt, synthetic construct
  misc_feature 1..21: note = Description of Artificial Sequence: Synthetic oligonucleotide
  source 1..21: mol_type = other RNA
  modified_base 1: mod_base = OTHER; note = 2'-O-methyluridine-3'-phosphorothioate
  modified_base 2: mod_base = OTHER; note = 2'-O-methylguanosine-3'- phosphorothioate
  modified_base 3: mod_base = OTHER; note = 2'-O-methylguanosine-3'-phosphate
  modified_base 4: mod_base = OTHER; note = 2'-O-methylguanosine-3'-phosphate
  modified_base 5: mod_base = OTHER; note = 2'-O-methylguanosine-3'-phosphate
  modified_base 6: mod_base = OTHER; note = 2'-O-methylcytidine-3'-phosphate
  modified_base 7: mod_base = OTHER; note = 2'-fluoroadenosine-3'-phosphate
  modified_base 8: mod_base = OTHER; note = 2'-O-methyladenosine-3'-phosphate
  modified_base 9: mod_base = OTHER; note = 2'-fluoroadenosine-3'-phosphate
  modified_base 10: mod_base = OTHER; note = 2'-fluorouridine-3'-phosphate
  modified_base 11: mod_base = OTHER; note = 2'-fluoroguanosine-3'-phosphate
  modified_base 12: mod_base = OTHER; note = 2'-O-methyladenosine-3'-phosphate
  modified_base 13: mod_base = OTHER; note = 2'-O-methyluridine-3'-phosphate
  modified_base 14: mod_base = OTHER; note = 2'-O-methylguanosine-3'-phosphate
  modified_base 15: mod_base = OTHER; note = 2'-O-methyladenosine-3'-phosphate
  modified_base 16: mod_base = OTHER; note = 2'-O-methyladenosine-3'-phosphate
  modified_base 17: mod_base = OTHER; note = 2'-O-methylguanosine-3'-phosphate
  modified_base 18: mod_base = OTHER; note = 2'-O-methyladenosine-3'-phosphate
  modified_base 19: mod_base = OTHER; note = 2'-O-methyladenosine-3'-phosphate
  modified_base 20: mod_base = OTHER; note = 2'-O-methyladenosine-3'-phosphate
  modified_base 21: mod_base = OTHER; note = 2'-O-methylcytidine-3'-phosphate attached to N-[tris(N-acetylgalactosamine-alkyl)-amidodecanoyl)]-4-hydr oxyprolinol Hyp-(N-acetylgalactosamine-alkyl)3
tggggcaaatgatgaagaaac

SEQ ID NO: 2743 - RNA, 23 nt, synthetic construct
  misc_feature 1..23: note = Description of Artificial Sequence: Synthetic oligonucleotide
  source 1..23: mol_type = other RNA
  modified_base 1: mod_base = OTHER; note = 2'-O-methylguanosine-3'- phosphorothioate
  modified_base 2: mod_base = OTHER; note = 2'-fluorouridine -3'-phosphorothioate
  modified_base 3: mod_base = OTHER; note = 2'-O-methyluridine-3'-phosphate
  modified_base 4: mod_base = OTHER; note = 2'-O-methyluridine-3'-phosphate
  modified_base 5: mod_base = OTHER; note = 2'-O-methylcytidine-3'-phosphate
  modified_base 6: mod_base = OTHER; note = 2'-fluorouridine-3'-phosphate
  modified_base 7: mod_base = OTHER; note = 2'-O-methyluridine-3'-phosphate
  modified_base 8: mod_base = OTHER; note = 2'-fluorocytidine-3'-phosphate
  modified_base 9: mod_base = OTHER; note = 2'-fluoroadenosine-3'-phosphate
  modified_base 10: mod_base = OTHER; note = 2'-O-methyluridine-3'-phosphate
  modified_base 11: mod_base = OTHER; note = 2'-O-methylcytidine-3'-phosphate
  modified_base 12: mod_base = OTHER; note = 2'-O-methyladenosine-3'-phosphate
  modified_base 13: mod_base = OTHER; note = 2'-O-methyluridine-3'-phosphate
  modified_base 14: mod_base = OTHER; note = 2'-fluorouridine-3'-phosphate
  modified_base 15: mod_base = OTHER; note = 2'-O-methyluridine-3'-phosphate
  modified_base 16: mod_base = OTHER; note = 2'-fluoroguanosine-3'-phosphate
  modified_base 17: mod_base = OTHER; note = 2'-O-methylcytidine-3'-phosphate
  modified_base 18: mod_base = OTHER; note = 2'-O-methylcytidine-3'-phosphate
  modified_base 19: mod_base = OTHER; note = 2'-O-methylcytidine-3'-phosphate
  modified_base 20: mod_base = OTHER; note = 2'-O-methylcytidine-3'-phosphate
  modified_base 21: mod_base = OTHER; note = 2'-O-methyladenosine-3'- phosphorothioate
  modified_base 22: mod_base = OTHER; note = 2'-O-methylguanosine-3'- phosphorothioate
  modified_base 23: mod_base = OTHER; note = 2'-O-methyladenosine-3'-phosphate
gtttcttcatcatttgccccaga

SEQ ID NO: 2744 - RNA, 21 nt, synthetic construct
  misc_feature 1..21: note = Description of Artificial Sequence: Synthetic oligonucleotide
  source 1..21: mol_type = other RNA
  modified_base 1: mod_base = OTHER; note = 2'-O-methylcytidine-3'- phosphorothioate
  modified_base 2: mod_base = OTHER; note = 2'-O-methyluridine-3'-phosphorothioate
  modified_base 3: mod_base = OTHER; note = 2'-O-methylguanosine-3'-phosphate
  modified_base 4: mod_base = OTHER; note = 2'-O-methylguanosine-3'-phosphate
  modified_base 5: mod_base = OTHER; note = 2'-O-methylguanosine-3'-phosphate
  modified_base 6: mod_base = OTHER; note = 2'-O-methylguanosine-3'-phosphate
  modified_base 7: mod_base = OTHER; note = 2'-fluorocytidine-3'-phosphate
  modified_base 8: mod_base = OTHER; note = 2'-O-methyladenosine-3'-phosphate
  modified_base 9: mod_base = OTHER; note = 2'-fluoroadenosine-3'-phosphate
  modified_base 10: mod_base = OTHER; note = 2'-fluoroadenosine-3'-phosphate
  modified_base 11: mod_base = OTHER; note = 2'-fluorouridine-3'-phosphate
  modified_base 12: mod_base = OTHER; note = 2'-O-methylguanosine-3'-phosphate
  modified_base 13: mod_base = OTHER; note = 2'-O-methyladenosine-3'-phosphate
  modified_base 14: mod_base = OTHER; note = 2'-O-methyluridine-3'-phosphate
  modified_base 15: mod_base = OTHER; note = 2'-O-methylguanosine-3'-phosphate
  modified_base 16: mod_base = OTHER; note = 2'-O-methyladenosine-3'-phosphate
  modified_base 17: mod_base = OTHER; note = 2'-O-methyladenosine-3'-phosphate
  modified_base 18: mod_base = OTHER; note = 2'-O-methylguanosine-3'-phosphate
  modified_base 19: mod_base = OTHER; note = 2'-O-methyladenosine-3'-phosphate
  modified_base 20: mod_base = OTHER; note = 2'-O-methyladenosine-3'-phosphate
  modified_base 21: mod_base = OTHER; note = 2'-O-methyladenosine-3'-phosphate attached to N-[tris(N-acetylgalactosamine-alkyl)-amidodecanoyl)]-4-hydr oxyprolinol Hyp-(N-acetylgalactosamine-alkyl)3
ctggggcaaatgatgaagaaa

SEQ ID NO: 2745 - RNA, 23 nt, synthetic construct
  misc_feature 1..23: note = Description of Artificial Sequence: Synthetic oligonucleotide
  source 1..23: mol_type = other RNA
  modified_base 1: mod_base = OTHER; note = 2'-O-methyluridine-3'-phosphorothioate
  modified_base 2: mod_base = OTHER; note = 2'-fluorouridine -3'-phosphorothioate
  modified_base 3: mod_base = OTHER; note = 2'-O-methyluridine-3'-phosphate
  modified_base 4: mod_base = OTHER; note = 2'-O-methylcytidine-3'-phosphate
  modified_base 5: mod_base = OTHER; note = 2'-O-methyluridine-3'-phosphate
  modified_base 6: mod_base = OTHER; note = 2'-fluorouridine-3'-phosphate
  modified_base 7: mod_base = OTHER; note = 2'-O-methylcytidine-3'-phosphate
  modified_base 8: mod_base = OTHER; note = 2'-fluoroadenosine-3'-phosphate
  modified_base 9: mod_base = OTHER; note = 2'-fluorouridine-3'-phosphate
  modified_base 10: mod_base = OTHER; note = 2'-O-methylcytidine-3'-phosphate
  modified_base 11: mod_base = OTHER; note = 2'-O-methyladenosine-3'-phosphate
  modified_base 12: mod_base = OTHER; note = 2'-O-methyluridine-3'-phosphate
  modified_base 13: mod_base = OTHER; note = 2'-O-methyluridine-3'-phosphate
  modified_base 14: mod_base = OTHER; note = 2'-fluorouridine-3'-phosphate
  modified_base 15: mod_base = OTHER; note = 2'-O-methylguanosine-3'-phosphate
  modified_base 16: mod_base = OTHER; note = 2'-fluorocytidine-3'-phosphate
  modified_base 17: mod_base = OTHER; note = 2'-O-methylcytidine-3'-phosphate
  modified_base 18: mod_base = OTHER; note = 2'-O-methylcytidine-3'-phosphate
  modified_base 19: mod_base = OTHER; note = 2'-O-methylcytidine-3'-phosphate
  modified_base 20: mod_base = OTHER; note = 2'-O-methyladenosine-3'-phosphate
  modified_base 21: mod_base = OTHER; note = 2'-O-methylguanosine-3'- phosphorothioate
  modified_base 22: mod_base = OTHER; note = 2'-O-methyladenosine-3'- phosphorothioate
  modified_base 23: mod_base = OTHER; note = 2'-O-methylcytidine-3'-phosphate
tttcttcatcatttgccccagac

SEQ ID NO: 2746 - RNA, 21 nt, synthetic construct
  misc_feature 1..21: note = Description of Artificial Sequence: Synthetic oligonucleotide
  source 1..21: mol_type = other RNA
  modified_base 1: mod_base = OTHER; note = 2'-O-methylcytidine-3'- phosphorothioate
  modified_base 2: mod_base = OTHER; note = 2'-O-methylcytidine-3'- phosphorothioate
  modified_base 3: mod_base = OTHER; note = 2'-O-methyladenosine-3'-phosphate
  modified_base 4: mod_base = OTHER; note = 2'-O-methyladenosine-3'-phosphate
  modified_base 5: mod_base = OTHER; note = 2'-O-methylguanosine-3'-phosphate
  modified_base 6: mod_base = OTHER; note = 2'-O-methylguanosine-3'-phosphate
  modified_base 7: mod_base = OTHER; note = 2'-fluorocytidine-3'-phosphate
  modified_base 8: mod_base = OTHER; note = 2'-O-methyluridine-3'-phosphate
  modified_base 9: mod_base = OTHER; note = 2'-fluoroguanosine-3'-phosphate
  modified_base 10: mod_base = OTHER; note = 2'-fluorouridine-3'-phosphate
  modified_base 11: mod_base = OTHER; note = 2'-fluoroguanosine-3'-phosphate
  modified_base 12: mod_base = OTHER; note = 2'-O-methyluridine-3'-phosphate
  modified_base 13: mod_base = OTHER; note = 2'-O-methyluridine-3'-phosphate
  modified_base 14: mod_base = OTHER; note = 2'-O-methyluridine-3'-phosphate
  modified_base 15: mod_base = OTHER; note = 2'-O-methylguanosine-3'-phosphate
  modified_base 16: mod_base = OTHER; note = 2'-O-methyluridine-3'-phosphate
  modified_base 17: mod_base = OTHER; note = 2'-O-methylguanosine-3'-phosphate
  modified_base 18: mod_base = OTHER; note = 2'-O-methylguanosine-3'-phosphate
  modified_base 19: mod_base = OTHER; note = 2'-O-methylguanosine-3'-phosphate
  modified_base 20: mod_base = OTHER; note = 2'-O-methylguanosine-3'-phosphate
  modified_base 21: mod_base = OTHER; note = 2'-O-methyladenosine-3'-phosphate attached to N-[tris(N-acetylgalactosamine-alkyl)-amidodecanoyl)]-4-hydr oxyprolinol Hyp-(N-acetylgalactosamine-alkyl)3
ccaaggctgtgtttgtgggga

SEQ ID NO: 2747 - RNA, 23 nt, synthetic construct
  misc_feature 1..23: note = Description of Artificial Sequence: Synthetic oligonucleotide
  source 1..23: mol_type = other RNA
  modified_base 1: mod_base = OTHER; note = 2'-O-methyluridine-3'-phosphorothioate
  modified_base 2: mod_base = OTHER; note = 2'-fluorocytidine-3'-phosphorothioate
  modified_base 3: mod_base = OTHER; note = 2'-O-methylcytidine-3'-phosphate
  modified_base 4: mod_base = OTHER; note = 2'-O-methylcytidine-3'-phosphate
  modified_base 5: mod_base = OTHER; note = 2'-O-methylcytidine-3'-phosphate
  modified_base 6: mod_base = OTHER; note = 2'-fluoroadenosine-3'-phosphate
  modified_base 7: mod_base = OTHER; note = 2'-O-methylcytidine-3'-phosphate
  modified_base 8: mod_base = OTHER; note = 2'-fluoroadenosine-3'-phosphate
  modified_base 9: mod_base = OTHER; note = 2'-fluoroadenosine-3'-phosphate
  modified_base 10: mod_base = OTHER; note = 2'-O-methyladenosine-3'-phosphate
  modified_base 11: mod_base = OTHER; note = 2'-O-methylcytidine-3'-phosphate
  modified_base 12: mod_base = OTHER; note = 2'-O-methyladenosine-3'-phosphate
  modified_base 13: mod_base = OTHER; note = 2'-O-methylcytidine-3'-phosphate
  modified_base 14: mod_base = OTHER; note = 2'-fluoroadenosine-3'-phosphate
  modified_base 15: mod_base = OTHER; note = 2'-O-methylguanosine-3'-phosphate
  modified_base 16: mod_base = OTHER; note = 2'-fluorocytidine-3'-phosphate
  modified_base 17: mod_base = OTHER; note = 2'-O-methylcytidine-3'-phosphate
  modified_base 18: mod_base = OTHER; note = 2'-O-methyluridine-3'-phosphate
  modified_base 19: mod_base = OTHER; note = 2'-O-methyluridine-3'-phosphate
  modified_base 20: mod_base = OTHER; note = 2'-O-methylguanosine-3'-phosphate
  modified_base 21: mod_base = OTHER; note = 2'-O-methylguanosine-3'- phosphorothioate
  modified_base 22: mod_base = OTHER; note = 2'-O-methylcytidine-3'- phosphorothioate
  modified_base 23: mod_base = OTHER; note = 2'-O-methylguanosine-3'-phosphate
tccccacaaacacagccttggcg

SEQ ID NO: 2748 - RNA, 21 nt, synthetic construct
  misc_feature 1..21: note = Description of Artificial Sequence: Synthetic oligonucleotide
  source 1..21: mol_type = other RNA
  modified_base 1: mod_base = OTHER; note = 2'-O-methylcytidine-3'- phosphorothioate
  modified_base 2: mod_base = OTHER; note = 2'-O-methyladenosine-3'- phosphorothioate
  modified_base 3: mod_base = OTHER; note = 2'-O-methyladenosine-3'-phosphate
  modified_base 4: mod_base = OTHER; note = 2'-O-methylguanosine-3'-phosphate
  modified_base 5: mod_base = OTHER; note = 2'-O-methylguanosine-3'-phosphate
  modified_base 6: mod_base = OTHER; note = 2'-O-methylcytidine-3'-phosphate
  modified_base 7: mod_base = OTHER; note = 2'-fluorouridine-3'-phosphate
  modified_base 8: mod_base = OTHER; note = 2'-O-methylguanosine-3'-phosphate
  modified_base 9: mod_base = OTHER; note = 2'-fluorouridine-3'-phosphate
  modified_base 10: mod_base = OTHER; note = 2'-fluoroguanosine-3'-phosphate
  modified_base 11: mod_base = OTHER; note = 2'-fluorouridine-3'-phosphate
  modified_base 12: mod_base = OTHER; note = 2'-O-methyluridine-3'-phosphate
  modified_base 13: mod_base = OTHER; note = 2'-O-methyluridine-3'-phosphate
  modified_base 14: mod_base = OTHER; note = 2'-O-methylguanosine-3'-phosphate
  modified_base 15: mod_base = OTHER; note = 2'-O-methyluridine-3'-phosphate
  modified_base 16: mod_base = OTHER; note = 2'-O-methylguanosine-3'-phosphate
  modified_base 17: mod_base = OTHER; note = 2'-O-methylguanosine-3'-phosphate
  modified_base 18: mod_base = OTHER; note = 2'-O-methylguanosine-3'-phosphate
  modified_base 19: mod_base = OTHER; note = 2'-O-methylguanosine-3'-phosphate
  modified_base 20: mod_base = OTHER; note = 2'-O-methyladenosine-3'-phosphate
  modified_base 21: mod_base = OTHER; note = 2'-O-methylguanosine-3'-phosphate attached to N-[tris(N-acetylgalactosamine-alkyl)-amidodecanoyl)]-4-hydr oxyprolinol Hyp-(N-acetylgalactosamine-alkyl)3
caaggctgtgtttgtggggag

SEQ ID NO: 2749 - RNA, 23 nt, synthetic construct
  misc_feature 1..23: note = Description of Artificial Sequence: Synthetic oligonucleotide
  source 1..23: mol_type = other RNA
  modified_base 1: mod_base = OTHER; note = 2'-O-methylcytidine-3'- phosphorothioate
  modified_base 2: mod_base = OTHER; note = 2'-fluorouridine -3'-phosphorothioate
  modified_base 3: mod_base = OTHER; note = 2'-O-methylcytidine-3'-phosphate
  modified_base 4: mod_base = OTHER; note = 2'-O-methylcytidine-3'-phosphate
  modified_base 5: mod_base = OTHER; note = 2'-O-methylcytidine-3'-phosphate
  modified_base 6: mod_base = OTHER; note = 2'-fluorocytidine-3'-phosphate
  modified_base 7: mod_base = OTHER; note = 2'-O-methyladenosine-3'-phosphate
  modified_base 8: mod_base = OTHER; note = 2'-fluorocytidine-3'-phosphate
  modified_base 9: mod_base = OTHER; note = 2'-fluoroadenosine-3'-phosphate
  modified_base 10: mod_base = OTHER; note = 2'-O-methyladenosine-3'-phosphate
  modified_base 11: mod_base = OTHER; note = 2'-O-methyladenosine-3'-phosphate
  modified_base 12: mod_base = OTHER; note = 2'-O-methylcytidine-3'-phosphate
  modified_base 13: mod_base = OTHER; note = 2'-O-methyladenosine-3'-phosphate
  modified_base 14: mod_base = OTHER; note = 2'-fluorocytidine-3'-phosphate
  modified_base 15: mod_base = OTHER; note = 2'-O-methyladenosine-3'-phosphate
  modified_base 16: mod_base = OTHER; note = 2'-fluoroguanosine-3'-phosphate
  modified_base 17: mod_base = OTHER; note = 2'-O-methylcytidine-3'-phosphate
  modified_base 18: mod_base = OTHER; note = 2'-O-methylcytidine-3'-phosphate
  modified_base 19: mod_base = OTHER; note = 2'-O-methyluridine-3'-phosphate
  modified_base 20: mod_base = OTHER; note = 2'-O-methyluridine-3'-phosphate
  modified_base 21: mod_base = OTHER; note = 2'-O-methylguanosine-3'- phosphorothioate
  modified_base 22: mod_base = OTHER; note = 2'-O-methylguanosine-3'- phosphorothioate
  modified_base 23: mod_base = OTHER; note = 2'-O-methylcytidine-3'-phosphate
ctccccacaaacacagccttggc

SEQ ID NO: 2750 - RNA, 21 nt, synthetic construct
  misc_feature 1..21: note = Description of Artificial Sequence: Synthetic oligonucleotide
  source 1..21: mol_type = other RNA
  modified_base 1: mod_base = OTHER; note = 2'-O-methylguanosine-3'- phosphorothioate
  modified_base 2: mod_base = OTHER; note = 2'-O-methylguanosine-3'- phosphorothioate
  modified_base 3: mod_base = OTHER; note = 2'-O-methylcytidine-3'-phosphate
  modified_base 4: mod_base = OTHER; note = 2'-O-methylguanosine-3'-phosphate
  modified_base 5: mod_base = OTHER; note = 2'-O-methylcytidine-3'-phosphate
  modified_base 6: mod_base = OTHER; note = 2'-O-methylcytidine-3'-phosphate
  modified_base 7: mod_base = OTHER; note = 2'-fluoroadenosine-3'-phosphate
  modified_base 8: mod_base = OTHER; note = 2'-O-methyladenosine-3'-phosphate
  modified_base 9: mod_base = OTHER; note = 2'-fluoroguanosine-3'-phosphate
  modified_base 10: mod_base = OTHER; note = 2'-fluoroguanosine-3'-phosphate
  modified_base 11: mod_base = OTHER; note = 2'-fluorocytidine-3'-phosphate
  modified_base 12: mod_base = OTHER; note = 2'-O-methyluridine-3'-phosphate
  modified_base 13: mod_base = OTHER; note = 2'-O-methylguanosine-3'-phosphate
  modified_base 14: mod_base = OTHER; note = 2'-O-methyluridine-3'-phosphate
  modified_base 15: mod_base = OTHER; note = 2'-O-methylguanosine-3'-phosphate
  modified_base 16: mod_base = OTHER; note = 2'-O-methyluridine-3'-phosphate
  modified_base 17: mod_base = OTHER; note = 2'-O-methyluridine-3'-phosphate
  modified_base 18: mod_base = OTHER; note = 2'-O-methyluridine-3'-phosphate
  modified_base 19: mod_base = OTHER; note = 2'-O-methylguanosine-3'-phosphate
  modified_base 20: mod_base = OTHER; note = 2'-O-methyluridine-3'-phosphate
  modified_base 21: mod_base = OTHER; note = 2'-O-methylguanosine-3'-phosphate attached to N-[tris(N-acetylgalactosamine-alkyl)-amidodecanoyl)]-4-hydr oxyprolinol Hyp-(N-acetylgalactosamine-alkyl)3
ggcgccaaggctgtgtttgtg

SEQ ID NO: 2751 - RNA, 23 nt, synthetic construct
  misc_feature 1..23: note = Description of Artificial Sequence: Synthetic oligonucleotide
  source 1..23: mol_type = other RNA
  modified_base 1: mod_base = OTHER; note = 2'-O-methylcytidine-3'- phosphorothioate
  modified_base 2: mod_base = OTHER; note = 2'-fluoroadenosine-3'-phosphorothioate
  modified_base 3: mod_base = OTHER; note = 2'-O-methylcytidine-3'-phosphate
  modified_base 4: mod_base = OTHER; note = 2'-O-methyladenosine-3'-phosphate
  modified_base 5: mod_base = OTHER; note = 2'-O-methyladenosine-3'-phosphate
  modified_base 6: mod_base = OTHER; note = 2'-fluoroadenosine-3'-phosphate
  modified_base 7: mod_base = OTHER; note = 2'-O-methylcytidine-3'-phosphate
  modified_base 8: mod_base = OTHER; note = 2'-fluoroadenosine-3'-phosphate
  modified_base 9: mod_base = OTHER; note = 2'-fluorocytidine-3'-phosphate
  modified_base 10: mod_base = OTHER; note = 2'-O-methyladenosine-3'-phosphate
  modified_base 11: mod_base = OTHER; note = 2'-O-methylguanosine-3'-phosphate
  modified_base 12: mod_base = OTHER; note = 2'-O-methylcytidine-3'-phosphate
  modified_base 13: mod_base = OTHER; note = 2'-O-methylcytidine-3'-phosphate
  modified_base 14: mod_base = OTHER; note = 2'-fluorouridine-3'-phosphate
  modified_base 15: mod_base = OTHER; note = 2'-O-methyluridine-3'-phosphate
  modified_base 16: mod_base = OTHER; note = 2'-fluoroguanosine-3'-phosphate
  modified_base 17: mod_base = OTHER; note = 2'-O-methylguanosine-3'-phosphate
  modified_base 18: mod_base = OTHER; note = 2'-O-methylcytidine-3'-phosphate
  modified_base 19: mod_base = OTHER; note = 2'-O-methylguanosine-3'-phosphate
  modified_base 20: mod_base = OTHER; note = 2'-O-methylcytidine-3'-phosphate
  modified_base 21: mod_base = OTHER; note = 2'-O-methylcytidine-3'- phosphorothioate
  modified_base 22: mod_base = OTHER; note = 2'-O-methyladenosine-3'- phosphorothioate
  modified_base 23: mod_base = OTHER; note = 2'-O-methyladenosine-3'-phosphate
cacaaacacagccttggcgccaa

SEQ ID NO: 2752 - RNA, 21 nt, synthetic construct
  misc_feature 1..21: note = Description of Artificial Sequence: Synthetic oligonucleotide
  source 1..21: mol_type = other RNA
  modified_base 1: mod_base = OTHER; note = 2'-O-methyluridine-3'-phosphorothioate
  modified_base 2: mod_base = OTHER; note = 2'-O-methylguanosine-3'- phosphorothioate
  modified_base 3: mod_base = OTHER; note = 2'-O-methylguanosine-3'-phosphate
  modified_base 4: mod_base = OTHER; note = 2'-O-methylcytidine-3'-phosphate
  modified_base 5: mod_base = OTHER; note = 2'-O-methylguanosine-3'-phosphate
  modified_base 6: mod_base = OTHER; note = 2'-O-methylcytidine-3'-phosphate
  modified_base 7: mod_base = OTHER; note = 2'-fluorocytidine-3'-phosphate
  modified_base 8: mod_base = OTHER; note = 2'-O-methyladenosine-3'-phosphate
  modified_base 9: mod_base = OTHER; note = 2'-fluoroadenosine-3'-phosphate
  modified_base 10: mod_base = OTHER; note = 2'-fluoroguanosine-3'-phosphate
  modified_base 11: mod_base = OTHER; note = 2'-fluoroguanosine-3'-phosphate
  modified_base 12: mod_base = OTHER; note = 2'-O-methylcytidine-3'-phosphate
  modified_base 13: mod_base = OTHER; note = 2'-O-methyluridine-3'-phosphate
  modified_base 14: mod_base = OTHER; note = 2'-O-methylguanosine-3'-phosphate
  modified_base 15: mod_base = OTHER; note = 2'-O-methyluridine-3'-phosphate
  modified_base 16: mod_base = OTHER; note = 2'-O-methylguanosine-3'-phosphate
  modified_base 17: mod_base = OTHER; note = 2'-O-methyluridine-3'-phosphate
  modified_base 18: mod_base = OTHER; note = 2'-O-methyluridine-3'-phosphate
  modified_base 19: mod_base = OTHER; note = 2'-O-methyluridine-3'-phosphate
  modified_base 20: mod_base = OTHER; note = 2'-O-methylguanosine-3'-phosphate
  modified_base 21: mod_base = OTHER; note = 2'-O-methyluridine-3'-phosphate attached to N-[tris(N-acetylgalactosamine-alkyl)-amidodecanoyl)]-4-hydr oxyprolinol Hyp-(N-acetylgalactosamine-alkyl)3
tggcgccaaggctgtgtttgt

SEQ ID NO: 2753 - RNA, 23 nt, synthetic construct
  misc_feature 1..23: note = Description of Artificial Sequence: Synthetic oligonucleotide
  source 1..23: mol_type = other RNA
  modified_base 1: mod_base = OTHER; note = 2'-O-methyladenosine-3'- phosphorothioate
  modified_base 2: mod_base = OTHER; note = 2'-fluorocytidine-3'-phosphorothioate
  modified_base 3: mod_base = OTHER; note = 2'-O-methyladenosine-3'-phosphate
  modified_base 4: mod_base = OTHER; note = 2'-O-methyladenosine-3'-phosphate
  modified_base 5: mod_base = OTHER; note = 2'-O-methyladenosine-3'-phosphate
  modified_base 6: mod_base = OTHER; note = 2'-fluorocytidine-3'-phosphate
  modified_base 7: mod_base = OTHER; note = 2'-O-methyladenosine-3'-phosphate
  modified_base 8: mod_base = OTHER; note = 2'-fluorocytidine-3'-phosphate
  modified_base 9: mod_base = OTHER; note = 2'-fluoroadenosine-3'-phosphate
  modified_base 10: mod_base = OTHER; note = 2'-O-methylguanosine-3'-phosphate
  modified_base 11: mod_base = OTHER; note = 2'-O-methylcytidine-3'-phosphate
  modified_base 12: mod_base = OTHER; note = 2'-O-methylcytidine-3'-phosphate
  modified_base 13: mod_base = OTHER; note = 2'-O-methyluridine-3'-phosphate
  modified_base 14: mod_base = OTHER; note = 2'-fluorouridine-3'-phosphate
  modified_base 15: mod_base = OTHER; note = 2'-O-methylguanosine-3'-phosphate
  modified_base 16: mod_base = OTHER; note = 2'-fluoroguanosine-3'-phosphate
  modified_base 17: mod_base = OTHER; note = 2'-O-methylcytidine-3'-phosphate
  modified_base 18: mod_base = OTHER; note = 2'-O-methylguanosine-3'-phosphate
  modified_base 19: mod_base = OTHER; note = 2'-O-methylcytidine-3'-phosphate
  modified_base 20: mod_base = OTHER; note = 2'-O-methylcytidine-3'-phosphate
  modified_base 21: mod_base = OTHER; note = 2'-O-methyladenosine-3'- phosphorothioate
  modified_base 22: mod_base = OTHER; note = 2'-O-methyladenosine-3'- phosphorothioate
  modified_base 23: mod_base = OTHER; note = 2'-O-methylguanosine-3'-phosphate
acaaacacagccttggcgccaag

SEQ ID NO: 2754 - RNA, 21 nt, synthetic construct
  misc_feature 1..21: note = Description of Artificial Sequence: Synthetic oligonucleotide
  source 1..21: mol_type = other RNA
  modified_base 1: mod_base = OTHER; note = 2'-O-methyladenosine-3'- phosphorothioate
  modified_base 2: mod_base = OTHER; note = 2'-O-methylcytidine-3'- phosphorothioate
  modified_base 3: mod_base = OTHER; note = 2'-O-methyluridine-3'-phosphate
  modified_base 4: mod_base = OTHER; note = 2'-O-methylguanosine-3'-phosphate
  modified_base 5: mod_base = OTHER; note = 2'-O-methylcytidine-3'-phosphate
  modified_base 6: mod_base = OTHER; note = 2'-O-methylcytidine-3'-phosphate
  modified_base 7: mod_base = OTHER; note = 2'-fluoroguanosine-3'-phosphate
  modified_base 8: mod_base = OTHER; note = 2'-O-methylcytidine-3'-phosphate
  modified_base 9: mod_base = OTHER; note = 2'-fluorocytidine-3'-phosphate
  modified_base 10: mod_base = OTHER; note = 2'-fluoroadenosine-3'-phosphate
  modified_base 11: mod_base = OTHER; note = 2'-fluorocytidine-3'-phosphate
  modified_base 12: mod_base = OTHER; note = 2'-O-methyladenosine-3'-phosphate
  modified_base 13: mod_base = OTHER; note = 2'-O-methyladenosine-3'-phosphate
  modified_base 14: mod_base = OTHER; note = 2'-O-methylcytidine-3'-phosphate
  modified_base 15: mod_base = OTHER; note = 2'-O-methyluridine-3'-phosphate
  modified_base 16: mod_base = OTHER; note = 2'-O-methylcytidine-3'-phosphate
  modified_base 17: mod_base = OTHER; note = 2'-O-methyladenosine-3'-phosphate
  modified_base 18: mod_base = OTHER; note = 2'-O-methylguanosine-3'-phosphate
  modified_base 19: mod_base = OTHER; note = 2'-O-methylguanosine-3'-phosphate
  modified_base 20: mod_base = OTHER; note = 2'-O-methyladenosine-3'-phosphate
  modified_base 21: mod_base = OTHER; note = 2'-O-methyluridine-3'-phosphate attached to N-[tris(N-acetylgalactosamine-alkyl)-amidodecanoyl)]-4-hydr oxyprolinol Hyp-(N-acetylgalactosamine-alkyl)3
actgccgccacaactcaggat

SEQ ID NO: 2755 - RNA, 23 nt, synthetic construct
  misc_feature 1..23: note = Description of Artificial Sequence: Synthetic oligonucleotide
  source 1..23: mol_type = other RNA
  modified_base 1: mod_base = OTHER; note = 2'-O-methyladenosine-3'- phosphorothioate
  modified_base 2: mod_base = OTHER; note = 2'-fluorouridine -3'-phosphorothioate
  modified_base 3: mod_base = OTHER; note = 2'-O-methylcytidine-3'-phosphate
  modified_base 4: mod_base = OTHER; note = 2'-O-methylcytidine-3'-phosphate
  modified_base 5: mod_base = OTHER; note = 2'-O-methyluridine-3'-phosphate
  modified_base 6: mod_base = OTHER; note = 2'-fluoroguanosine-3'-phosphate
  modified_base 7: mod_base = OTHER; note = 2'-O-methyladenosine-3'-phosphate
  modified_base 8: mod_base = OTHER; note = 2'-fluoroguanosine-3'-phosphate
  modified_base 9: mod_base = OTHER; note = 2'-fluorouridine-3'-phosphate
  modified_base 10: mod_base = OTHER; note = 2'-O-methyluridine-3'-phosphate
  modified_base 11: mod_base = OTHER; note = 2'-O-methylguanosine-3'-phosphate
  modified_base 12: mod_base = OTHER; note = 2'-O-methyluridine-3'-phosphate
  modified_base 13: mod_base = OTHER; note = 2'-O-methylguanosine-3'-phosphate
  modified_base 14: mod_base = OTHER; note = 2'-fluoroguanosine-3'-phosphate
  modified_base 15: mod_base = OTHER; note = 2'-O-methylcytidine-3'-phosphate
  modified_base 16: mod_base = OTHER; note = 2'-fluoroguanosine-3'-phosphate
  modified_base 17: mod_base = OTHER; note = 2'-O-methylguanosine-3'-phosphate
  modified_base 18: mod_base = OTHER; note = 2'-O-methylcytidine-3'-phosphate
  modified_base 19: mod_base = OTHER; note = 2'-O-methyladenosine-3'-phosphate
  modified_base 20: mod_base = OTHER; note = 2'-O-methylguanosine-3'-phosphate
  modified_base 21: mod_base = OTHER; note = 2'-O-methyluridine-3'-phosphorothioate
  modified_base 22: mod_base = OTHER; note = 2'-O-methyluridine-3'-phosphorothioate
  modified_base 23: mod_base = OTHER; note = 2'-O-methyluridine-3'-phosphate
atcctgagttgtggcggcagttt

SEQ ID NO: 2756 - RNA, 21 nt, synthetic construct
  misc_feature 1..21: note = Description of Artificial Sequence: Synthetic oligonucleotide
  source 1..21: mol_type = other RNA
  modified_base 1: mod_base = OTHER; note = 2'-O-methylcytidine-3'- phosphorothioate
  modified_base 2: mod_base = OTHER; note = 2'-O-methyluridine-3'-phosphorothioate
  modified_base 3: mod_base = OTHER; note = 2'-O-methylguanosine-3'-phosphate
  modified_base 4: mod_base = OTHER; note = 2'-O-methylcytidine-3'-phosphate
  modified_base 5: mod_base = OTHER; note = 2'-O-methylcytidine-3'-phosphate
  modified_base 6: mod_base = OTHER; note = 2'-O-methylguanosine-3'-phosphate
  modified_base 7: mod_base = OTHER; note = 2'-fluorocytidine-3'-phosphate
  modified_base 8: mod_base = OTHER; note = 2'-O-methylcytidine-3'-phosphate
  modified_base 9: mod_base = OTHER; note = 2'-fluoroadenosine-3'-phosphate
  modified_base 10: mod_base = OTHER; note = 2'-fluorocytidine-3'-phosphate
  modified_base 11: mod_base = OTHER; note = 2'-fluoroadenosine-3'-phosphate
  modified_base 12: mod_base = OTHER; note = 2'-O-methyladenosine-3'-phosphate
  modified_base 13: mod_base = OTHER; note = 2'-O-methylcytidine-3'-phosphate
  modified_base 14: mod_base = OTHER; note = 2'-O-methyluridine-3'-phosphate
  modified_base 15: mod_base = OTHER; note = 2'-O-methylcytidine-3'-phosphate
  modified_base 16: mod_base = OTHER; note = 2'-O-methyladenosine-3'-phosphate
  modified_base 17: mod_base = OTHER; note = 2'-O-methylguanosine-3'-phosphate
  modified_base 18: mod_base = OTHER; note = 2'-O-methylguanosine-3'-phosphate
  modified_base 19: mod_base = OTHER; note = 2'-O-methyladenosine-3'-phosphate
  modified_base 20: mod_base = OTHER; note = 2'-O-methyluridine-3'-phosphate
  modified_base 21: mod_base = OTHER; note = 2'-O-methylguanosine-3'-phosphate attached to N-[tris(N-acetylgalactosamine-alkyl)-amidodecanoyl)]-4-hydr oxyprolinol Hyp-(N-acetylgalactosamine-alkyl)3
ctgccgccacaactcaggatg

SEQ ID NO: 2757 - RNA, 23 nt, synthetic construct
  misc_feature 1..23: note = Description of Artificial Sequence: Synthetic oligonucleotide
  source 1..23: mol_type = other RNA
  modified_base 1: mod_base = OTHER; note = 2'-O-methylcytidine-3'- phosphorothioate
  modified_base 2: mod_base = OTHER; note = 2'-fluoroadenosine-3'-phosphorothioate
  modified_base 3: mod_base = OTHER; note = 2'-O-methyluridine-3'-phosphate
  modified_base 4: mod_base = OTHER; note = 2'-O-methylcytidine-3'-phosphate
  modified_base 5: mod_base = OTHER; note = 2'-O-methylcytidine-3'-phosphate
  modified_base 6: mod_base = OTHER; note = 2'-fluorouridine-3'-phosphate
  modified_base 7: mod_base = OTHER; note = 2'-O-methylguanosine-3'-phosphate
  modified_base 8: mod_base = OTHER; note = 2'-fluoroadenosine-3'-phosphate
  modified_base 9: mod_base = OTHER; note = 2'-fluoroguanosine-3'-phosphate
  modified_base 10: mod_base = OTHER; note = 2'-O-methyluridine-3'-phosphate
  modified_base 11: mod_base = OTHER; note = 2'-O-methyluridine-3'-phosphate
  modified_base 12: mod_base = OTHER; note = 2'-O-methylguanosine-3'-phosphate
  modified_base 13: mod_base = OTHER; note = 2'-O-methyluridine-3'-phosphate
  modified_base 14: mod_base = OTHER; note = 2'-fluoroguanosine-3'-phosphate
  modified_base 15: mod_base = OTHER; note = 2'-O-methylguanosine-3'-phosphate
  modified_base 16: mod_base = OTHER; note = 2'-fluorocytidine-3'-phosphate
  modified_base 17: mod_base = OTHER; note = 2'-O-methylguanosine-3'-phosphate
  modified_base 18: mod_base = OTHER; note = 2'-O-methylguanosine-3'-phosphate
  modified_base 19: mod_base = OTHER; note = 2'-O-methylcytidine-3'-phosphate
  modified_base 20: mod_base = OTHER; note = 2'-O-methyladenosine-3'-phosphate
  modified_base 21: mod_base = OTHER; note = 2'-O-methylguanosine-3'- phosphorothioate
  modified_base 22: mod_base = OTHER; note = 2'-O-methyluridine-3'-phosphorothioate
  modified_base 23: mod_base = OTHER; note = 2'-O-methyluridine-3'-phosphate
catcctgagttgtggcggcagtt

SEQ ID NO: 2758 - RNA, 21 nt, synthetic construct
  misc_feature 1..21: note = Description of Artificial Sequence: Synthetic oligonucleotide
  source 1..21: mol_type = other RNA
  modified_base 1: mod_base = OTHER; note = 2'-O-methyluridine-3'-phosphorothioate
  modified_base 2: mod_base = OTHER; note = 2'-O-methylcytidine-3'- phosphorothioate
  modified_base 3: mod_base = OTHER; note = 2'-O-methyladenosine-3'-phosphate
  modified_base 4: mod_base = OTHER; note = 2'-O-methyladenosine-3'-phosphate
  modified_base 5: mod_base = OTHER; note = 2'-O-methyladenosine-3'-phosphate
  modified_base 6: mod_base = OTHER; note = 2'-O-methylcytidine-3'-phosphate
  modified_base 7: mod_base = OTHER; note = 2'-fluorouridine-3'-phosphate
  modified_base 8: mod_base = OTHER; note = 2'-O-methylguanosine-3'-phosphate
  modified_base 9: mod_base = OTHER; note = 2'-fluorocytidine-3'-phosphate
  modified_base 10: mod_base = OTHER; note = 2'-fluorocytidine-3'-phosphate
  modified_base 11: mod_base = OTHER; note = 2'-fluoroguanosine-3'-phosphate
  modified_base 12: mod_base = OTHER; note = 2'-O-methylcytidine-3'-phosphate
  modified_base 13: mod_base = OTHER; note = 2'-O-methylcytidine-3'-phosphate
  modified_base 14: mod_base = OTHER; note = 2'-O-methyladenosine-3'-phosphate
  modified_base 15: mod_base = OTHER; note = 2'-O-methylcytidine-3'-phosphate
  modified_base 16: mod_base = OTHER; note = 2'-O-methyladenosine-3'-phosphate
  modified_base 17: mod_base = OTHER; note = 2'-O-methyladenosine-3'-phosphate
  modified_base 18: mod_base = OTHER; note = 2'-O-methylcytidine-3'-phosphate
  modified_base 19: mod_base = OTHER; note = 2'-O-methyluridine-3'-phosphate
  modified_base 20: mod_base = OTHER; note = 2'-O-methylcytidine-3'-phosphate
  modified_base 21: mod_base = OTHER; note = 2'-O-methyladenosine-3'-phosphate attached to N-[tris(N-acetylgalactosamine-alkyl)-amidodecanoyl)]-4-hydr oxyprolinol Hyp-(N-acetylgalactosamine-alkyl)3
tcaaactgccgccacaactca

SEQ ID NO: 2759 - RNA, 23 nt, synthetic construct
  misc_feature 1..23: note = Description of Artificial Sequence: Synthetic oligonucleotide
  source 1..23: mol_type = other RNA
  modified_base 1: mod_base = OTHER; note = 2'-O-methyluridine-3'-phosphorothioate
  modified_base 2: mod_base = OTHER; note = 2'-fluoroguanosine-3'-phosphorothioate
  modified_base 3: mod_base = OTHER; note = 2'-O-methyladenosine-3'-phosphate
  modified_base 4: mod_base = OTHER; note = 2'-O-methylguanosine-3'-phosphate
  modified_base 5: mod_base = OTHER; note = 2'-O-methyluridine-3'-phosphate
  modified_base 6: mod_base = OTHER; note = 2'-fluorouridine-3'-phosphate
  modified_base 7: mod_base = OTHER; note = 2'-O-methylguanosine-3'-phosphate
  modified_base 8: mod_base = OTHER; note = 2'-fluorouridine-3'-phosphate
  modified_base 9: mod_base = OTHER; note = 2'-fluoroguanosine-3'-phosphate
  modified_base 10: mod_base = OTHER; note = 2'-O-methylguanosine-3'-phosphate
  modified_base 11: mod_base = OTHER; note = 2'-O-methylcytidine-3'-phosphate
  modified_base 12: mod_base = OTHER; note = 2'-O-methylguanosine-3'-phosphate
  modified_base 13: mod_base = OTHER; note = 2'-O-methylguanosine-3'-phosphate
  modified_base 14: mod_base = OTHER; note = 2'-fluorocytidine-3'-phosphate
  modified_base 15: mod_base = OTHER; note = 2'-O-methyladenosine-3'-phosphate
  modified_base 16: mod_base = OTHER; note = 2'-fluoroguanosine-3'-phosphate
  modified_base 17: mod_base = OTHER; note = 2'-O-methyluridine-3'-phosphate
  modified_base 18: mod_base = OTHER; note = 2'-O-methyluridine-3'-phosphate
  modified_base 19: mod_base = OTHER; note = 2'-O-methyluridine-3'-phosphate
  modified_base 20: mod_base = OTHER; note = 2'-O-methylguanosine-3'-phosphate
  modified_base 21: mod_base = OTHER; note = 2'-O-methyladenosine-3'- phosphorothioate
  modified_base 22: mod_base = OTHER; note = 2'-O-methyladenosine-3'- phosphorothioate
  modified_base 23: mod_base = OTHER; note = 2'-O-methyluridine-3'-phosphate
tgagttgtggcggcagtttgaat

SEQ ID NO: 2760 - RNA, 21 nt, synthetic construct
  misc_feature 1..21: note = Description of Artificial Sequence: Synthetic oligonucleotide
  source 1..21: mol_type = other RNA
  modified_base 1: mod_base = OTHER; note = 2'-O-methyluridine-3'-phosphorothioate
  modified_base 2: mod_base = OTHER; note = 2'-O-methyluridine-3'-phosphorothioate
  modified_base 3: mod_base = OTHER; note = 2'-O-methylcytidine-3'-phosphate
  modified_base 4: mod_base = OTHER; note = 2'-O-methyladenosine-3'-phosphate
  modified_base 5: mod_base = OTHER; note = 2'-O-methyladenosine-3'-phosphate
  modified_base 6: mod_base = OTHER; note = 2'-O-methyladenosine-3'-phosphate
  modified_base 7: mod_base = OTHER; note = 2'-fluorocytidine-3'-phosphate
  modified_base 8: mod_base = OTHER; note = 2'-O-methyluridine-3'-phosphate
  modified_base 9: mod_base = OTHER; note = 2'-fluoroguanosine-3'-phosphate
  modified_base 10: mod_base = OTHER; note = 2'-fluorocytidine-3'-phosphate
  modified_base 11: mod_base = OTHER; note = 2'-fluorocytidine-3'-phosphate
  modified_base 12: mod_base = OTHER; note = 2'-O-methylguanosine-3'-phosphate
  modified_base 13: mod_base = OTHER; note = 2'-O-methylcytidine-3'-phosphate
  modified_base 14: mod_base = OTHER; note = 2'-O-methylcytidine-3'-phosphate
  modified_base 15: mod_base = OTHER; note = 2'-O-methyladenosine-3'-phosphate
  modified_base 16: mod_base = OTHER; note = 2'-O-methylcytidine-3'-phosphate
  modified_base 17: mod_base = OTHER; note = 2'-O-methyladenosine-3'-phosphate
  modified_base 18: mod_base = OTHER; note = 2'-O-methyladenosine-3'-phosphate
  modified_base 19: mod_base = OTHER; note = 2'-O-methylcytidine-3'-phosphate
  modified_base 20: mod_base = OTHER; note = 2'-O-methyluridine-3'-phosphate
  modified_base 21: mod_base = OTHER; note = 2'-O-methylcytidine-3'-phosphate attached to N-[tris(N-acetylgalactosamine-alkyl)-amidodecanoyl)]-4-hydr oxyprolinol Hyp-(N-acetylgalactosamine-alkyl)3
ttcaaactgccgccacaactc

SEQ ID NO: 2761 - RNA, 23 nt, synthetic construct
  misc_feature 1..23: note = Description of Artificial Sequence: Synthetic oligonucleotide
  source 1..23: mol_type = other RNA
  modified_base 1: mod_base = OTHER; note = 2'-O-methylguanosine-3'- phosphorothioate
  modified_base 2: mod_base = OTHER; note = 2'-fluoroadenosine-3'-phosphorothioate
  modified_base 3: mod_base = OTHER; note = 2'-O-methylguanosine-3'-phosphate
  modified_base 4: mod_base = OTHER; note = 2'-O-methyluridine-3'-phosphate
  modified_base 5: mod_base = OTHER; note = 2'-O-methyluridine-3'-phosphate
  modified_base 6: mod_base = OTHER; note = 2'-fluoroguanosine-3'-phosphate
  modified_base 7: mod_base = OTHER; note = 2'-O-methyluridine-3'-phosphate
  modified_base 8: mod_base = OTHER; note = 2'-fluoroguanosine-3'-phosphate
  modified_base 9: mod_base = OTHER; note = 2'-fluoroguanosine-3'-phosphate
  modified_base 10: mod_base = OTHER; note = 2'-O-methylcytidine-3'-phosphate
  modified_base 11: mod_base = OTHER; note = 2'-O-methylguanosine-3'-phosphate
  modified_base 12: mod_base = OTHER; note = 2'-O-methylguanosine-3'-phosphate
  modified_base 13: mod_base = OTHER; note = 2'-O-methylcytidine-3'-phosphate
  modified_base 14: mod_base = OTHER; note = 2'-fluoroadenosine-3'-phosphate
  modified_base 15: mod_base = OTHER; note = 2'-O-methylguanosine-3'-phosphate
  modified_base 16: mod_base = OTHER; note = 2'-fluorouridine-3'-phosphate
  modified_base 17: mod_base = OTHER; note = 2'-O-methyluridine-3'-phosphate
  modified_base 18: mod_base = OTHER; note = 2'-O-methyluridine-3'-phosphate
  modified_base 19: mod_base = OTHER; note = 2'-O-methylguanosine-3'-phosphate
  modified_base 20: mod_base = OTHER; note = 2'-O-methyladenosine-3'-phosphate
  modified_base 21: mod_base = OTHER; note = 2'-O-methyladenosine-3'- phosphorothioate
  modified_base 22: mod_base = OTHER; note = 2'-O-methyluridine-3'-phosphorothioate
  modified_base 23: mod_base = OTHER; note = 2'-O-methylcytidine-3'-phosphate
gagttgtggcggcagtttgaatc

SEQ ID NO: 2762 - RNA, 21 nt, synthetic construct
  misc_feature 1..21: note = Description of Artificial Sequence: Synthetic oligonucleotide
  source 1..21: mol_type = other RNA
  modified_base 1: mod_base = OTHER; note = 2'-O-methylguanosine-3'- phosphorothioate
  modified_base 2: mod_base = OTHER; note = 2'-O-methylguanosine-3'- phosphorothioate
  modified_base 3: mod_base = OTHER; note = 2'-O-methylguanosine-3'-phosphate
  modified_base 4: mod_base = OTHER; note = 2'-O-methyladenosine-3'-phosphate
  modified_base 5: mod_base = OTHER; note = 2'-O-methyladenosine-3'-phosphate
  modified_base 6: mod_base = OTHER; note = 2'-O-methylguanosine-3'-phosphate
  modified_base 7: mod_base = OTHER; note = 2'-fluoroadenosine-3'-phosphate
  modified_base 8: mod_base = OTHER; note = 2'-O-methyluridine-3'-phosphate
  modified_base 9: mod_base = OTHER; note = 2'-fluoroadenosine-3'-phosphate
  modified_base 10: mod_base = OTHER; note = 2'-fluorouridine-3'-phosphate
  modified_base 11: mod_base = OTHER; note = 2'-fluorocytidine-3'-phosphate
  modified_base 12: mod_base = OTHER; note = 2'-O-methyladenosine-3'-phosphate
  modified_base 13: mod_base = OTHER; note = 2'-O-methyladenosine-3'-phosphate
  modified_base 14: mod_base = OTHER; note = 2'-O-methyladenosine-3'-phosphate
  modified_base 15: mod_base = OTHER; note = 2'-O-methyluridine-3'-phosphate
  modified_base 16: mod_base = OTHER; note = 2'-O-methylguanosine-3'-phosphate
  modified_base 17: mod_base = OTHER; note = 2'-O-methylguanosine-3'-phosphate
  modified_base 18: mod_base = OTHER; note = 2'-O-methylcytidine-3'-phosphate
  modified_base 19: mod_base = OTHER; note = 2'-O-methyluridine-3'-phosphate
  modified_base 20: mod_base = OTHER; note = 2'-O-methylguanosine-3'-phosphate
  modified_base 21: mod_base = OTHER; note = 2'-O-methyladenosine-3'-phosphate attached to N-[tris(N-acetylgalactosamine-alkyl)-amidodecanoyl)]-4-hydr oxyprolinol Hyp-(N-acetylgalactosamine-alkyl)3
gggaagatatcaaatggctga

SEQ ID NO: 2763 - RNA, 23 nt, synthetic construct
  misc_feature 1..23: note = Description of Artificial Sequence: Synthetic oligonucleotide
  source 1..23: mol_type = other RNA
  modified_base 1: mod_base = OTHER; note = 2'-O-methyluridine-3'-phosphorothioate
  modified_base 2: mod_base = OTHER; note = 2'-fluorocytidine-3'-phosphorothioate
  modified_base 3: mod_base = OTHER; note = 2'-O-methyladenosine-3'-phosphate
  modified_base 4: mod_base = OTHER; note = 2'-O-methylguanosine-3'-phosphate
  modified_base 5: mod_base = OTHER; note = 2'-O-methylcytidine-3'-phosphate
  modified_base 6: mod_base = OTHER; note = 2'-fluorocytidine-3'-phosphate
  modified_base 7: mod_base = OTHER; note = 2'-O-methyladenosine-3'-phosphate
  modified_base 8: mod_base = OTHER; note = 2'-fluorouridine-3'-phosphate
  modified_base 9: mod_base = OTHER; note = 2'-fluorouridine-3'-phosphate
  modified_base 10: mod_base = OTHER; note = 2'-O-methyluridine-3'-phosphate
  modified_base 11: mod_base = OTHER; note = 2'-O-methylguanosine-3'-phosphate
  modified_base 12: mod_base = OTHER; note = 2'-O-methyladenosine-3'-phosphate
  modified_base 13: mod_base = OTHER; note = 2'-O-methyluridine-3'-phosphate
  modified_base 14: mod_base = OTHER; note = 2'-fluoroadenosine-3'-phosphate
  modified_base 15: mod_base = OTHER; note = 2'-O-methyluridine-3'-phosphate
  modified_base 16: mod_base = OTHER; note = 2'-fluorocytidine-3'-phosphate
  modified_base 17: mod_base = OTHER; note = 2'-O-methyluridine-3'-phosphate
  modified_base 18: mod_base = OTHER; note = 2'-O-methyluridine-3'-phosphate
  modified_base 19: mod_base = OTHER; note = 2'-O-methylcytidine-3'-phosphate
  modified_base 20: mod_base = OTHER; note = 2'-O-methylcytidine-3'-phosphate
  modified_base 21: mod_base = OTHER; note = 2'-O-methylcytidine-3'- phosphorothioate
  modified_base 22: mod_base = OTHER; note = 2'-O-methyladenosine-3'- phosphorothioate
  modified_base 23: mod_base = OTHER; note = 2'-O-methylguanosine-3'-phosphate
tcagccatttgatatcttcccag

SEQ ID NO: 2764 - RNA, 21 nt, synthetic construct
  misc_feature 1..21: note = Description of Artificial Sequence: Synthetic oligonucleotide
  source 1..21: mol_type = other RNA
  modified_base 1: mod_base = OTHER; note = 2'-O-methylguanosine-3'- phosphorothioate
  modified_base 2: mod_base = OTHER; note = 2'-O-methylguanosine-3'- phosphorothioate
  modified_base 3: mod_base = OTHER; note = 2'-O-methyladenosine-3'-phosphate
  modified_base 4: mod_base = OTHER; note = 2'-O-methyladenosine-3'-phosphate
  modified_base 5: mod_base = OTHER; note = 2'-O-methylguanosine-3'-phosphate
  modified_base 6: mod_base = OTHER; note = 2'-O-methyladenosine-3'-phosphate
  modified_base 7: mod_base = OTHER; note = 2'-fluorouridine-3'-phosphate
  modified_base 8: mod_base = OTHER; note = 2'-O-methyladenosine-3'-phosphate
  modified_base 9: mod_base = OTHER; note = 2'-fluorouridine-3'-phosphate
  modified_base 10: mod_base = OTHER; note = 2'-fluorocytidine-3'-phosphate
  modified_base 11: mod_base = OTHER; note = 2'-fluoroadenosine-3'-phosphate
  modified_base 12: mod_base = OTHER; note = 2'-O-methyladenosine-3'-phosphate
  modified_base 13: mod_base = OTHER; note = 2'-O-methyladenosine-3'-phosphate
  modified_base 14: mod_base = OTHER; note = 2'-O-methyluridine-3'-phosphate
  modified_base 15: mod_base = OTHER; note = 2'-O-methylguanosine-3'-phosphate
  modified_base 16: mod_base = OTHER; note = 2'-O-methylguanosine-3'-phosphate
  modified_base 17: mod_base = OTHER; note = 2'-O-methylcytidine-3'-phosphate
  modified_base 18: mod_base = OTHER; note = 2'-O-methyluridine-3'-phosphate
  modified_base 19: mod_base = OTHER; note = 2'-O-methylguanosine-3'-phosphate
  modified_base 20: mod_base = OTHER; note = 2'-O-methyladenosine-3'-phosphate
  modified_base 21: mod_base = OTHER; note = 2'-O-methylguanosine-3'-phosphate attached to N-[tris(N-acetylgalactosamine-alkyl)-amidodecanoyl)]-4-hydr oxyprolinol Hyp-(N-acetylgalactosamine-alkyl)3
ggaagatatcaaatggctgag

SEQ ID NO: 2765 - RNA, 23 nt, synthetic construct
  misc_feature 1..23: note = Description of Artificial Sequence: Synthetic oligonucleotide
  source 1..23: mol_type = other RNA
  modified_base 1: mod_base = OTHER; note = 2'-O-methylcytidine-3'- phosphorothioate
  modified_base 2: mod_base = OTHER; note = 2'-fluorouridine -3'-phosphorothioate
  modified_base 3: mod_base = OTHER; note = 2'-O-methylcytidine-3'-phosphate
  modified_base 4: mod_base = OTHER; note = 2'-O-methyladenosine-3'-phosphate
  modified_base 5: mod_base = OTHER; note = 2'-O-methylguanosine-3'-phosphate
  modified_base 6: mod_base = OTHER; note = 2'-fluorocytidine-3'-phosphate
  modified_base 7: mod_base = OTHER; note = 2'-O-methylcytidine-3'-phosphate
  modified_base 8: mod_base = OTHER; note = 2'-fluoroadenosine-3'-phosphate
  modified_base 9: mod_base = OTHER; note = 2'-fluorouridine-3'-phosphate
  modified_base 10: mod_base = OTHER; note = 2'-O-methyluridine-3'-phosphate
  modified_base 11: mod_base = OTHER; note = 2'-O-methyluridine-3'-phosphate
  modified_base 12: mod_base = OTHER; note = 2'-O-methylguanosine-3'-phosphate
  modified_base 13: mod_base = OTHER; note = 2'-O-methyladenosine-3'-phosphate
  modified_base 14: mod_base = OTHER; note = 2'-fluorouridine-3'-phosphate
  modified_base 15: mod_base = OTHER; note = 2'-O-methyladenosine-3'-phosphate
  modified_base 16: mod_base = OTHER; note = 2'-fluorouridine-3'-phosphate
  modified_base 17: mod_base = OTHER; note = 2'-O-methylcytidine-3'-phosphate
  modified_base 18: mod_base = OTHER; note = 2'-O-methyluridine-3'-phosphate
  modified_base 19: mod_base = OTHER; note = 2'-O-methyluridine-3'-phosphate
  modified_base 20: mod_base = OTHER; note = 2'-O-methylcytidine-3'-phosphate
  modified_base 21: mod_base = OTHER; note = 2'-O-methylcytidine-3'- phosphorothioate
  modified_base 22: mod_base = OTHER; note = 2'-O-methylcytidine-3'- phosphorothioate
  modified_base 23: mod_base = OTHER; note = 2'-O-methyladenosine-3'-phosphate
ctcagccatttgatatcttccca

SEQ ID NO: 2766 - RNA, 21 nt, synthetic construct
  misc_feature 1..21: note = Description of Artificial Sequence: Synthetic oligonucleotide
  source 1..21: mol_type = other RNA
  modified_base 1: mod_base = OTHER; note = 2'-O-methyladenosine-3'- phosphorothioate
  modified_base 2: mod_base = OTHER; note = 2'-O-methylguanosine-3'- phosphorothioate
  modified_base 3: mod_base = OTHER; note = 2'-O-methylcytidine-3'-phosphate
  modified_base 4: mod_base = OTHER; note = 2'-O-methyluridine-3'-phosphate
  modified_base 5: mod_base = OTHER; note = 2'-O-methylguanosine-3'-phosphate
  modified_base 6: mod_base = OTHER; note = 2'-O-methylguanosine-3'-phosphate
  modified_base 7: mod_base = OTHER; note = 2'-fluoroguanosine-3'-phosphate
  modified_base 8: mod_base = OTHER; note = 2'-O-methyladenosine-3'-phosphate
  modified_base 9: mod_base = OTHER; note = 2'-fluoroadenosine-3'-phosphate
  modified_base 10: mod_base = OTHER; note = 2'-fluoroguanosine-3'-phosphate
  modified_base 11: mod_base = OTHER; note = 2'-fluoroadenosine-3'-phosphate
  modified_base 12: mod_base = OTHER; note = 2'-O-methyluridine-3'-phosphate
  modified_base 13: mod_base = OTHER; note = 2'-O-methyladenosine-3'-phosphate
  modified_base 14: mod_base = OTHER; note = 2'-O-methyluridine-3'-phosphate
  modified_base 15: mod_base = OTHER; note = 2'-O-methylcytidine-3'-phosphate
  modified_base 16: mod_base = OTHER; note = 2'-O-methyladenosine-3'-phosphate
  modified_base 17: mod_base = OTHER; note = 2'-O-methyladenosine-3'-phosphate
  modified_base 18: mod_base = OTHER; note = 2'-O-methyladenosine-3'-phosphate
  modified_base 19: mod_base = OTHER; note = 2'-O-methyluridine-3'-phosphate
  modified_base 20: mod_base = OTHER; note = 2'-O-methylguanosine-3'-phosphate
  modified_base 21: mod_base = OTHER; note = 2'-O-methylguanosine-3'-phosphate attached to N-[tris(N-acetylgalactosamine-alkyl)-amidodecanoyl)]-4-hydr oxyprolinol Hyp-(N-acetylgalactosamine-alkyl)3
agctgggaagatatcaaatgg

SEQ ID NO: 2767 - RNA, 23 nt, synthetic construct
  misc_feature 1..23: note = Description of Artificial Sequence: Synthetic oligonucleotide
  source 1..23: mol_type = other RNA
  modified_base 1: mod_base = OTHER; note = 2'-O-methylcytidine-3'- phosphorothioate
  modified_base 2: mod_base = OTHER; note = 2'-fluorocytidine-3'-phosphorothioate
  modified_base 3: mod_base = OTHER; note = 2'-O-methyladenosine-3'-phosphate
  modified_base 4: mod_base = OTHER; note = 2'-O-methyluridine-3'-phosphate
  modified_base 5: mod_base = OTHER; note = 2'-O-methyluridine-3'-phosphate
  modified_base 6: mod_base = OTHER; note = 2'-fluorouridine-3'-phosphate
  modified_base 7: mod_base = OTHER; note = 2'-O-methylguanosine-3'-phosphate
  modified_base 8: mod_base = OTHER; note = 2'-fluoroadenosine-3'-phosphate
  modified_base 9: mod_base = OTHER; note = 2'-fluorouridine-3'-phosphate
  modified_base 10: mod_base = OTHER; note = 2'-O-methyladenosine-3'-phosphate
  modified_base 11: mod_base = OTHER; note = 2'-O-methyluridine-3'-phosphate
  modified_base 12: mod_base = OTHER; note = 2'-O-methylcytidine-3'-phosphate
  modified_base 13: mod_base = OTHER; note = 2'-O-methyluridine-3'-phosphate
  modified_base 14: mod_base = OTHER; note = 2'-fluorouridine-3'-phosphate
  modified_base 15: mod_base = OTHER; note = 2'-O-methylcytidine-3'-phosphate
  modified_base 16: mod_base = OTHER; note = 2'-fluorocytidine-3'-phosphate
  modified_base 17: mod_base = OTHER; note = 2'-O-methylcytidine-3'-phosphate
  modified_base 18: mod_base = OTHER; note = 2'-O-methyladenosine-3'-phosphate
  modified_base 19: mod_base = OTHER; note = 2'-O-methylguanosine-3'-phosphate
  modified_base 20: mod_base = OTHER; note = 2'-O-methylcytidine-3'-phosphate
  modified_base 21: mod_base = OTHER; note = 2'-O-methyluridine-3'-phosphorothioate
  modified_base 22: mod_base = OTHER; note = 2'-O-methylguanosine-3'- phosphorothioate
  modified_base 23: mod_base = OTHER; note = 2'-O-methyladenosine-3'-phosphate
ccatttgatatcttcccagctga

SEQ ID NO: 2768 - RNA, 21 nt, synthetic construct
  misc_feature 1..21: note = Description of Artificial Sequence: Synthetic oligonucleotide
  source 1..21: mol_type = other RNA
  modified_base 1: mod_base = OTHER; note = 2'-O-methylcytidine-3'- phosphorothioate
  modified_base 2: mod_base = OTHER; note = 2'-O-methyladenosine-3'- phosphorothioate
  modified_base 3: mod_base = OTHER; note = 2'-O-methylguanosine-3'-phosphate
  modified_base 4: mod_base = OTHER; note = 2'-O-methylcytidine-3'-phosphate
  modified_base 5: mod_base = OTHER; note = 2'-O-methyluridine-3'-phosphate
  modified_base 6: mod_base = OTHER; note = 2'-O-methylguanosine-3'-phosphate
  modified_base 7: mod_base = OTHER; note = 2'-fluoroguanosine-3'-phosphate
  modified_base 8: mod_base = OTHER; note = 2'-O-methylguanosine-3'-phosphate
  modified_base 9: mod_base = OTHER; note = 2'-fluoroadenosine-3'-phosphate
  modified_base 10: mod_base = OTHER; note = 2'-fluoroadenosine-3'-phosphate
  modified_base 11: mod_base = OTHER; note = 2'-fluoroguanosine-3'-phosphate
  modified_base 12: mod_base = OTHER; note = 2'-O-methyladenosine-3'-phosphate
  modified_base 13: mod_base = OTHER; note = 2'-O-methyluridine-3'-phosphate
  modified_base 14: mod_base = OTHER; note = 2'-O-methyladenosine-3'-phosphate
  modified_base 15: mod_base = OTHER; note = 2'-O-methyluridine-3'-phosphate
  modified_base 16: mod_base = OTHER; note = 2'-O-methylcytidine-3'-phosphate
  modified_base 17: mod_base = OTHER; note = 2'-O-methyladenosine-3'-phosphate
  modified_base 18: mod_base = OTHER; note = 2'-O-methyladenosine-3'-phosphate
  modified_base 19: mod_base = OTHER; note = 2'-O-methyladenosine-3'-phosphate
  modified_base 20: mod_base = OTHER; note = 2'-O-methyluridine-3'-phosphate
  modified_base 21: mod_base = OTHER; note = 2'-O-methylguanosine-3'-phosphate attached to N-[tris(N-acetylgalactosamine-alkyl)-amidodecanoyl)]-4-hydr oxyprolinol Hyp-(N-acetylgalactosamine-alkyl)3
cagctgggaagatatcaaatg

SEQ ID NO: 2769 - RNA, 23 nt, synthetic construct
  misc_feature 1..23: note = Description of Artificial Sequence: Synthetic oligonucleotide
  source 1..23: mol_type = other RNA
  modified_base 1: mod_base = OTHER; note = 2'-O-methylcytidine-3'- phosphorothioate
  modified_base 2: mod_base = OTHER; note = 2'-fluoroadenosine-3'-phosphorothioate
  modified_base 3: mod_base = OTHER; note = 2'-O-methyluridine-3'-phosphate
  modified_base 4: mod_base = OTHER; note = 2'-O-methyluridine-3'-phosphate
  modified_base 5: mod_base = OTHER; note = 2'-O-methyluridine-3'-phosphate
  modified_base 6: mod_base = OTHER; note = 2'-fluoroguanosine-3'-phosphate
  modified_base 7: mod_base = OTHER; note = 2'-O-methyladenosine-3'-phosphate
  modified_base 8: mod_base = OTHER; note = 2'-fluorouridine-3'-phosphate
  modified_base 9: mod_base = OTHER; note = 2'-fluoroadenosine-3'-phosphate
  modified_base 10: mod_base = OTHER; note = 2'-O-methyluridine-3'-phosphate
  modified_base 11: mod_base = OTHER; note = 2'-O-methylcytidine-3'-phosphate
  modified_base 12: mod_base = OTHER; note = 2'-O-methyluridine-3'-phosphate
  modified_base 13: mod_base = OTHER; note = 2'-O-methyluridine-3'-phosphate
  modified_base 14: mod_base = OTHER; note = 2'-fluorocytidine-3'-phosphate
  modified_base 15: mod_base = OTHER; note = 2'-O-methylcytidine-3'-phosphate
  modified_base 16: mod_base = OTHER; note = 2'-fluorocytidine-3'-phosphate
  modified_base 17: mod_base = OTHER; note = 2'-O-methyladenosine-3'-phosphate
  modified_base 18: mod_base = OTHER; note = 2'-O-methylguanosine-3'-phosphate
  modified_base 19: mod_base = OTHER; note = 2'-O-methylcytidine-3'-phosphate
  modified_base 20: mod_base = OTHER; note = 2'-O-methyluridine-3'-phosphate
  modified_base 21: mod_base = OTHER; note = 2'-O-methylguanosine-3'- phosphorothioate
  modified_base 22: mod_base = OTHER; note = 2'-O-methyladenosine-3'- phosphorothioate
  modified_base 23: mod_base = OTHER; note = 2'-O-methyluridine-3'-phosphate
catttgatatcttcccagctgat

SEQ ID NO: 2770 - RNA, 21 nt, synthetic construct
  misc_feature 1..21: note = Description of Artificial Sequence: Synthetic oligonucleotide
  source 1..21: mol_type = other RNA
  modified_base 1: mod_base = OTHER; note = 2'-O-methyladenosine-3'- phosphorothioate
  modified_base 2: mod_base = OTHER; note = 2'-O-methyladenosine-3'- phosphorothioate
  modified_base 3: mod_base = OTHER; note = 2'-O-methyluridine-3'-phosphate
  modified_base 4: mod_base = OTHER; note = 2'-O-methylcytidine-3'-phosphate
  modified_base 5: mod_base = OTHER; note = 2'-O-methyladenosine-3'-phosphate
  modified_base 6: mod_base = OTHER; note = 2'-O-methylguanosine-3'-phosphate
  modified_base 7: mod_base = OTHER; note = 2'-fluorouridine-3'-phosphate
  modified_base 8: mod_base = OTHER; note = 2'-O-methyladenosine-3'-phosphate
  modified_base 9: mod_base = OTHER; note = 2'-fluorocytidine-3'-phosphate
  modified_base 10: mod_base = OTHER; note = 2'-fluorouridine-3'-phosphate
  modified_base 11: mod_base = OTHER; note = 2'-fluorouridine-3'-phosphate
  modified_base 12: mod_base = OTHER; note = 2'-O-methylcytidine-3'-phosphate
  modified_base 13: mod_base = OTHER; note = 2'-O-methylcytidine-3'-phosphate
  modified_base 14: mod_base = OTHER; note = 2'-O-methyladenosine-3'-phosphate
  modified_base 15: mod_base = OTHER; note = 2'-O-methyladenosine-3'-phosphate
  modified_base 16: mod_base = OTHER; note = 2'-O-methyladenosine-3'-phosphate
  modified_base 17: mod_base = OTHER; note = 2'-O-methylguanosine-3'-phosphate
  modified_base 18: mod_base = OTHER; note = 2'-O-methyluridine-3'-phosphate
  modified_base 19: mod_base = OTHER; note = 2'-O-methylcytidine-3'-phosphate
  modified_base 20: mod_base = OTHER; note = 2'-O-methyluridine-3'-phosphate
  modified_base 21: mod_base = OTHER; note = 2'-O-methyladenosine-3'-phosphate attached to N-[tris(N-acetylgalactosamine-alkyl)-amidodecanoyl)]-4-hydr oxyprolinol Hyp-(N-acetylgalactosamine-alkyl)3
aatcagtacttccaaagtcta

SEQ ID NO: 2771 - RNA, 23 nt, synthetic construct
  misc_feature 1..23: note = Description of Artificial Sequence: Synthetic oligonucleotide
  source 1..23: mol_type = other RNA
  modified_base 1: mod_base = OTHER; note = 2'-O-methyluridine-3'-phosphorothioate
  modified_base 2: mod_base = OTHER; note = 2'-fluoroadenosine-3'-phosphorothioate
  modified_base 3: mod_base = OTHER; note = 2'-O-methylguanosine-3'-phosphate
  modified_base 4: mod_base = OTHER; note = 2'-O-methyladenosine-3'-phosphate
  modified_base 5: mod_base = OTHER; note = 2'-O-methylcytidine-3'-phosphate
  modified_base 6: mod_base = OTHER; note = 2'-fluorouridine-3'-phosphate
  modified_base 7: mod_base = OTHER; note = 2'-O-methyluridine-3'-phosphate
  modified_base 8: mod_base = OTHER; note = 2'-fluorouridine-3'-phosphate
  modified_base 9: mod_base = OTHER; note = 2'-fluoroguanosine-3'-phosphate
  modified_base 10: mod_base = OTHER; note = 2'-O-methylguanosine-3'-phosphate
  modified_base 11: mod_base = OTHER; note = 2'-O-methyladenosine-3'-phosphate
  modified_base 12: mod_base = OTHER; note = 2'-O-methyladenosine-3'-phosphate
  modified_base 13: mod_base = OTHER; note = 2'-O-methylguanosine-3'-phosphate
  modified_base 14: mod_base = OTHER; note = 2'-fluorouridine-3'-phosphate
  modified_base 15: mod_base = OTHER; note = 2'-O-methyladenosine-3'-phosphate
  modified_base 16: mod_base = OTHER; note = 2'-fluorocytidine-3'-phosphate
  modified_base 17: mod_base = OTHER; note = 2'-O-methyluridine-3'-phosphate
  modified_base 18: mod_base = OTHER; note = 2'-O-methylguanosine-3'-phosphate
  modified_base 19: mod_base = OTHER; note = 2'-O-methyladenosine-3'-phosphate
  modified_base 20: mod_base = OTHER; note = 2'-O-methyluridine-3'-phosphate
  modified_base 21: mod_base = OTHER; note = 2'-O-methyluridine-3'-phosphorothioate
  modified_base 22: mod_base = OTHER; note = 2'-O-methyluridine-3'-phosphorothioate
  modified_base 23: mod_base = OTHER; note = 2'-O-methyladenosine-3'-phosphate
tagactttggaagtactgattta

SEQ ID NO: 2772 - RNA, 21 nt, synthetic construct
  misc_feature 1..21: note = Description of Artificial Sequence: Synthetic oligonucleotide
  source 1..21: mol_type = other RNA
  modified_base 1: mod_base = OTHER; note = 2'-O-methyladenosine-3'- phosphorothioate
  modified_base 2: mod_base = OTHER; note = 2'-O-methyluridine-3'-phosphorothioate
  modified_base 3: mod_base = OTHER; note = 2'-O-methylcytidine-3'-phosphate
  modified_base 4: mod_base = OTHER; note = 2'-O-methyladenosine-3'-phosphate
  modified_base 5: mod_base = OTHER; note = 2'-O-methylguanosine-3'-phosphate
  modified_base 6: mod_base = OTHER; note = 2'-O-methyluridine-3'-phosphate
  modified_base 7: mod_base = OTHER; note = 2'-fluoroadenosine-3'-phosphate
  modified_base 8: mod_base = OTHER; note = 2'-O-methylcytidine-3'-phosphate
  modified_base 9: mod_base = OTHER; note = 2'-fluorouridine-3'-phosphate
  modified_base 10: mod_base = OTHER; note = 2'-fluorouridine-3'-phosphate
  modified_base 11: mod_base = OTHER; note = 2'-fluorocytidine-3'-phosphate
  modified_base 12: mod_base = OTHER; note = 2'-O-methylcytidine-3'-phosphate
  modified_base 13: mod_base = OTHER; note = 2'-O-methyladenosine-3'-phosphate
  modified_base 14: mod_base = OTHER; note = 2'-O-methyladenosine-3'-phosphate
  modified_base 15: mod_base = OTHER; note = 2'-O-methyladenosine-3'-phosphate
  modified_base 16: mod_base = OTHER; note = 2'-O-methylguanosine-3'-phosphate
  modified_base 17: mod_base = OTHER; note = 2'-O-methyluridine-3'-phosphate
  modified_base 18: mod_base = OTHER; note = 2'-O-methylcytidine-3'-phosphate
  modified_base 19: mod_base = OTHER; note = 2'-O-methyluridine-3'-phosphate
  modified_base 20: mod_base = OTHER; note = 2'-O-methyladenosine-3'-phosphate
  modified_base 21: mod_base = OTHER; note = 2'-O-methyluridine-3'-phosphate attached to N-[tris(N-acetylgalactosamine-alkyl)-amidodecanoyl)]-4-hydr oxyprolinol Hyp-(N-acetylgalactosamine-alkyl)3
atcagtacttccaaagtctat

SEQ ID NO: 2773 - RNA, 23 nt, synthetic construct
  misc_feature 1..23: note = Description of Artificial Sequence: Synthetic oligonucleotide
  source 1..23: mol_type = other RNA
  modified_base 1: mod_base = OTHER; note = 2'-O-methyladenosine-3'- phosphorothioate
  modified_base 2: mod_base = OTHER; note = 2'-fluorouridine -3'-phosphorothioate
  modified_base 3: mod_base = OTHER; note = 2'-O-methyladenosine-3'-phosphate
  modified_base 4: mod_base = OTHER; note = 2'-O-methylguanosine-3'-phosphate
  modified_base 5: mod_base = OTHER; note = 2'-O-methyladenosine-3'-phosphate
  modified_base 6: mod_base = OTHER; note = 2'-fluorocytidine-3'-phosphate
  modified_base 7: mod_base = OTHER; note = 2'-O-methyluridine-3'-phosphate
  modified_base 8: mod_base = OTHER; note = 2'-fluorouridine-3'-phosphate
  modified_base 9: mod_base = OTHER; note = 2'-fluorouridine-3'-phosphate
  modified_base 10: mod_base = OTHER; note = 2'-O-methylguanosine-3'-phosphate
  modified_base 11: mod_base = OTHER; note = 2'-O-methylguanosine-3'-phosphate
  modified_base 12: mod_base = OTHER; note = 2'-O-methyladenosine-3'-phosphate
  modified_base 13: mod_base = OTHER; note = 2'-O-methyladenosine-3'-phosphate
  modified_base 14: mod_base = OTHER; note = 2'-fluoroguanosine-3'-phosphate
  modified_base 15: mod_base = OTHER; note = 2'-O-methyluridine-3'-phosphate
  modified_base 16: mod_base = OTHER; note = 2'-fluoroadenosine-3'-phosphate
  modified_base 17: mod_base = OTHER; note = 2'-O-methylcytidine-3'-phosphate
  modified_base 18: mod_base = OTHER; note = 2'-O-methyluridine-3'-phosphate
  modified_base 19: mod_base = OTHER; note = 2'-O-methylguanosine-3'-phosphate
  modified_base 20: mod_base = OTHER; note = 2'-O-methyladenosine-3'-phosphate
  modified_base 21: mod_base = OTHER; note = 2'-O-methyluridine-3'-phosphorothioate
  modified_base 22: mod_base = OTHER; note = 2'-O-methyluridine-3'-phosphorothioate
  modified_base 23: mod_base = OTHER; note = 2'-O-methyluridine-3'-phosphate
atagactttggaagtactgattt

SEQ ID NO: 2774 - RNA, 21 nt, synthetic construct
  misc_feature 1..21: note = Description of Artificial Sequence: Synthetic oligonucleotide
  source 1..21: mol_type = other RNA
  modified_base 1: mod_base = OTHER; note = 2'-O-methylguanosine-3'- phosphorothioate
  modified_base 2: mod_base = OTHER; note = 2'-O-methylcytidine-3'- phosphorothioate
  modified_base 3: mod_base = OTHER; note = 2'-O-methyluridine-3'-phosphate
  modified_base 4: mod_base = OTHER; note = 2'-O-methyladenosine-3'-phosphate
  modified_base 5: mod_base = OTHER; note = 2'-O-methyladenosine-3'-phosphate
  modified_base 6: mod_base = OTHER; note = 2'-O-methyladenosine-3'-phosphate
  modified_base 7: mod_base = OTHER; note = 2'-fluorouridine-3'-phosphate
  modified_base 8: mod_base = OTHER; note = 2'-O-methylcytidine-3'-phosphate
  modified_base 9: mod_base = OTHER; note = 2'-fluoroadenosine-3'-phosphate
  modified_base 10: mod_base = OTHER; note = 2'-fluoroguanosine-3'-phosphate
  modified_base 11: mod_base = OTHER; note = 2'-fluorouridine-3'-phosphate
  modified_base 12: mod_base = OTHER; note = 2'-O-methyladenosine-3'-phosphate
  modified_base 13: mod_base = OTHER; note = 2'-O-methylcytidine-3'-phosphate
  modified_base 14: mod_base = OTHER; note = 2'-O-methyluridine-3'-phosphate
  modified_base 15: mod_base = OTHER; note = 2'-O-methyluridine-3'-phosphate
  modified_base 16: mod_base = OTHER; note = 2'-O-methylcytidine-3'-phosphate
  modified_base 17: mod_base = OTHER; note = 2'-O-methylcytidine-3'-phosphate
  modified_base 18: mod_base = OTHER; note = 2'-O-methyladenosine-3'-phosphate
  modified_base 19: mod_base = OTHER; note = 2'-O-methyladenosine-3'-phosphate
  modified_base 20: mod_base = OTHER; note = 2'-O-methyladenosine-3'-phosphate
  modified_base 21: mod_base = OTHER; note = 2'-O-methylguanosine-3'-phosphate attached to N-[tris(N-acetylgalactosamine-alkyl)-amidodecanoyl)]-4-hydr oxyprolinol Hyp-(N-acetylgalactosamine-alkyl)3
gctaaatcagtacttccaaag

SEQ ID NO: 2775 - RNA, 23 nt, synthetic construct
  misc_feature 1..23: note = Description of Artificial Sequence: Synthetic oligonucleotide
  source 1..23: mol_type = other RNA
  modified_base 1: mod_base = OTHER; note = 2'-O-methylcytidine-3'- phosphorothioate
  modified_base 2: mod_base = OTHER; note = 2'-fluorouridine -3'-phosphorothioate
  modified_base 3: mod_base = OTHER; note = 2'-O-methyluridine-3'-phosphate
  modified_base 4: mod_base = OTHER; note = 2'-O-methyluridine-3'-phosphate
  modified_base 5: mod_base = OTHER; note = 2'-O-methylguanosine-3'-phosphate
  modified_base 6: mod_base = OTHER; note = 2'-fluoroguanosine-3'-phosphate
  modified_base 7: mod_base = OTHER; note = 2'-O-methyladenosine-3'-phosphate
  modified_base 8: mod_base = OTHER; note = 2'-fluoroadenosine-3'-phosphate
  modified_base 9: mod_base = OTHER; note = 2'-fluoroguanosine-3'-phosphate
  modified_base 10: mod_base = OTHER; note = 2'-O-methyluridine-3'-phosphate
  modified_base 11: mod_base = OTHER; note = 2'-O-methyladenosine-3'-phosphate
  modified_base 12: mod_base = OTHER; note = 2'-O-methylcytidine-3'-phosphate
  modified_base 13: mod_base = OTHER; note = 2'-O-methyluridine-3'-phosphate
  modified_base 14: mod_base = OTHER; note = 2'-fluoroguanosine-3'-phosphate
  modified_base 15: mod_base = OTHER; note = 2'-O-methyladenosine-3'-phosphate
  modified_base 16: mod_base = OTHER; note = 2'-fluorouridine-3'-phosphate
  modified_base 17: mod_base = OTHER; note = 2'-O-methyluridine-3'-phosphate
  modified_base 18: mod_base = OTHER; note = 2'-O-methyluridine-3'-phosphate
  modified_base 19: mod_base = OTHER; note = 2'-O-methyladenosine-3'-phosphate
  modified_base 20: mod_base = OTHER; note = 2'-O-methylguanosine-3'-phosphate
  modified_base 21: mod_base = OTHER; note = 2'-O-methylcytidine-3'- phosphorothioate
  modified_base 22: mod_base = OTHER; note = 2'-O-methyladenosine-3'- phosphorothioate
  modified_base 23: mod_base = OTHER; note = 2'-O-methyluridine-3'-phosphate
ctttggaagtactgatttagcat

SEQ ID NO: 2776 - RNA, 21 nt, synthetic construct
  misc_feature 1..21: note = Description of Artificial Sequence: Synthetic oligonucleotide
  source 1..21: mol_type = other RNA
  modified_base 1: mod_base = OTHER; note = 2'-O-methyluridine-3'-phosphorothioate
  modified_base 2: mod_base = OTHER; note = 2'-O-methylguanosine-3'- phosphorothioate
  modified_base 3: mod_base = OTHER; note = 2'-O-methylcytidine-3'-phosphate
  modified_base 4: mod_base = OTHER; note = 2'-O-methyluridine-3'-phosphate
  modified_base 5: mod_base = OTHER; note = 2'-O-methyladenosine-3'-phosphate
  modified_base 6: mod_base = OTHER; note = 2'-O-methyladenosine-3'-phosphate
  modified_base 7: mod_base = OTHER; note = 2'-fluoroadenosine-3'-phosphate
  modified_base 8: mod_base = OTHER; note = 2'-O-methyluridine-3'-phosphate
  modified_base 9: mod_base = OTHER; note = 2'-fluorocytidine-3'-phosphate
  modified_base 10: mod_base = OTHER; note = 2'-fluoroadenosine-3'-phosphate
  modified_base 11: mod_base = OTHER; note = 2'-fluoroguanosine-3'-phosphate
  modified_base 12: mod_base = OTHER; note = 2'-O-methyluridine-3'-phosphate
  modified_base 13: mod_base = OTHER; note = 2'-O-methyladenosine-3'-phosphate
  modified_base 14: mod_base = OTHER; note = 2'-O-methylcytidine-3'-phosphate
  modified_base 15: mod_base = OTHER; note = 2'-O-methyluridine-3'-phosphate
  modified_base 16: mod_base = OTHER; note = 2'-O-methyluridine-3'-phosphate
  modified_base 17: mod_base = OTHER; note = 2'-O-methylcytidine-3'-phosphate
  modified_base 18: mod_base = OTHER; note = 2'-O-methylcytidine-3'-phosphate
  modified_base 19: mod_base = OTHER; note = 2'-O-methyladenosine-3'-phosphate
  modified_base 20: mod_base = OTHER; note = 2'-O-methyladenosine-3'-phosphate
  modified_base 21: mod_base = OTHER; note = 2'-O-methyladenosine-3'-phosphate attached to N-[tris(N-acetylgalactosamine-alkyl)-amidodecanoyl)]-4-hydr oxyprolinol Hyp-(N-acetylgalactosamine-alkyl)3
tgctaaatcagtacttccaaa

SEQ ID NO: 2777 - RNA, 23 nt, synthetic construct
  misc_feature 1..23: note = Description of Artificial Sequence: Synthetic oligonucleotide
  source 1..23: mol_type = other RNA
  modified_base 1: mod_base = OTHER; note = 2'-O-methyluridine-3'-phosphorothioate
  modified_base 2: mod_base = OTHER; note = 2'-fluorouridine -3'-phosphorothioate
  modified_base 3: mod_base = OTHER; note = 2'-O-methyluridine-3'-phosphate
  modified_base 4: mod_base = OTHER; note = 2'-O-methylguanosine-3'-phosphate
  modified_base 5: mod_base = OTHER; note = 2'-O-methylguanosine-3'-phosphate
  modified_base 6: mod_base = OTHER; note = 2'-fluoroadenosine-3'-phosphate
  modified_base 7: mod_base = OTHER; note = 2'-O-methyladenosine-3'-phosphate
  modified_base 8: mod_base = OTHER; note = 2'-fluoroguanosine-3'-phosphate
  modified_base 9: mod_base = OTHER; note = 2'-fluorouridine-3'-phosphate
  modified_base 10: mod_base = OTHER; note = 2'-O-methyladenosine-3'-phosphate
  modified_base 11: mod_base = OTHER; note = 2'-O-methylcytidine-3'-phosphate
  modified_base 12: mod_base = OTHER; note = 2'-O-methyluridine-3'-phosphate
  modified_base 13: mod_base = OTHER; note = 2'-O-methylguanosine-3'-phosphate
  modified_base 14: mod_base = OTHER; note = 2'-fluoroadenosine-3'-phosphate
  modified_base 15: mod_base = OTHER; note = 2'-O-methyluridine-3'-phosphate
  modified_base 16: mod_base = OTHER; note = 2'-fluorouridine-3'-phosphate
  modified_base 17: mod_base = OTHER; note = 2'-O-methyluridine-3'-phosphate
  modified_base 18: mod_base = OTHER; note = 2'-O-methyladenosine-3'-phosphate
  modified_base 19: mod_base = OTHER; note = 2'-O-methylguanosine-3'-phosphate
  modified_base 20: mod_base = OTHER; note = 2'-O-methylcytidine-3'-phosphate
  modified_base 21: mod_base = OTHER; note = 2'-O-methyladenosine-3'- phosphorothioate
  modified_base 22: mod_base = OTHER; note = 2'-O-methyluridine-3'-phosphorothioate
  modified_base 23: mod_base = OTHER; note = 2'-O-methylguanosine-3'-phosphate
tttggaagtactgatttagcatg

SEQ ID NO: 2778 - RNA, 21 nt, synthetic construct
  misc_feature 1..21: note = Description of Artificial Sequence: Synthetic oligonucleotide
  source 1..21: mol_type = other RNA
  modified_base 1: mod_base = OTHER; note = 2'-O-methyluridine-3'-phosphorothioate
  modified_base 2: mod_base = OTHER; note = 2'-O-methylcytidine-3'- phosphorothioate
  modified_base 3: mod_base = OTHER; note = 2'-O-methyladenosine-3'-phosphate
  modified_base 4: mod_base = OTHER; note = 2'-O-methylguanosine-3'-phosphate
  modified_base 5: mod_base = OTHER; note = 2'-O-methylcytidine-3'-phosphate
  modified_base 6: mod_base = OTHER; note = 2'-O-methyladenosine-3'-phosphate
  modified_base 7: mod_base = OTHER; note = 2'-fluorouridine-3'-phosphate
  modified_base 8: mod_base = OTHER; note = 2'-O-methylguanosine-3'-phosphate
  modified_base 9: mod_base = OTHER; note = 2'-fluorocytidine-3'-phosphate
  modified_base 10: mod_base = OTHER; note = 2'-fluorocytidine-3'-phosphate
  modified_base 11: mod_base = OTHER; note = 2'-fluoroadenosine-3'-phosphate
  modified_base 12: mod_base = OTHER; note = 2'-O-methyladenosine-3'-phosphate
  modified_base 13: mod_base = OTHER; note = 2'-O-methyluridine-3'-phosphate
  modified_base 14: mod_base = OTHER; note = 2'-O-methyladenosine-3'-phosphate
  modified_base 15: mod_base = OTHER; note = 2'-O-methyluridine-3'-phosphate
  modified_base 16: mod_base = OTHER; note = 2'-O-methylguanosine-3'-phosphate
  modified_base 17: mod_base = OTHER; note = 2'-O-methyluridine-3'-phosphate
  modified_base 18: mod_base = OTHER; note = 2'-O-methylguanosine-3'-phosphate
  modified_base 19: mod_base = OTHER; note = 2'-O-methyluridine-3'-phosphate
  modified_base 20: mod_base = OTHER; note = 2'-O-methylguanosine-3'-phosphate
  modified_base 21: mod_base = OTHER; note = 2'-O-methylguanosine-3'-phosphate attached to N-[tris(N-acetylgalactosamine-alkyl)-amidodecanoyl)]-4-hydr oxyprolinol Hyp-(N-acetylgalactosamine-alkyl)3
tcagcatgccaatatgtgtgg

SEQ ID NO: 2779 - RNA, 23 nt, synthetic construct
  misc_feature 1..23: note = Description of Artificial Sequence: Synthetic oligonucleotide
  source 1..23: mol_type = other RNA
  modified_base 1: mod_base = OTHER; note = 2'-O-methylcytidine-3'- phosphorothioate
  modified_base 2: mod_base = OTHER; note = 2'-fluorocytidine-3'-phosphorothioate
  modified_base 3: mod_base = OTHER; note = 2'-O-methyladenosine-3'-phosphate
  modified_base 4: mod_base = OTHER; note = 2'-O-methylcytidine-3'-phosphate
  modified_base 5: mod_base = OTHER; note = 2'-O-methyladenosine-3'-phosphate
  modified_base 6: mod_base = OTHER; note = 2'-fluorocytidine-3'-phosphate
  modified_base 7: mod_base = OTHER; note = 2'-O-methyladenosine-3'-phosphate
  modified_base 8: mod_base = OTHER; note = 2'-fluorouridine-3'-phosphate
  modified_base 9: mod_base = OTHER; note = 2'-fluoroadenosine-3'-phosphate
  modified_base 10: mod_base = OTHER; note = 2'-O-methyluridine-3'-phosphate
  modified_base 11: mod_base = OTHER; note = 2'-O-methyluridine-3'-phosphate
  modified_base 12: mod_base = OTHER; note = 2'-O-methylguanosine-3'-phosphate
  modified_base 13: mod_base = OTHER; note = 2'-O-methylguanosine-3'-phosphate
  modified_base 14: mod_base = OTHER; note = 2'-fluorocytidine-3'-phosphate
  modified_base 15: mod_base = OTHER; note = 2'-O-methyladenosine-3'-phosphate
  modified_base 16: mod_base = OTHER; note = 2'-fluorouridine-3'-phosphate
  modified_base 17: mod_base = OTHER; note = 2'-O-methylguanosine-3'-phosphate
  modified_base 18: mod_base = OTHER; note = 2'-O-methylcytidine-3'-phosphate
  modified_base 19: mod_base = OTHER; note = 2'-O-methyluridine-3'-phosphate
  modified_base 20: mod_base = OTHER; note = 2'-O-methylguanosine-3'-phosphate
  modified_base 21: mod_base = OTHER; note = 2'-O-methyladenosine-3'- phosphorothioate
  modified_base 22: mod_base = OTHER; note = 2'-O-methylcytidine-3'- phosphorothioate
  modified_base 23: mod_base = OTHER; note = 2'-O-methylcytidine-3'-phosphate
ccacacatattggcatgctgacc

SEQ ID NO: 2780 - RNA, 21 nt, synthetic construct
  misc_feature 1..21: note = Description of Artificial Sequence: Synthetic oligonucleotide
  source 1..21: mol_type = other RNA
  modified_base 1: mod_base = OTHER; note = 2'-O-methylcytidine-3'- phosphorothioate
  modified_base 2: mod_base = OTHER; note = 2'-O-methyladenosine-3'- phosphorothioate
  modified_base 3: mod_base = OTHER; note = 2'-O-methylguanosine-3'-phosphate
  modified_base 4: mod_base = OTHER; note = 2'-O-methylcytidine-3'-phosphate
  modified_base 5: mod_base = OTHER; note = 2'-O-methyladenosine-3'-phosphate
  modified_base 6: mod_base = OTHER; note = 2'-O-methyluridine-3'-phosphate
  modified_base 7: mod_base = OTHER; note = 2'-fluoroguanosine-3'-phosphate
  modified_base 8: mod_base = OTHER; note = 2'-O-methylcytidine-3'-phosphate
  modified_base 9: mod_base = OTHER; note = 2'-fluorocytidine-3'-phosphate
  modified_base 10: mod_base = OTHER; note = 2'-fluoroadenosine-3'-phosphate
  modified_base 11: mod_base = OTHER; note = 2'-fluoroadenosine-3'-phosphate
  modified_base 12: mod_base = OTHER; note = 2'-O-methyluridine-3'-phosphate
  modified_base 13: mod_base = OTHER; note = 2'-O-methyladenosine-3'-phosphate
  modified_base 14: mod_base = OTHER; note = 2'-O-methyluridine-3'-phosphate
  modified_base 15: mod_base = OTHER; note = 2'-O-methylguanosine-3'-phosphate
  modified_base 16: mod_base = OTHER; note = 2'-O-methyluridine-3'-phosphate
  modified_base 17: mod_base = OTHER; note = 2'-O-methylguanosine-3'-phosphate
  modified_base 18: mod_base = OTHER; note = 2'-O-methyluridine-3'-phosphate
  modified_base 19: mod_base = OTHER; note = 2'-O-methylguanosine-3'-phosphate
  modified_base 20: mod_base = OTHER; note = 2'-O-methylguanosine-3'-phosphate
  modified_base 21: mod_base = OTHER; note = 2'-O-methylguanosine-3'-phosphate attached to N-[tris(N-acetylgalactosamine-alkyl)-amidodecanoyl)]-4-hydr oxyprolinol Hyp-(N-acetylgalactosamine-alkyl)3
cagcatgccaatatgtgtggg

SEQ ID NO: 2781 - RNA, 23 nt, synthetic construct
  misc_feature 1..23: note = Description of Artificial Sequence: Synthetic oligonucleotide
  source 1..23: mol_type = other RNA
  modified_base 1: mod_base = OTHER; note = 2'-O-methylcytidine-3'- phosphorothioate
  modified_base 2: mod_base = OTHER; note = 2'-fluorocytidine-3'-phosphorothioate
  modified_base 3: mod_base = OTHER; note = 2'-O-methylcytidine-3'-phosphate
  modified_base 4: mod_base = OTHER; note = 2'-O-methyladenosine-3'-phosphate
  modified_base 5: mod_base = OTHER; note = 2'-O-methylcytidine-3'-phosphate
  modified_base 6: mod_base = OTHER; note = 2'-fluoroadenosine-3'-phosphate
  modified_base 7: mod_base = OTHER; note = 2'-O-methylcytidine-3'-phosphate
  modified_base 8: mod_base = OTHER; note = 2'-fluoroadenosine-3'-phosphate
  modified_base 9: mod_base = OTHER; note = 2'-fluorouridine-3'-phosphate
  modified_base 10: mod_base = OTHER; note = 2'-O-methyladenosine-3'-phosphate
  modified_base 11: mod_base = OTHER; note = 2'-O-methyluridine-3'-phosphate
  modified_base 12: mod_base = OTHER; note = 2'-O-methyluridine-3'-phosphate
  modified_base 13: mod_base = OTHER; note = 2'-O-methylguanosine-3'-phosphate
  modified_base 14: mod_base = OTHER; note = 2'-fluoroguanosine-3'-phosphate
  modified_base 15: mod_base = OTHER; note = 2'-O-methylcytidine-3'-phosphate
  modified_base 16: mod_base = OTHER; note = 2'-fluoroadenosine-3'-phosphate
  modified_base 17: mod_base = OTHER; note = 2'-O-methyluridine-3'-phosphate
  modified_base 18: mod_base = OTHER; note = 2'-O-methylguanosine-3'-phosphate
  modified_base 19: mod_base = OTHER; note = 2'-O-methylcytidine-3'-phosphate
  modified_base 20: mod_base = OTHER; note = 2'-O-methyluridine-3'-phosphate
  modified_base 21: mod_base = OTHER; note = 2'-O-methylguanosine-3'- phosphorothioate
  modified_base 22: mod_base = OTHER; note = 2'-O-methyladenosine-3'- phosphorothioate
  modified_base 23: mod_base = OTHER; note = 2'-O-methylcytidine-3'-phosphate
cccacacatattggcatgctgac

SEQ ID NO: 2782 - RNA, 21 nt, synthetic construct
  misc_feature 1..21: note = Description of Artificial Sequence: Synthetic oligonucleotide
  source 1..21: mol_type = other RNA
  modified_base 1: mod_base = OTHER; note = 2'-O-methyladenosine-3'- phosphorothioate
  modified_base 2: mod_base = OTHER; note = 2'-O-methylguanosine-3'- phosphorothioate
  modified_base 3: mod_base = OTHER; note = 2'-O-methylguanosine-3'-phosphate
  modified_base 4: mod_base = OTHER; note = 2'-O-methylguanosine-3'-phosphate
  modified_base 5: mod_base = OTHER; note = 2'-O-methyluridine-3'-phosphate
  modified_base 6: mod_base = OTHER; note = 2'-O-methylcytidine-3'-phosphate
  modified_base 7: mod_base = OTHER; note = 2'-fluoroadenosine-3'-phosphate
  modified_base 8: mod_base = OTHER; note = 2'-O-methylguanosine-3'-phosphate
  modified_base 9: mod_base = OTHER; note = 2'-fluorocytidine-3'-phosphate
  modified_base 10: mod_base = OTHER; note = 2'-fluoroadenosine-3'-phosphate
  modified_base 11: mod_base = OTHER; note = 2'-fluorouridine-3'-phosphate
  modified_base 12: mod_base = OTHER; note = 2'-O-methylguanosine-3'-phosphate
  modified_base 13: mod_base = OTHER; note = 2'-O-methylcytidine-3'-phosphate
  modified_base 14: mod_base = OTHER; note = 2'-O-methylcytidine-3'-phosphate
  modified_base 15: mod_base = OTHER; note = 2'-O-methyladenosine-3'-phosphate
  modified_base 16: mod_base = OTHER; note = 2'-O-methyladenosine-3'-phosphate
  modified_base 17: mod_base = OTHER; note = 2'-O-methyluridine-3'-phosphate
  modified_base 18: mod_base = OTHER; note = 2'-O-methyladenosine-3'-phosphate
  modified_base 19: mod_base = OTHER; note = 2'-O-methyluridine-3'-phosphate
  modified_base 20: mod_base = OTHER; note = 2'-O-methylguanosine-3'-phosphate
  modified_base 21: mod_base = OTHER; note = 2'-O-methyluridine-3'-phosphate attached to N-[tris(N-acetylgalactosamine-alkyl)-amidodecanoyl)]-4-hydr oxyprolinol Hyp-(N-acetylgalactosamine-alkyl)3
agggtcagcatgccaatatgt

SEQ ID NO: 2783 - RNA, 23 nt, synthetic construct
  misc_feature 1..23: note = Description of Artificial Sequence: Synthetic oligonucleotide
  source 1..23: mol_type = other RNA
  modified_base 1: mod_base = OTHER; note = 2'-O-methyladenosine-3'- phosphorothioate
  modified_base 2: mod_base = OTHER; note = 2'-fluorocytidine-3'-phosphorothioate
  modified_base 3: mod_base = OTHER; note = 2'-O-methyladenosine-3'-phosphate
  modified_base 4: mod_base = OTHER; note = 2'-O-methyluridine-3'-phosphate
  modified_base 5: mod_base = OTHER; note = 2'-O-methyladenosine-3'-phosphate
  modified_base 6: mod_base = OTHER; note = 2'-fluorouridine-3'-phosphate
  modified_base 7: mod_base = OTHER; note = 2'-O-methyluridine-3'-phosphate
  modified_base 8: mod_base = OTHER; note = 2'-fluoroguanosine-3'-phosphate
  modified_base 9: mod_base = OTHER; note = 2'-fluoroguanosine-3'-phosphate
  modified_base 10: mod_base = OTHER; note = 2'-O-methylcytidine-3'-phosphate
  modified_base 11: mod_base = OTHER; note = 2'-O-methyladenosine-3'-phosphate
  modified_base 12: mod_base = OTHER; note = 2'-O-methyluridine-3'-phosphate
  modified_base 13: mod_base = OTHER; note = 2'-O-methylguanosine-3'-phosphate
  modified_base 14: mod_base = OTHER; note = 2'-fluorocytidine-3'-phosphate
  modified_base 15: mod_base = OTHER; note = 2'-O-methyluridine-3'-phosphate
  modified_base 16: mod_base = OTHER; note = 2'-fluoroguanosine-3'-phosphate
  modified_base 17: mod_base = OTHER; note = 2'-O-methyladenosine-3'-phosphate
  modified_base 18: mod_base = OTHER; note = 2'-O-methylcytidine-3'-phosphate
  modified_base 19: mod_base = OTHER; note = 2'-O-methylcytidine-3'-phosphate
  modified_base 20: mod_base = OTHER; note = 2'-O-methylcytidine-3'-phosphate
  modified_base 21: mod_base = OTHER; note = 2'-O-methyluridine-3'-phosphorothioate
  modified_base 22: mod_base = OTHER; note = 2'-O-methylcytidine-3'- phosphorothioate
  modified_base 23: mod_base = OTHER; note = 2'-O-methyluridine-3'-phosphate
acatattggcatgctgaccctct

SEQ ID NO: 2784 - RNA, 21 nt, synthetic construct
  misc_feature 1..21: note = Description of Artificial Sequence: Synthetic oligonucleotide
  source 1..21: mol_type = other RNA
  modified_base 1: mod_base = OTHER; note = 2'-O-methylguanosine-3'- phosphorothioate
  modified_base 2: mod_base = OTHER; note = 2'-O-methyladenosine-3'- phosphorothioate
  modified_base 3: mod_base = OTHER; note = 2'-O-methylguanosine-3'-phosphate
  modified_base 4: mod_base = OTHER; note = 2'-O-methylguanosine-3'-phosphate
  modified_base 5: mod_base = OTHER; note = 2'-O-methylguanosine-3'-phosphate
  modified_base 6: mod_base = OTHER; note = 2'-O-methyluridine-3'-phosphate
  modified_base 7: mod_base = OTHER; note = 2'-fluorocytidine-3'-phosphate
  modified_base 8: mod_base = OTHER; note = 2'-O-methyladenosine-3'-phosphate
  modified_base 9: mod_base = OTHER; note = 2'-fluoroguanosine-3'-phosphate
  modified_base 10: mod_base = OTHER; note = 2'-fluorocytidine-3'-phosphate
  modified_base 11: mod_base = OTHER; note = 2'-fluoroadenosine-3'-phosphate
  modified_base 12: mod_base = OTHER; note = 2'-O-methyluridine-3'-phosphate
  modified_base 13: mod_base = OTHER; note = 2'-O-methylguanosine-3'-phosphate
  modified_base 14: mod_base = OTHER; note = 2'-O-methylcytidine-3'-phosphate
  modified_base 15: mod_base = OTHER; note = 2'-O-methylcytidine-3'-phosphate
  modified_base 16: mod_base = OTHER; note = 2'-O-methyladenosine-3'-phosphate
  modified_base 17: mod_base = OTHER; note = 2'-O-methyladenosine-3'-phosphate
  modified_base 18: mod_base = OTHER; note = 2'-O-methyluridine-3'-phosphate
  modified_base 19: mod_base = OTHER; note = 2'-O-methyladenosine-3'-phosphate
  modified_base 20: mod_base = OTHER; note = 2'-O-methyluridine-3'-phosphate
  modified_base 21: mod_base = OTHER; note = 2'-O-methylguanosine-3'-phosphate attached to N-[tris(N-acetylgalactosamine-alkyl)-amidodecanoyl)]-4-hydr oxyprolinol Hyp-(N-acetylgalactosamine-alkyl)3
gagggtcagcatgccaatatg

SEQ ID NO: 2785 - RNA, 23 nt, synthetic construct
  misc_feature 1..23: note = Description of Artificial Sequence: Synthetic oligonucleotide
  source 1..23: mol_type = other RNA
  modified_base 1: mod_base = OTHER; note = 2'-O-methylcytidine-3'- phosphorothioate
  modified_base 2: mod_base = OTHER; note = 2'-fluoroadenosine-3'-phosphorothioate
  modified_base 3: mod_base = OTHER; note = 2'-O-methyluridine-3'-phosphate
  modified_base 4: mod_base = OTHER; note = 2'-O-methyladenosine-3'-phosphate
  modified_base 5: mod_base = OTHER; note = 2'-O-methyluridine-3'-phosphate
  modified_base 6: mod_base = OTHER; note = 2'-fluorouridine-3'-phosphate
  modified_base 7: mod_base = OTHER; note = 2'-O-methylguanosine-3'-phosphate
  modified_base 8: mod_base = OTHER; note = 2'-fluoroguanosine-3'-phosphate
  modified_base 9: mod_base = OTHER; note = 2'-fluorocytidine-3'-phosphate
  modified_base 10: mod_base = OTHER; note = 2'-O-methyladenosine-3'-phosphate
  modified_base 11: mod_base = OTHER; note = 2'-O-methyluridine-3'-phosphate
  modified_base 12: mod_base = OTHER; note = 2'-O-methylguanosine-3'-phosphate
  modified_base 13: mod_base = OTHER; note = 2'-O-methylcytidine-3'-phosphate
  modified_base 14: mod_base = OTHER; note = 2'-fluorouridine-3'-phosphate
  modified_base 15: mod_base = OTHER; note = 2'-O-methylguanosine-3'-phosphate
  modified_base 16: mod_base = OTHER; note = 2'-fluoroadenosine-3'-phosphate
  modified_base 17: mod_base = OTHER; note = 2'-O-methylcytidine-3'-phosphate
  modified_base 18: mod_base = OTHER; note = 2'-O-methylcytidine-3'-phosphate
  modified_base 19: mod_base = OTHER; note = 2'-O-methylcytidine-3'-phosphate
  modified_base 20: mod_base = OTHER; note = 2'-O-methyluridine-3'-phosphate
  modified_base 21: mod_base = OTHER; note = 2'-O-methylcytidine-3'- phosphorothioate
  modified_base 22: mod_base = OTHER; note = 2'-O-methyluridine-3'-phosphorothioate
  modified_base 23: mod_base = OTHER; note = 2'-O-methylguanosine-3'-phosphate
catattggcatgctgaccctctg

SEQ ID NO: 2786 - RNA, 21 nt, synthetic construct
  misc_feature 1..21: note = Description of Artificial Sequence: Synthetic oligonucleotide
  source 1..21: mol_type = other RNA
  modified_base 1: mod_base = OTHER; note = 2'-O-methylguanosine-3'- phosphorothioate
  modified_base 2: mod_base = OTHER; note = 2'-O-methylcytidine-3'- phosphorothioate
  modified_base 3: mod_base = OTHER; note = 2'-O-methyladenosine-3'-phosphate
  modified_base 4: mod_base = OTHER; note = 2'-O-methyluridine-3'-phosphate
  modified_base 5: mod_base = OTHER; note = 2'-O-methyladenosine-3'-phosphate
  modified_base 6: mod_base = OTHER; note = 2'-O-methyluridine-3'-phosphate
  modified_base 7: mod_base = OTHER; note = 2'-fluoroguanosine-3'-phosphate
  modified_base 8: mod_base = OTHER; note = 2'-O-methyluridine-3'-phosphate
  modified_base 9: mod_base = OTHER; note = 2'-fluoroguanosine-3'-phosphate
  modified_base 10: mod_base = OTHER; note = 2'-fluoroguanosine-3'-phosphate
  modified_base 11: mod_base = OTHER; note = 2'-fluorocytidine-3'-phosphate
  modified_base 12: mod_base = OTHER; note = 2'-O-methyluridine-3'-phosphate
  modified_base 13: mod_base = OTHER; note = 2'-O-methyladenosine-3'-phosphate
  modified_base 14: mod_base = OTHER; note = 2'-O-methyladenosine-3'-phosphate
  modified_base 15: mod_base = OTHER; note = 2'-O-methyladenosine-3'-phosphate
  modified_base 16: mod_base = OTHER; note = 2'-O-methylguanosine-3'-phosphate
  modified_base 17: mod_base = OTHER; note = 2'-O-methylcytidine-3'-phosphate
  modified_base 18: mod_base = OTHER; note = 2'-O-methyladenosine-3'-phosphate
  modified_base 19: mod_base = OTHER; note = 2'-O-methyladenosine-3'-phosphate
  modified_base 20: mod_base = OTHER; note = 2'-O-methyluridine-3'-phosphate
  modified_base 21: mod_base = OTHER; note = 2'-O-methyladenosine-3'-phosphate attached to N-[tris(N-acetylgalactosamine-alkyl)-amidodecanoyl)]-4-hydr oxyprolinol Hyp-(N-acetylgalactosamine-alkyl)3
gcatatgtggctaaagcaata

SEQ ID NO: 2787 - RNA, 23 nt, synthetic construct
  misc_feature 1..23: note = Description of Artificial Sequence: Synthetic oligonucleotide
  source 1..23: mol_type = other RNA
  modified_base 1: mod_base = OTHER; note = 2'-O-methyluridine-3'-phosphorothioate
  modified_base 2: mod_base = OTHER; note = 2'-fluoroadenosine-3'-phosphorothioate
  modified_base 3: mod_base = OTHER; note = 2'-O-methyluridine-3'-phosphate
  modified_base 4: mod_base = OTHER; note = 2'-O-methyluridine-3'-phosphate
  modified_base 5: mod_base = OTHER; note = 2'-O-methylguanosine-3'-phosphate
  modified_base 6: mod_base = OTHER; note = 2'-fluorocytidine-3'-phosphate
  modified_base 7: mod_base = OTHER; note = 2'-O-methyluridine-3'-phosphate
  modified_base 8: mod_base = OTHER; note = 2'-fluorouridine-3'-phosphate
  modified_base 9: mod_base = OTHER; note = 2'-fluorouridine-3'-phosphate
  modified_base 10: mod_base = OTHER; note = 2'-O-methyladenosine-3'-phosphate
  modified_base 11: mod_base = OTHER; note = 2'-O-methylguanosine-3'-phosphate
  modified_base 12: mod_base = OTHER; note = 2'-O-methylcytidine-3'-phosphate
  modified_base 13: mod_base = OTHER; note = 2'-O-methylcytidine-3'-phosphate
  modified_base 14: mod_base = OTHER; note = 2'-fluoroadenosine-3'-phosphate
  modified_base 15: mod_base = OTHER; note = 2'-O-methylcytidine-3'-phosphate
  modified_base 16: mod_base = OTHER; note = 2'-fluoroadenosine-3'-phosphate
  modified_base 17: mod_base = OTHER; note = 2'-O-methyluridine-3'-phosphate
  modified_base 18: mod_base = OTHER; note = 2'-O-methyladenosine-3'-phosphate
  modified_base 19: mod_base = OTHER; note = 2'-O-methyluridine-3'-phosphate
  modified_base 20: mod_base = OTHER; note = 2'-O-methylguanosine-3'-phosphate
  modified_base 21: mod_base = OTHER; note = 2'-O-methylcytidine-3'- phosphorothioate
  modified_base 22: mod_base = OTHER; note = 2'-O-methyladenosine-3'- phosphorothioate
  modified_base 23: mod_base = OTHER; note = 2'-O-methylguanosine-3'-phosphate
tattgctttagccacatatgcag

SEQ ID NO: 2788 - RNA, 21 nt, synthetic construct
  misc_feature 1..21: note = Description of Artificial Sequence: Synthetic oligonucleotide
  source 1..21: mol_type = other RNA
  modified_base 1: mod_base = OTHER; note = 2'-O-methylcytidine-3'- phosphorothioate
  modified_base 2: mod_base = OTHER; note = 2'-O-methyladenosine-3'- phosphorothioate
  modified_base 3: mod_base = OTHER; note = 2'-O-methyluridine-3'-phosphate
  modified_base 4: mod_base = OTHER; note = 2'-O-methyladenosine-3'-phosphate
  modified_base 5: mod_base = OTHER; note = 2'-O-methyluridine-3'-phosphate
  modified_base 6: mod_base = OTHER; note = 2'-O-methylguanosine-3'-phosphate
  modified_base 7: mod_base = OTHER; note = 2'-fluorouridine-3'-phosphate
  modified_base 8: mod_base = OTHER; note = 2'-O-methylguanosine-3'-phosphate
  modified_base 9: mod_base = OTHER; note = 2'-fluoroguanosine-3'-phosphate
  modified_base 10: mod_base = OTHER; note = 2'-fluorocytidine-3'-phosphate
  modified_base 11: mod_base = OTHER; note = 2'-fluorouridine-3'-phosphate
  modified_base 12: mod_base = OTHER; note = 2'-O-methyladenosine-3'-phosphate
  modified_base 13: mod_base = OTHER; note = 2'-O-methyladenosine-3'-phosphate
  modified_base 14: mod_base = OTHER; note = 2'-O-methyladenosine-3'-phosphate
  modified_base 15: mod_base = OTHER; note = 2'-O-methylguanosine-3'-phosphate
  modified_base 16: mod_base = OTHER; note = 2'-O-methylcytidine-3'-phosphate
  modified_base 17: mod_base = OTHER; note = 2'-O-methyladenosine-3'-phosphate
  modified_base 18: mod_base = OTHER; note = 2'-O-methyladenosine-3'-phosphate
  modified_base 19: mod_base = OTHER; note = 2'-O-methyluridine-3'-phosphate
  modified_base 20: mod_base = OTHER; note = 2'-O-methyladenosine-3'-phosphate
  modified_base 21: mod_base = OTHER; note = 2'-O-methylguanosine-3'-phosphate attached to N-[tris(N-acetylgalactosamine-alkyl)-amidodecanoyl)]-4-hydr oxyprolinol Hyp-(N-acetylgalactosamine-alkyl)3
catatgtggctaaagcaatag

SEQ ID NO: 2789 - RNA, 23 nt, synthetic construct
  misc_feature 1..23: note = Description of Artificial Sequence: Synthetic oligonucleotide
  source 1..23: mol_type = other RNA
  modified_base 1: mod_base = OTHER; note = 2'-O-methylcytidine-3'- phosphorothioate
  modified_base 2: mod_base = OTHER; note = 2'-fluorouridine -3'-phosphorothioate
  modified_base 3: mod_base = OTHER; note = 2'-O-methyladenosine-3'-phosphate
  modified_base 4: mod_base = OTHER; note = 2'-O-methyluridine-3'-phosphate
  modified_base 5: mod_base = OTHER; note = 2'-O-methyluridine-3'-phosphate
  modified_base 6: mod_base = OTHER; note = 2'-fluoroguanosine-3'-phosphate
  modified_base 7: mod_base = OTHER; note = 2'-O-methylcytidine-3'-phosphate
  modified_base 8: mod_base = OTHER; note = 2'-fluorouridine-3'-phosphate
  modified_base 9: mod_base = OTHER; note = 2'-fluorouridine-3'-phosphate
  modified_base 10: mod_base = OTHER; note = 2'-O-methyluridine-3'-phosphate
  modified_base 11: mod_base = OTHER; note = 2'-O-methyladenosine-3'-phosphate
  modified_base 12: mod_base = OTHER; note = 2'-O-methylguanosine-3'-phosphate
  modified_base 13: mod_base = OTHER; note = 2'-O-methylcytidine-3'-phosphate
  modified_base 14: mod_base = OTHER; note = 2'-fluorocytidine-3'-phosphate
  modified_base 15: mod_base = OTHER; note = 2'-O-methyladenosine-3'-phosphate
  modified_base 16: mod_base = OTHER; note = 2'-fluorocytidine-3'-phosphate
  modified_base 17: mod_base = OTHER; note = 2'-O-methyladenosine-3'-phosphate
  modified_base 18: mod_base = OTHER; note = 2'-O-methyluridine-3'-phosphate
  modified_base 19: mod_base = OTHER; note = 2'-O-methyladenosine-3'-phosphate
  modified_base 20: mod_base = OTHER; note = 2'-O-methyluridine-3'-phosphate
  modified_base 21: mod_base = OTHER; note = 2'-O-methylguanosine-3'- phosphorothioate
  modified_base 22: mod_base = OTHER; note = 2'-O-methylcytidine-3'- phosphorothioate
  modified_base 23: mod_base = OTHER; note = 2'-O-methyladenosine-3'-phosphate
ctattgctttagccacatatgca

SEQ ID NO: 2790 - RNA, 21 nt, synthetic construct
  misc_feature 1..21: note = Description of Artificial Sequence: Synthetic oligonucleotide
  source 1..21: mol_type = other RNA
  modified_base 1: mod_base = OTHER; note = 2'-O-methyluridine-3'-phosphorothioate
  modified_base 2: mod_base = OTHER; note = 2'-O-methylguanosine-3'- phosphorothioate
  modified_base 3: mod_base = OTHER; note = 2'-O-methylcytidine-3'-phosphate
  modified_base 4: mod_base = OTHER; note = 2'-O-methyluridine-3'-phosphate
  modified_base 5: mod_base = OTHER; note = 2'-O-methylguanosine-3'-phosphate
  modified_base 6: mod_base = OTHER; note = 2'-O-methylcytidine-3'-phosphate
  modified_base 7: mod_base = OTHER; note = 2'-fluoroadenosine-3'-phosphate
  modified_base 8: mod_base = OTHER; note = 2'-O-methyluridine-3'-phosphate
  modified_base 9: mod_base = OTHER; note = 2'-fluoroadenosine-3'-phosphate
  modified_base 10: mod_base = OTHER; note = 2'-fluorouridine-3'-phosphate
  modified_base 11: mod_base = OTHER; note = 2'-fluoroguanosine-3'-phosphate
  modified_base 12: mod_base = OTHER; note = 2'-O-methyluridine-3'-phosphate
  modified_base 13: mod_base = OTHER; note = 2'-O-methylguanosine-3'-phosphate
  modified_base 14: mod_base = OTHER; note = 2'-O-methylguanosine-3'-phosphate
  modified_base 15: mod_base = OTHER; note = 2'-O-methylcytidine-3'-phosphate
  modified_base 16: mod_base = OTHER; note = 2'-O-methyluridine-3'-phosphate
  modified_base 17: mod_base = OTHER; note = 2'-O-methyladenosine-3'-phosphate
  modified_base 18: mod_base = OTHER; note = 2'-O-methyladenosine-3'-phosphate
  modified_base 19: mod_base = OTHER; note = 2'-O-methyladenosine-3'-phosphate
  modified_base 20: mod_base = OTHER; note = 2'-O-methylguanosine-3'-phosphate
  modified_base 21: mod_base = OTHER; note = 2'-O-methylcytidine-3'-phosphate attached to N-[tris(N-acetylgalactosamine-alkyl)-amidodecanoyl)]-4-hydr oxyprolinol Hyp-(N-acetylgalactosamine-alkyl)3
tgctgcatatgtggctaaagc

SEQ ID NO: 2791 - RNA, 23 nt, synthetic construct
  misc_feature 1..23: note = Description of Artificial Sequence: Synthetic oligonucleotide
  source 1..23: mol_type = other RNA
  modified_base 1: mod_base = OTHER; note = 2'-O-methylguanosine-3'- phosphorothioate
  modified_base 2: mod_base = OTHER; note = 2'-fluorocytidine-3'-phosphorothioate
  modified_base 3: mod_base = OTHER; note = 2'-O-methyluridine-3'-phosphate
  modified_base 4: mod_base = OTHER; note = 2'-O-methyluridine-3'-phosphate
  modified_base 5: mod_base = OTHER; note = 2'-O-methyluridine-3'-phosphate
  modified_base 6: mod_base = OTHER; note = 2'-fluoroadenosine-3'-phosphate
  modified_base 7: mod_base = OTHER; note = 2'-O-methylguanosine-3'-phosphate
  modified_base 8: mod_base = OTHER; note = 2'-fluorocytidine-3'-phosphate
  modified_base 9: mod_base = OTHER; note = 2'-fluorocytidine-3'-phosphate
  modified_base 10: mod_base = OTHER; note = 2'-O-methyladenosine-3'-phosphate
  modified_base 11: mod_base = OTHER; note = 2'-O-methylcytidine-3'-phosphate
  modified_base 12: mod_base = OTHER; note = 2'-O-methyladenosine-3'-phosphate
  modified_base 13: mod_base = OTHER; note = 2'-O-methyluridine-3'-phosphate
  modified_base 14: mod_base = OTHER; note = 2'-fluoroadenosine-3'-phosphate
  modified_base 15: mod_base = OTHER; note = 2'-O-methyluridine-3'-phosphate
  modified_base 16: mod_base = OTHER; note = 2'-fluoroguanosine-3'-phosphate
  modified_base 17: mod_base = OTHER; note = 2'-O-methylcytidine-3'-phosphate
  modified_base 18: mod_base = OTHER; note = 2'-O-methyladenosine-3'-phosphate
  modified_base 19: mod_base = OTHER; note = 2'-O-methylguanosine-3'-phosphate
  modified_base 20: mod_base = OTHER; note = 2'-O-methylcytidine-3'-phosphate
  modified_base 21: mod_base = OTHER; note = 2'-O-methyladenosine-3'- phosphorothioate
  modified_base 22: mod_base = OTHER; note = 2'-O-methyladenosine-3'- phosphorothioate
  modified_base 23: mod_base = OTHER; note = 2'-O-methylguanosine-3'-phosphate
gctttagccacatatgcagcaag

SEQ ID NO: 2792 - RNA, 21 nt, synthetic construct
  misc_feature 1..21: note = Description of Artificial Sequence: Synthetic oligonucleotide
  source 1..21: mol_type = other RNA
  modified_base 1: mod_base = OTHER; note = 2'-O-methyluridine-3'-phosphorothioate
  modified_base 2: mod_base = OTHER; note = 2'-O-methyluridine-3'-phosphorothioate
  modified_base 3: mod_base = OTHER; note = 2'-O-methylguanosine-3'-phosphate
  modified_base 4: mod_base = OTHER; note = 2'-O-methylcytidine-3'-phosphate
  modified_base 5: mod_base = OTHER; note = 2'-O-methyluridine-3'-phosphate
  modified_base 6: mod_base = OTHER; note = 2'-O-methylguanosine-3'-phosphate
  modified_base 7: mod_base = OTHER; note = 2'-fluorocytidine-3'-phosphate
  modified_base 8: mod_base = OTHER; note = 2'-O-methyladenosine-3'-phosphate
  modified_base 9: mod_base = OTHER; note = 2'-fluorouridine-3'-phosphate
  modified_base 10: mod_base = OTHER; note = 2'-fluoroadenosine-3'-phosphate
  modified_base 11: mod_base = OTHER; note = 2'-fluorouridine-3'-phosphate
  modified_base 12: mod_base = OTHER; note = 2'-O-methylguanosine-3'-phosphate
  modified_base 13: mod_base = OTHER; note = 2'-O-methyluridine-3'-phosphate
  modified_base 14: mod_base = OTHER; note = 2'-O-methylguanosine-3'-phosphate
  modified_base 15: mod_base = OTHER; note = 2'-O-methylguanosine-3'-phosphate
  modified_base 16: mod_base = OTHER; note = 2'-O-methylcytidine-3'-phosphate
  modified_base 17: mod_base = OTHER; note = 2'-O-methyluridine-3'-phosphate
  modified_base 18: mod_base = OTHER; note = 2'-O-methyladenosine-3'-phosphate
  modified_base 19: mod_base = OTHER; note = 2'-O-methyladenosine-3'-phosphate
  modified_base 20: mod_base = OTHER; note = 2'-O-methyladenosine-3'-phosphate
  modified_base 21: mod_base = OTHER; note = 2'-O-methylguanosine-3'-phosphate attached to N-[tris(N-acetylgalactosamine-alkyl)-amidodecanoyl)]-4-hydr oxyprolinol Hyp-(N-acetylgalactosamine-alkyl)3
ttgctgcatatgtggctaaag

SEQ ID NO: 2793 - RNA, 23 nt, synthetic construct
  misc_feature 1..23: note = Description of Artificial Sequence: Synthetic oligonucleotide
  source 1..23: mol_type = other RNA
  modified_base 1: mod_base = OTHER; note = 2'-O-methylcytidine-3'- phosphorothioate
  modified_base 2: mod_base = OTHER; note = 2'-fluorouridine -3'-phosphorothioate
  modified_base 3: mod_base = OTHER; note = 2'-O-methyluridine-3'-phosphate
  modified_base 4: mod_base = OTHER; note = 2'-O-methyluridine-3'-phosphate
  modified_base 5: mod_base = OTHER; note = 2'-O-methyladenosine-3'-phosphate
  modified_base 6: mod_base = OTHER; note = 2'-fluoroguanosine-3'-phosphate
  modified_base 7: mod_base = OTHER; note = 2'-O-methylcytidine-3'-phosphate
  modified_base 8: mod_base = OTHER; note = 2'-fluorocytidine-3'-phosphate
  modified_base 9: mod_base = OTHER; note = 2'-fluoroadenosine-3'-phosphate
  modified_base 10: mod_base = OTHER; note = 2'-O-methylcytidine-3'-phosphate
  modified_base 11: mod_base = OTHER; note = 2'-O-methyladenosine-3'-phosphate
  modified_base 12: mod_base = OTHER; note = 2'-O-methyluridine-3'-phosphate
  modified_base 13: mod_base = OTHER; note = 2'-O-methyladenosine-3'-phosphate
  modified_base 14: mod_base = OTHER; note = 2'-fluorouridine-3'-phosphate
  modified_base 15: mod_base = OTHER; note = 2'-O-methylguanosine-3'-phosphate
  modified_base 16: mod_base = OTHER; note = 2'-fluorocytidine-3'-phosphate
  modified_base 17: mod_base = OTHER; note = 2'-O-methyladenosine-3'-phosphate
  modified_base 18: mod_base = OTHER; note = 2'-O-methylguanosine-3'-phosphate
  modified_base 19: mod_base = OTHER; note = 2'-O-methylcytidine-3'-phosphate
  modified_base 20: mod_base = OTHER; note = 2'-O-methyladenosine-3'-phosphate
  modified_base 21: mod_base = OTHER; note = 2'-O-methyladenosine-3'- phosphorothioate
  modified_base 22: mod_base = OTHER; note = 2'-O-methylguanosine-3'- phosphorothioate
  modified_base 23: mod_base = OTHER; note = 2'-O-methyluridine-3'-phosphate
ctttagccacatatgcagcaagt

SEQ ID NO: 2794 - RNA, 21 nt, synthetic construct
  misc_feature 1..21: note = Description of Artificial Sequence: Synthetic oligonucleotide
  source 1..21: mol_type = other RNA
  modified_base 1: mod_base = OTHER; note = 2'-O-methyladenosine-3'- phosphorothioate
  modified_base 2: mod_base = OTHER; note = 2'-O-methyladenosine-3'- phosphorothioate
  modified_base 3: mod_base = OTHER; note = 2'-O-methyladenosine-3'-phosphate
  modified_base 4: mod_base = OTHER; note = 2'-O-methyluridine-3'-phosphate
  modified_base 5: mod_base = OTHER; note = 2'-O-methylguanosine-3'-phosphate
  modified_base 6: mod_base = OTHER; note = 2'-O-methyladenosine-3'-phosphate
  modified_base 7: mod_base = OTHER; note = 2'-fluorouridine-3'-phosphate
  modified_base 8: mod_base = OTHER; note = 2'-O-methylguanosine-3'-phosphate
  modified_base 9: mod_base = OTHER; note = 2'-fluoroadenosine-3'-phosphate
  modified_base 10: mod_base = OTHER; note = 2'-fluoroadenosine-3'-phosphate
  modified_base 11: mod_base = OTHER; note = 2'-fluoroguanosine-3'-phosphate
  modified_base 12: mod_base = OTHER; note = 2'-O-methyladenosine-3'-phosphate
  modified_base 13: mod_base = OTHER; note = 2'-O-methyladenosine-3'-phosphate
  modified_base 14: mod_base = OTHER; note = 2'-O-methyladenosine-3'-phosphate
  modified_base 15: mod_base = OTHER; note = 2'-O-methylcytidine-3'-phosphate
  modified_base 16: mod_base = OTHER; note = 2'-O-methyluridine-3'-phosphate
  modified_base 17: mod_base = OTHER; note = 2'-O-methyluridine-3'-phosphate
  modified_base 18: mod_base = OTHER; note = 2'-O-methyluridine-3'-phosphate
  modified_base 19: mod_base = OTHER; note = 2'-O-methylguanosine-3'-phosphate
  modified_base 20: mod_base = OTHER; note = 2'-O-methylguanosine-3'-phosphate
  modified_base 21: mod_base = OTHER; note = 2'-O-methylcytidine-3'-phosphate attached to N-[tris(N-acetylgalactosamine-alkyl)-amidodecanoyl)]-4-hydr oxyprolinol Hyp-(N-acetylgalactosamine-alkyl)3
aaatgatgaagaaactttggc

SEQ ID NO: 2795 - RNA, 23 nt, synthetic construct
  misc_feature 1..23: note = Description of Artificial Sequence: Synthetic oligonucleotide
  source 1..23: mol_type = other RNA
  modified_base 1: mod_base = OTHER; note = 2'-O-methylguanosine-3'- phosphorothioate
  modified_base 2: mod_base = OTHER; note = 2'-fluorocytidine-3'-phosphorothioate
  modified_base 3: mod_base = OTHER; note = 2'-O-methylcytidine-3'-phosphate
  modified_base 4: mod_base = OTHER; note = 2'-O-methyladenosine-3'-phosphate
  modified_base 5: mod_base = OTHER; note = 2'-O-methyladenosine-3'-phosphate
  modified_base 6: mod_base = OTHER; note = 2'-fluoroadenosine-3'-phosphate
  modified_base 7: mod_base = OTHER; note = 2'-O-methylguanosine-3'-phosphate
  modified_base 8: mod_base = OTHER; note = 2'-fluorouridine-3'-phosphate
  modified_base 9: mod_base = OTHER; note = 2'-fluorouridine-3'-phosphate
  modified_base 10: mod_base = OTHER; note = 2'-O-methyluridine-3'-phosphate
  modified_base 11: mod_base = OTHER; note = 2'-O-methylcytidine-3'-phosphate
  modified_base 12: mod_base = OTHER; note = 2'-O-methyluridine-3'-phosphate
  modified_base 13: mod_base = OTHER; note = 2'-O-methyluridine-3'-phosphate
  modified_base 14: mod_base = OTHER; note = 2'-fluorocytidine-3'-phosphate
  modified_base 15: mod_base = OTHER; note = 2'-O-methyladenosine-3'-phosphate
  modified_base 16: mod_base = OTHER; note = 2'-fluorouridine-3'-phosphate
  modified_base 17: mod_base = OTHER; note = 2'-O-methylcytidine-3'-phosphate
  modified_base 18: mod_base = OTHER; note = 2'-O-methyladenosine-3'-phosphate
  modified_base 19: mod_base = OTHER; note = 2'-O-methyluridine-3'-phosphate
  modified_base 20: mod_base = OTHER; note = 2'-O-methyluridine-3'-phosphate
  modified_base 21: mod_base = OTHER; note = 2'-O-methyluridine-3'-phosphorothioate
  modified_base 22: mod_base = OTHER; note = 2'-O-methylguanosine-3'- phosphorothioate
  modified_base 23: mod_base = OTHER; note = 2'-O-methylcytidine-3'-phosphate
gccaaagtttcttcatcatttgc

SEQ ID NO: 2796 - RNA, 21 nt, synthetic construct
  misc_feature 1..21: note = Description of Artificial Sequence: Synthetic oligonucleotide
  source 1..21: mol_type = other RNA
  modified_base 1: mod_base = OTHER; note = 2'-O-methyladenosine-3'- phosphorothioate
  modified_base 2: mod_base = OTHER; note = 2'-O-methyladenosine-3'- phosphorothioate
  modified_base 3: mod_base = OTHER; note = 2'-O-methyluridine-3'-phosphate
  modified_base 4: mod_base = OTHER; note = 2'-O-methylguanosine-3'-phosphate
  modified_base 5: mod_base = OTHER; note = 2'-O-methyladenosine-3'-phosphate
  modified_base 6: mod_base = OTHER; note = 2'-O-methyluridine-3'-phosphate
  modified_base 7: mod_base = OTHER; note = 2'-fluoroguanosine-3'-phosphate
  modified_base 8: mod_base = OTHER; note = 2'-O-methyladenosine-3'-phosphate
  modified_base 9: mod_base = OTHER; note = 2'-fluoroadenosine-3'-phosphate
  modified_base 10: mod_base = OTHER; note = 2'-fluoroguanosine-3'-phosphate
  modified_base 11: mod_base = OTHER; note = 2'-fluoroadenosine-3'-phosphate
  modified_base 12: mod_base = OTHER; note = 2'-O-methyladenosine-3'-phosphate
  modified_base 13: mod_base = OTHER; note = 2'-O-methyladenosine-3'-phosphate
  modified_base 14: mod_base = OTHER; note = 2'-O-methylcytidine-3'-phosphate
  modified_base 15: mod_base = OTHER; note = 2'-O-methyluridine-3'-phosphate
  modified_base 16: mod_base = OTHER; note = 2'-O-methyluridine-3'-phosphate
  modified_base 17: mod_base = OTHER; note = 2'-O-methyluridine-3'-phosphate
  modified_base 18: mod_base = OTHER; note = 2'-O-methylguanosine-3'-phosphate
  modified_base 19: mod_base = OTHER; note = 2'-O-methylguanosine-3'-phosphate
  modified_base 20: mod_base = OTHER; note = 2'-O-methylcytidine-3'-phosphate
  modified_base 21: mod_base = OTHER; note = 2'-O-methyluridine-3'-phosphate attached to N-[tris(N-acetylgalactosamine-alkyl)-amidodecanoyl)]-4-hydr oxyprolinol Hyp-(N-acetylgalactosamine-alkyl)3
aatgatgaagaaactttggct

SEQ ID NO: 2797 - RNA, 23 nt, synthetic construct
  misc_feature 1..23: note = Description of Artificial Sequence: Synthetic oligonucleotide
  source 1..23: mol_type = other RNA
  modified_base 1: mod_base = OTHER; note = 2'-O-methyladenosine-3'- phosphorothioate
  modified_base 2: mod_base = OTHER; note = 2'-fluoroguanosine-3'-phosphorothioate
  modified_base 3: mod_base = OTHER; note = 2'-O-methylcytidine-3'-phosphate
  modified_base 4: mod_base = OTHER; note = 2'-O-methylcytidine-3'-phosphate
  modified_base 5: mod_base = OTHER; note = 2'-O-methyladenosine-3'-phosphate
  modified_base 6: mod_base = OTHER; note = 2'-fluoroadenosine-3'-phosphate
  modified_base 7: mod_base = OTHER; note = 2'-O-methyladenosine-3'-phosphate
  modified_base 8: mod_base = OTHER; note = 2'-fluoroguanosine-3'-phosphate
  modified_base 9: mod_base = OTHER; note = 2'-fluorouridine-3'-phosphate
  modified_base 10: mod_base = OTHER; note = 2'-O-methyluridine-3'-phosphate
  modified_base 11: mod_base = OTHER; note = 2'-O-methyluridine-3'-phosphate
  modified_base 12: mod_base = OTHER; note = 2'-O-methylcytidine-3'-phosphate
  modified_base 13: mod_base = OTHER; note = 2'-O-methyluridine-3'-phosphate
  modified_base 14: mod_base = OTHER; note = 2'-fluorouridine-3'-phosphate
  modified_base 15: mod_base = OTHER; note = 2'-O-methylcytidine-3'-phosphate
  modified_base 16: mod_base = OTHER; note = 2'-fluoroadenosine-3'-phosphate
  modified_base 17: mod_base = OTHER; note = 2'-O-methyluridine-3'-phosphate
  modified_base 18: mod_base = OTHER; note = 2'-O-methylcytidine-3'-phosphate
  modified_base 19: mod_base = OTHER; note = 2'-O-methyladenosine-3'-phosphate
  modified_base 20: mod_base = OTHER; note = 2'-O-methyluridine-3'-phosphate
  modified_base 21: mod_base = OTHER; note = 2'-O-methyluridine-3'-phosphorothioate
  modified_base 22: mod_base = OTHER; note = 2'-O-methyluridine-3'-phosphorothioate
  modified_base 23: mod_base = OTHER; note = 2'-O-methylguanosine-3'-phosphate
agccaaagtttcttcatcatttg

SEQ ID NO: 2798 - RNA, 21 nt, synthetic construct
  misc_feature 1..21: note = Description of Artificial Sequence: Synthetic oligonucleotide
  source 1..21: mol_type = other RNA
  modified_base 1: mod_base = OTHER; note = 2'-O-methylguanosine-3'- phosphorothioate
  modified_base 2: mod_base = OTHER; note = 2'-O-methylguanosine-3'- phosphorothioate
  modified_base 3: mod_base = OTHER; note = 2'-O-methylguanosine-3'-phosphate
  modified_base 4: mod_base = OTHER; note = 2'-O-methylcytidine-3'-phosphate
  modified_base 5: mod_base = OTHER; note = 2'-O-methyladenosine-3'-phosphate
  modified_base 6: mod_base = OTHER; note = 2'-O-methyladenosine-3'-phosphate
  modified_base 7: mod_base = OTHER; note = 2'-fluoroadenosine-3'-phosphate
  modified_base 8: mod_base = OTHER; note = 2'-O-methyluridine-3'-phosphate
  modified_base 9: mod_base = OTHER; note = 2'-fluoroguanosine-3'-phosphate
  modified_base 10: mod_base = OTHER; note = 2'-fluoroadenosine-3'-phosphate
  modified_base 11: mod_base = OTHER; note = 2'-fluorouridine-3'-phosphate
  modified_base 12: mod_base = OTHER; note = 2'-O-methylguanosine-3'-phosphate
  modified_base 13: mod_base = OTHER; note = 2'-O-methyladenosine-3'-phosphate
  modified_base 14: mod_base = OTHER; note = 2'-O-methyladenosine-3'-phosphate
  modified_base 15: mod_base = OTHER; note = 2'-O-methylguanosine-3'-phosphate
  modified_base 16: mod_base = OTHER; note = 2'-O-methyladenosine-3'-phosphate
  modified_base 17: mod_base = OTHER; note = 2'-O-methyladenosine-3'-phosphate
  modified_base 18: mod_base = OTHER; note = 2'-O-methyladenosine-3'-phosphate
  modified_base 19: mod_base = OTHER; note = 2'-O-methylcytidine-3'-phosphate
  modified_base 20: mod_base = OTHER; note = 2'-O-methyluridine-3'-phosphate
  modified_base 21: mod_base = OTHER; note = 2'-O-methyluridine-3'-phosphate attached to N-[tris(N-acetylgalactosamine-alkyl)-amidodecanoyl)]-4-hydr oxyprolinol Hyp-(N-acetylgalactosamine-alkyl)3
gggcaaatgatgaagaaactt

SEQ ID NO: 2799 - RNA, 23 nt, synthetic construct
  misc_feature 1..23: note = Description of Artificial Sequence: Synthetic oligonucleotide
  source 1..23: mol_type = other RNA
  modified_base 1: mod_base = OTHER; note = 2'-O-methyladenosine-3'- phosphorothioate
  modified_base 2: mod_base = OTHER; note = 2'-fluoroadenosine-3'-phosphorothioate
  modified_base 3: mod_base = OTHER; note = 2'-O-methylguanosine-3'-phosphate
  modified_base 4: mod_base = OTHER; note = 2'-O-methyluridine-3'-phosphate
  modified_base 5: mod_base = OTHER; note = 2'-O-methyluridine-3'-phosphate
  modified_base 6: mod_base = OTHER; note = 2'-fluorouridine-3'-phosphate
  modified_base 7: mod_base = OTHER; note = 2'-O-methylcytidine-3'-phosphate
  modified_base 8: mod_base = OTHER; note = 2'-fluorouridine-3'-phosphate
  modified_base 9: mod_base = OTHER; note = 2'-fluorouridine-3'-phosphate
  modified_base 10: mod_base = OTHER; note = 2'-O-methylcytidine-3'-phosphate
  modified_base 11: mod_base = OTHER; note = 2'-O-methyladenosine-3'-phosphate
  modified_base 12: mod_base = OTHER; note = 2'-O-methyluridine-3'-phosphate
  modified_base 13: mod_base = OTHER; note = 2'-O-methylcytidine-3'-phosphate
  modified_base 14: mod_base = OTHER; note = 2'-fluoroadenosine-3'-phosphate
  modified_base 15: mod_base = OTHER; note = 2'-O-methyluridine-3'-phosphate
  modified_base 16: mod_base = OTHER; note = 2'-fluorouridine-3'-phosphate
  modified_base 17: mod_base = OTHER; note = 2'-O-methyluridine-3'-phosphate
  modified_base 18: mod_base = OTHER; note = 2'-O-methylguanosine-3'-phosphate
  modified_base 19: mod_base = OTHER; note = 2'-O-methylcytidine-3'-phosphate
  modified_base 20: mod_base = OTHER; note = 2'-O-methylcytidine-3'-phosphate
  modified_base 21: mod_base = OTHER; note = 2'-O-methylcytidine-3'- phosphorothioate
  modified_base 22: mod_base = OTHER; note = 2'-O-methylcytidine-3'- phosphorothioate
  modified_base 23: mod_base = OTHER; note = 2'-O-methyladenosine-3'-phosphate
aagtttcttcatcatttgcccca

SEQ ID NO: 2800 - RNA, 21 nt, synthetic construct
  misc_feature 1..21: note = Description of Artificial Sequence: Synthetic oligonucleotide
  source 1..21: mol_type = other RNA
  modified_base 1: mod_base = OTHER; note = 2'-O-methylguanosine-3'- phosphorothioate
  modified_base 2: mod_base = OTHER; note = 2'-O-methylguanosine-3'- phosphorothioate
  modified_base 3: mod_base = OTHER; note = 2'-O-methylguanosine-3'-phosphate
  modified_base 4: mod_base = OTHER; note = 2'-O-methylguanosine-3'-phosphate
  modified_base 5: mod_base = OTHER; note = 2'-O-methylcytidine-3'-phosphate
  modified_base 6: mod_base = OTHER; note = 2'-O-methyladenosine-3'-phosphate
  modified_base 7: mod_base = OTHER; note = 2'-fluoroadenosine-3'-phosphate
  modified_base 8: mod_base = OTHER; note = 2'-O-methyladenosine-3'-phosphate
  modified_base 9: mod_base = OTHER; note = 2'-fluorouridine-3'-phosphate
  modified_base 10: mod_base = OTHER; note = 2'-fluoroguanosine-3'-phosphate
  modified_base 11: mod_base = OTHER; note = 2'-fluoroadenosine-3'-phosphate
  modified_base 12: mod_base = OTHER; note = 2'-O-methyluridine-3'-phosphate
  modified_base 13: mod_base = OTHER; note = 2'-O-methylguanosine-3'-phosphate
  modified_base 14: mod_base = OTHER; note = 2'-O-methyladenosine-3'-phosphate
  modified_base 15: mod_base = OTHER; note = 2'-O-methyladenosine-3'-phosphate
  modified_base 16: mod_base = OTHER; note = 2'-O-methylguanosine-3'-phosphate
  modified_base 17: mod_base = OTHER; note = 2'-O-methyladenosine-3'-phosphate
  modified_base 18: mod_base = OTHER; note = 2'-O-methyladenosine-3'-phosphate
  modified_base 19: mod_base = OTHER; note = 2'-O-methyladenosine-3'-phosphate
  modified_base 20: mod_base = OTHER; note = 2'-O-methylcytidine-3'-phosphate
  modified_base 21: mod_base = OTHER; note = 2'-O-methyluridine-3'-phosphate attached to N-[tris(N-acetylgalactosamine-alkyl)-amidodecanoyl)]-4-hydr oxyprolinol Hyp-(N-acetylgalactosamine-alkyl)3
ggggcaaatgatgaagaaact

SEQ ID NO: 2801 - RNA, 23 nt, synthetic construct
  misc_feature 1..23: note = Description of Artificial Sequence: Synthetic oligonucleotide
  source 1..23: mol_type = other RNA
  modified_base 1: mod_base = OTHER; note = 2'-O-methyladenosine-3'- phosphorothioate
  modified_base 2: mod_base = OTHER; note = 2'-fluoroguanosine-3'-phosphorothioate
  modified_base 3: mod_base = OTHER; note = 2'-O-methyluridine-3'-phosphate
  modified_base 4: mod_base = OTHER; note = 2'-O-methyluridine-3'-phosphate
  modified_base 5: mod_base = OTHER; note = 2'-O-methyluridine-3'-phosphate
  modified_base 6: mod_base = OTHER; note = 2'-fluorocytidine-3'-phosphate
  modified_base 7: mod_base = OTHER; note = 2'-O-methyluridine-3'-phosphate
  modified_base 8: mod_base = OTHER; note = 2'-fluorouridine-3'-phosphate
  modified_base 9: mod_base = OTHER; note = 2'-fluorocytidine-3'-phosphate
  modified_base 10: mod_base = OTHER; note = 2'-O-methyladenosine-3'-phosphate
  modified_base 11: mod_base = OTHER; note = 2'-O-methyluridine-3'-phosphate
  modified_base 12: mod_base = OTHER; note = 2'-O-methylcytidine-3'-phosphate
  modified_base 13: mod_base = OTHER; note = 2'-O-methyladenosine-3'-phosphate
  modified_base 14: mod_base = OTHER; note = 2'-fluorouridine-3'-phosphate
  modified_base 15: mod_base = OTHER; note = 2'-O-methyluridine-3'-phosphate
  modified_base 16: mod_base = OTHER; note = 2'-fluorouridine-3'-phosphate
  modified_base 17: mod_base = OTHER; note = 2'-O-methylguanosine-3'-phosphate
  modified_base 18: mod_base = OTHER; note = 2'-O-methylcytidine-3'-phosphate
  modified_base 19: mod_base = OTHER; note = 2'-O-methylcytidine-3'-phosphate
  modified_base 20: mod_base = OTHER; note = 2'-O-methylcytidine-3'-phosphate
  modified_base 21: mod_base = OTHER; note = 2'-O-methylcytidine-3'- phosphorothioate
  modified_base 22: mod_base = OTHER; note = 2'-O-methyladenosine-3'- phosphorothioate
  modified_base 23: mod_base = OTHER; note = 2'-O-methylguanosine-3'-phosphate
agtttcttcatcatttgccccag

SEQ ID NO: 2802 - RNA, 21 nt, synthetic construct
  misc_feature 1..21: note = Description of Artificial Sequence: Synthetic oligonucleotide
  source 1..21: mol_type = other RNA
  modified_base 1: mod_base = OTHER; note = 2'-O-methylguanosine-3'- phosphorothioate
  modified_base 2: mod_base = OTHER; note = 2'-O-methyladenosine-3'- phosphorothioate
  modified_base 3: mod_base = OTHER; note = 2'-O-methylguanosine-3'-phosphate
  modified_base 4: mod_base = OTHER; note = 2'-O-methyladenosine-3'-phosphate
  modified_base 5: mod_base = OTHER; note = 2'-O-methyluridine-3'-phosphate
  modified_base 6: mod_base = OTHER; note = 2'-O-methyladenosine-3'-phosphate
  modified_base 7: mod_base = OTHER; note = 2'-fluorocytidine-3'-phosphate
  modified_base 8: mod_base = OTHER; note = 2'-O-methyluridine-3'-phosphate
  modified_base 9: mod_base = OTHER; note = 2'-fluoroadenosine-3'-phosphate
  modified_base 10: mod_base = OTHER; note = 2'-fluoroadenosine-3'-phosphate
  modified_base 11: mod_base = OTHER; note = 2'-fluoroadenosine-3'-phosphate
  modified_base 12: mod_base = OTHER; note = 2'-O-methylguanosine-3'-phosphate
  modified_base 13: mod_base = OTHER; note = 2'-O-methylguanosine-3'-phosphate
  modified_base 14: mod_base = OTHER; note = 2'-O-methyladenosine-3'-phosphate
  modified_base 15: mod_base = OTHER; note = 2'-O-methyladenosine-3'-phosphate
  modified_base 16: mod_base = OTHER; note = 2'-O-methylguanosine-3'-phosphate
  modified_base 17: mod_base = OTHER; note = 2'-O-methyladenosine-3'-phosphate
  modified_base 18: mod_base = OTHER; note = 2'-O-methyladenosine-3'-phosphate
  modified_base 19: mod_base = OTHER; note = 2'-O-methyluridine-3'-phosphate
  modified_base 20: mod_base = OTHER; note = 2'-O-methyluridine-3'-phosphate
  modified_base 21: mod_base = OTHER; note = 2'-O-methylcytidine-3'-phosphate attached to N-[tris(N-acetylgalactosamine-alkyl)-amidodecanoyl)]-4-hydr oxyprolinol Hyp-(N-acetylgalactosamine-alkyl)3
gagatactaaaggaagaattc

SEQ ID NO: 2803 - RNA, 23 nt, synthetic construct
  misc_feature 1..23: note = Description of Artificial Sequence: Synthetic oligonucleotide
  source 1..23: mol_type = other RNA
  modified_base 1: mod_base = OTHER; note = 2'-O-methylguanosine-3'- phosphorothioate
  modified_base 2: mod_base = OTHER; note = 2'-fluoroadenosine-3'-phosphorothioate
  modified_base 3: mod_base = OTHER; note = 2'-O-methyladenosine-3'-phosphate
  modified_base 4: mod_base = OTHER; note = 2'-O-methyluridine-3'-phosphate
  modified_base 5: mod_base = OTHER; note = 2'-O-methyluridine-3'-phosphate
  modified_base 6: mod_base = OTHER; note = 2'-fluorocytidine-3'-phosphate
  modified_base 7: mod_base = OTHER; note = 2'-O-methyluridine-3'-phosphate
  modified_base 8: mod_base = OTHER; note = 2'-fluorouridine-3'-phosphate
  modified_base 9: mod_base = OTHER; note = 2'-fluorocytidine-3'-phosphate
  modified_base 10: mod_base = OTHER; note = 2'-O-methylcytidine-3'-phosphate
  modified_base 11: mod_base = OTHER; note = 2'-O-methyluridine-3'-phosphate
  modified_base 12: mod_base = OTHER; note = 2'-O-methyluridine-3'-phosphate
  modified_base 13: mod_base = OTHER; note = 2'-O-methyluridine-3'-phosphate
  modified_base 14: mod_base = OTHER; note = 2'-fluoroadenosine-3'-phosphate
  modified_base 15: mod_base = OTHER; note = 2'-O-methylguanosine-3'-phosphate
  modified_base 16: mod_base = OTHER; note = 2'-fluorouridine-3'-phosphate
  modified_base 17: mod_base = OTHER; note = 2'-O-methyladenosine-3'-phosphate
  modified_base 18: mod_base = OTHER; note = 2'-O-methyluridine-3'-phosphate
  modified_base 19: mod_base = OTHER; note = 2'-O-methylcytidine-3'-phosphate
  modified_base 20: mod_base = OTHER; note = 2'-O-methyluridine-3'-phosphate
  modified_base 21: mod_base = OTHER; note = 2'-O-methylcytidine-3'- phosphorothioate
  modified_base 22: mod_base = OTHER; note = 2'-O-methylguanosine-3'- phosphorothioate
  modified_base 23: mod_base = OTHER; note = 2'-O-methyladenosine-3'-phosphate
gaattcttcctttagtatctcga

SEQ ID NO: 2804 - RNA, 21 nt, synthetic construct
  misc_feature 1..21: note = Description of Artificial Sequence: Synthetic oligonucleotide
  source 1..21: mol_type = other RNA
  modified_base 1: mod_base = OTHER; note = 2'-O-methyladenosine-3'- phosphorothioate
  modified_base 2: mod_base = OTHER; note = 2'-O-methylguanosine-3'- phosphorothioate
  modified_base 3: mod_base = OTHER; note = 2'-O-methyladenosine-3'-phosphate
  modified_base 4: mod_base = OTHER; note = 2'-O-methyluridine-3'-phosphate
  modified_base 5: mod_base = OTHER; note = 2'-O-methyladenosine-3'-phosphate
  modified_base 6: mod_base = OTHER; note = 2'-O-methylcytidine-3'-phosphate
  modified_base 7: mod_base = OTHER; note = 2'-fluorouridine-3'-phosphate
  modified_base 8: mod_base = OTHER; note = 2'-O-methyladenosine-3'-phosphate
  modified_base 9: mod_base = OTHER; note = 2'-fluoroadenosine-3'-phosphate
  modified_base 10: mod_base = OTHER; note = 2'-fluoroadenosine-3'-phosphate
  modified_base 11: mod_base = OTHER; note = 2'-fluoroguanosine-3'-phosphate
  modified_base 12: mod_base = OTHER; note = 2'-O-methylguanosine-3'-phosphate
  modified_base 13: mod_base = OTHER; note = 2'-O-methyladenosine-3'-phosphate
  modified_base 14: mod_base = OTHER; note = 2'-O-methyladenosine-3'-phosphate
  modified_base 15: mod_base = OTHER; note = 2'-O-methylguanosine-3'-phosphate
  modified_base 16: mod_base = OTHER; note = 2'-O-methyladenosine-3'-phosphate
  modified_base 17: mod_base = OTHER; note = 2'-O-methyladenosine-3'-phosphate
  modified_base 18: mod_base = OTHER; note = 2'-O-methyluridine-3'-phosphate
  modified_base 19: mod_base = OTHER; note = 2'-O-methyluridine-3'-phosphate
  modified_base 20: mod_base = OTHER; note = 2'-O-methylcytidine-3'-phosphate
  modified_base 21: mod_base = OTHER; note = 2'-O-methylcytidine-3'-phosphate attached to N-[tris(N-acetylgalactosamine-alkyl)-amidodecanoyl)]-4-hydr oxyprolinol Hyp-(N-acetylgalactosamine-alkyl)3
agatactaaaggaagaattcc

SEQ ID NO: 2805 - RNA, 23 nt, synthetic construct
  misc_feature 1..23: note = Description of Artificial Sequence: Synthetic oligonucleotide
  source 1..23: mol_type = other RNA
  modified_base 1: mod_base = OTHER; note = 2'-O-methylguanosine-3'- phosphorothioate
  modified_base 2: mod_base = OTHER; note = 2'-fluoroguanosine-3'-phosphorothioate
  modified_base 3: mod_base = OTHER; note = 2'-O-methyladenosine-3'-phosphate
  modified_base 4: mod_base = OTHER; note = 2'-O-methyladenosine-3'-phosphate
  modified_base 5: mod_base = OTHER; note = 2'-O-methyluridine-3'-phosphate
  modified_base 6: mod_base = OTHER; note = 2'-fluorouridine-3'-phosphate
  modified_base 7: mod_base = OTHER; note = 2'-O-methylcytidine-3'-phosphate
  modified_base 8: mod_base = OTHER; note = 2'-fluorouridine-3'-phosphate
  modified_base 9: mod_base = OTHER; note = 2'-fluorouridine-3'-phosphate
  modified_base 10: mod_base = OTHER; note = 2'-O-methylcytidine-3'-phosphate
  modified_base 11: mod_base = OTHER; note = 2'-O-methylcytidine-3'-phosphate
  modified_base 12: mod_base = OTHER; note = 2'-O-methyluridine-3'-phosphate
  modified_base 13: mod_base = OTHER; note = 2'-O-methyluridine-3'-phosphate
  modified_base 14: mod_base = OTHER; note = 2'-fluorouridine-3'-phosphate
  modified_base 15: mod_base = OTHER; note = 2'-O-methyladenosine-3'-phosphate
  modified_base 16: mod_base = OTHER; note = 2'-fluoroguanosine-3'-phosphate
  modified_base 17: mod_base = OTHER; note = 2'-O-methyluridine-3'-phosphate
  modified_base 18: mod_base = OTHER; note = 2'-O-methyladenosine-3'-phosphate
  modified_base 19: mod_base = OTHER; note = 2'-O-methyluridine-3'-phosphate
  modified_base 20: mod_base = OTHER; note = 2'-O-methylcytidine-3'-phosphate
  modified_base 21: mod_base = OTHER; note = 2'-O-methyluridine-3'-phosphorothioate
  modified_base 22: mod_base = OTHER; note = 2'-O-methylcytidine-3'- phosphorothioate
  modified_base 23: mod_base = OTHER; note = 2'-O-methylguanosine-3'-phosphate
ggaattcttcctttagtatctcg

SEQ ID NO: 2806 - RNA, 21 nt, synthetic construct
  misc_feature 1..21: note = Description of Artificial Sequence: Synthetic oligonucleotide
  source 1..21: mol_type = other RNA
  modified_base 1: mod_base = OTHER; note = 2'-O-methylcytidine-3'- phosphorothioate
  modified_base 2: mod_base = OTHER; note = 2'-O-methylcytidine-3'- phosphorothioate
  modified_base 3: mod_base = OTHER; note = 2'-O-methyluridine-3'-phosphate
  modified_base 4: mod_base = OTHER; note = 2'-O-methylcytidine-3'-phosphate
  modified_base 5: mod_base = OTHER; note = 2'-O-methylguanosine-3'-phosphate
  modified_base 6: mod_base = OTHER; note = 2'-O-methyladenosine-3'-phosphate
  modified_base 7: mod_base = OTHER; note = 2'-fluoroguanosine-3'-phosphate
  modified_base 8: mod_base = OTHER; note = 2'-O-methyladenosine-3'-phosphate
  modified_base 9: mod_base = OTHER; note = 2'-fluorouridine-3'-phosphate
  modified_base 10: mod_base = OTHER; note = 2'-fluoroadenosine-3'-phosphate
  modified_base 11: mod_base = OTHER; note = 2'-fluorocytidine-3'-phosphate
  modified_base 12: mod_base = OTHER; note = 2'-O-methyluridine-3'-phosphate
  modified_base 13: mod_base = OTHER; note = 2'-O-methyladenosine-3'-phosphate
  modified_base 14: mod_base = OTHER; note = 2'-O-methyladenosine-3'-phosphate
  modified_base 15: mod_base = OTHER; note = 2'-O-methyladenosine-3'-phosphate
  modified_base 16: mod_base = OTHER; note = 2'-O-methylguanosine-3'-phosphate
  modified_base 17: mod_base = OTHER; note = 2'-O-methylguanosine-3'-phosphate
  modified_base 18: mod_base = OTHER; note = 2'-O-methyladenosine-3'-phosphate
  modified_base 19: mod_base = OTHER; note = 2'-O-methyladenosine-3'-phosphate
  modified_base 20: mod_base = OTHER; note = 2'-O-methylguanosine-3'-phosphate
  modified_base 21: mod_base = OTHER; note = 2'-O-methyladenosine-3'-phosphate attached to N-[tris(N-acetylgalactosamine-alkyl)-amidodecanoyl)]-4-hydr oxyprolinol Hyp-(N-acetylgalactosamine-alkyl)3
cctcgagatactaaaggaaga

SEQ ID NO: 2807 - RNA, 23 nt, synthetic construct
  misc_feature 1..23: note = Description of Artificial Sequence: Synthetic oligonucleotide
  source 1..23: mol_type = other RNA
  modified_base 1: mod_base = OTHER; note = 2'-O-methyluridine-3'-phosphorothioate
  modified_base 2: mod_base = OTHER; note = 2'-fluorocytidine-3'-phosphorothioate
  modified_base 3: mod_base = OTHER; note = 2'-O-methyluridine-3'-phosphate
  modified_base 4: mod_base = OTHER; note = 2'-O-methyluridine-3'-phosphate
  modified_base 5: mod_base = OTHER; note = 2'-O-methylcytidine-3'-phosphate
  modified_base 6: mod_base = OTHER; note = 2'-fluorocytidine-3'-phosphate
  modified_base 7: mod_base = OTHER; note = 2'-O-methyluridine-3'-phosphate
  modified_base 8: mod_base = OTHER; note = 2'-fluorouridine-3'-phosphate
  modified_base 9: mod_base = OTHER; note = 2'-fluorouridine-3'-phosphate
  modified_base 10: mod_base = OTHER; note = 2'-O-methyladenosine-3'-phosphate
  modified_base 11: mod_base = OTHER; note = 2'-O-methylguanosine-3'-phosphate
  modified_base 12: mod_base = OTHER; note = 2'-O-methyluridine-3'-phosphate
  modified_base 13: mod_base = OTHER; note = 2'-O-methyladenosine-3'-phosphate
  modified_base 14: mod_base = OTHER; note = 2'-fluorouridine-3'-phosphate
  modified_base 15: mod_base = OTHER; note = 2'-O-methylcytidine-3'-phosphate
  modified_base 16: mod_base = OTHER; note = 2'-fluorouridine-3'-phosphate
  modified_base 17: mod_base = OTHER; note = 2'-O-methylcytidine-3'-phosphate
  modified_base 18: mod_base = OTHER; note = 2'-O-methylguanosine-3'-phosphate
  modified_base 19: mod_base = OTHER; note = 2'-O-methyladenosine-3'-phosphate
  modified_base 20: mod_base = OTHER; note = 2'-O-methylguanosine-3'-phosphate
  modified_base 21: mod_base = OTHER; note = 2'-O-methylguanosine-3'- phosphorothioate
  modified_base 22: mod_base = OTHER; note = 2'-O-methyladenosine-3'- phosphorothioate
  modified_base 23: mod_base = OTHER; note = 2'-O-methylcytidine-3'-phosphate
tcttcctttagtatctcgaggac

SEQ ID NO: 2808 - RNA, 21 nt, synthetic construct
  misc_feature 1..21: note = Description of Artificial Sequence: Synthetic oligonucleotide
  source 1..21: mol_type = other RNA
  modified_base 1: mod_base = OTHER; note = 2'-O-methyluridine-3'-phosphorothioate
  modified_base 2: mod_base = OTHER; note = 2'-O-methylcytidine-3'- phosphorothioate
  modified_base 3: mod_base = OTHER; note = 2'-O-methylcytidine-3'-phosphate
  modified_base 4: mod_base = OTHER; note = 2'-O-methyluridine-3'-phosphate
  modified_base 5: mod_base = OTHER; note = 2'-O-methylcytidine-3'-phosphate
  modified_base 6: mod_base = OTHER; note = 2'-O-methylguanosine-3'-phosphate
  modified_base 7: mod_base = OTHER; note = 2'-fluoroadenosine-3'-phosphate
  modified_base 8: mod_base = OTHER; note = 2'-O-methylguanosine-3'-phosphate
  modified_base 9: mod_base = OTHER; note = 2'-fluoroadenosine-3'-phosphate
  modified_base 10: mod_base = OTHER; note = 2'-fluorouridine-3'-phosphate
  modified_base 11: mod_base = OTHER; note = 2'-fluoroadenosine-3'-phosphate
  modified_base 12: mod_base = OTHER; note = 2'-O-methylcytidine-3'-phosphate
  modified_base 13: mod_base = OTHER; note = 2'-O-methyluridine-3'-phosphate
  modified_base 14: mod_base = OTHER; note = 2'-O-methyladenosine-3'-phosphate
  modified_base 15: mod_base = OTHER; note = 2'-O-methyladenosine-3'-phosphate
  modified_base 16: mod_base = OTHER; note = 2'-O-methyladenosine-3'-phosphate
  modified_base 17: mod_base = OTHER; note = 2'-O-methylguanosine-3'-phosphate
  modified_base 18: mod_base = OTHER; note = 2'-O-methylguanosine-3'-phosphate
  modified_base 19: mod_base = OTHER; note = 2'-O-methyladenosine-3'-phosphate
  modified_base 20: mod_base = OTHER; note = 2'-O-methyladenosine-3'-phosphate
  modified_base 21: mod_base = OTHER; note = 2'-O-methylguanosine-3'-phosphate attached to N-[tris(N-acetylgalactosamine-alkyl)-amidodecanoyl)]-4-hydr oxyprolinol Hyp-(N-acetylgalactosamine-alkyl)3
tcctcgagatactaaaggaag

SEQ ID NO: 2809 - RNA, 23 nt, synthetic construct
  misc_feature 1..23: note = Description of Artificial Sequence: Synthetic oligonucleotide
  source 1..23: mol_type = other RNA
  modified_base 1: mod_base = OTHER; note = 2'-O-methylcytidine-3'- phosphorothioate
  modified_base 2: mod_base = OTHER; note = 2'-fluorouridine -3'-phosphorothioate
  modified_base 3: mod_base = OTHER; note = 2'-O-methyluridine-3'-phosphate
  modified_base 4: mod_base = OTHER; note = 2'-O-methylcytidine-3'-phosphate
  modified_base 5: mod_base = OTHER; note = 2'-O-methylcytidine-3'-phosphate
  modified_base 6: mod_base = OTHER; note = 2'-fluorouridine-3'-phosphate
  modified_base 7: mod_base = OTHER; note = 2'-O-methyluridine-3'-phosphate
  modified_base 8: mod_base = OTHER; note = 2'-fluorouridine-3'-phosphate
  modified_base 9: mod_base = OTHER; note = 2'-fluoroadenosine-3'-phosphate
  modified_base 10: mod_base = OTHER; note = 2'-O-methylguanosine-3'-phosphate
  modified_base 11: mod_base = OTHER; note = 2'-O-methyluridine-3'-phosphate
  modified_base 12: mod_base = OTHER; note = 2'-O-methyladenosine-3'-phosphate
  modified_base 13: mod_base = OTHER; note = 2'-O-methyluridine-3'-phosphate
  modified_base 14: mod_base = OTHER; note = 2'-fluorocytidine-3'-phosphate
  modified_base 15: mod_base = OTHER; note = 2'-O-methyluridine-3'-phosphate
  modified_base 16: mod_base = OTHER; note = 2'-fluorocytidine-3'-phosphate
  modified_base 17: mod_base = OTHER; note = 2'-O-methylguanosine-3'-phosphate
  modified_base 18: mod_base = OTHER; note = 2'-O-methyladenosine-3'-phosphate
  modified_base 19: mod_base = OTHER; note = 2'-O-methylguanosine-3'-phosphate
  modified_base 20: mod_base = OTHER; note = 2'-O-methylguanosine-3'-phosphate
  modified_base 21: mod_base = OTHER; note = 2'-O-methyladenosine-3'- phosphorothioate
  modified_base 22: mod_base = OTHER; note = 2'-O-methylcytidine-3'- phosphorothioate
  modified_base 23: mod_base = OTHER; note = 2'-O-methyladenosine-3'-phosphate
cttcctttagtatctcgaggaca

SEQ ID NO: 2810 - RNA, 21 nt, synthetic construct
  misc_feature 1..21: note = Description of Artificial Sequence: Synthetic oligonucleotide
  source 1..21: mol_type = other RNA
  modified_base 1: mod_base = OTHER; note = 2'-O-methyladenosine-3'- phosphorothioate
  modified_base 2: mod_base = OTHER; note = 2'-O-methylcytidine-3'- phosphorothioate
  modified_base 3: mod_base = OTHER; note = 2'-O-methyladenosine-3'-phosphate
  modified_base 4: mod_base = OTHER; note = 2'-O-methyladenosine-3'-phosphate
  modified_base 5: mod_base = OTHER; note = 2'-O-methylcytidine-3'-phosphate
  modified_base 6: mod_base = OTHER; note = 2'-O-methyluridine-3'-phosphate
  modified_base 7: mod_base = OTHER; note = 2'-fluorocytidine-3'-phosphate
  modified_base 8: mod_base = OTHER; note = 2'-O-methyladenosine-3'-phosphate
  modified_base 9: mod_base = OTHER; note = 2'-fluoroguanosine-3'-phosphate
  modified_base 10: mod_base = OTHER; note = 2'-fluoroguanosine-3'-phosphate
  modified_base 11: mod_base = OTHER; note = 2'-fluoroadenosine-3'-phosphate
  modified_base 12: mod_base = OTHER; note = 2'-O-methyluridine-3'-phosphate
  modified_base 13: mod_base = OTHER; note = 2'-O-methylguanosine-3'-phosphate
  modified_base 14: mod_base = OTHER; note = 2'-O-methyladenosine-3'-phosphate
  modified_base 15: mod_base = OTHER; note = 2'-O-methyladenosine-3'-phosphate
  modified_base 16: mod_base = OTHER; note = 2'-O-methyladenosine-3'-phosphate
  modified_base 17: mod_base = OTHER; note = 2'-O-methyladenosine-3'-phosphate
  modified_base 18: mod_base = OTHER; note = 2'-O-methyladenosine-3'-phosphate
  modified_base 19: mod_base = OTHER; note = 2'-O-methyluridine-3'-phosphate
  modified_base 20: mod_base = OTHER; note = 2'-O-methyluridine-3'-phosphate
  modified_base 21: mod_base = OTHER; note = 2'-O-methyluridine-3'-phosphate attached to N-[tris(N-acetylgalactosamine-alkyl)-amidodecanoyl)]-4-hydr oxyprolinol Hyp-(N-acetylgalactosamine-alkyl)3
acaactcaggatgaaaaattt

SEQ ID NO: 2811 - RNA, 23 nt, synthetic construct
  misc_feature 1..23: note = Description of Artificial Sequence: Synthetic oligonucleotide
  source 1..23: mol_type = other RNA
  modified_base 1: mod_base = OTHER; note = 2'-O-methyladenosine-3'- phosphorothioate
  modified_base 2: mod_base = OTHER; note = 2'-fluoroadenosine-3'-phosphorothioate
  modified_base 3: mod_base = OTHER; note = 2'-O-methyladenosine-3'-phosphate
  modified_base 4: mod_base = OTHER; note = 2'-O-methyluridine-3'-phosphate
  modified_base 5: mod_base = OTHER; note = 2'-O-methyluridine-3'-phosphate
  modified_base 6: mod_base = OTHER; note = 2'-fluorouridine-3'-phosphate
  modified_base 7: mod_base = OTHER; note = 2'-O-methyluridine-3'-phosphate
  modified_base 8: mod_base = OTHER; note = 2'-fluorouridine-3'-phosphate
  modified_base 9: mod_base = OTHER; note = 2'-fluorocytidine-3'-phosphate
  modified_base 10: mod_base = OTHER; note = 2'-O-methyladenosine-3'-phosphate
  modified_base 11: mod_base = OTHER; note = 2'-O-methyluridine-3'-phosphate
  modified_base 12: mod_base = OTHER; note = 2'-O-methylcytidine-3'-phosphate
  modified_base 13: mod_base = OTHER; note = 2'-O-methylcytidine-3'-phosphate
  modified_base 14: mod_base = OTHER; note = 2'-fluorouridine-3'-phosphate
  modified_base 15: mod_base = OTHER; note = 2'-O-methylguanosine-3'-phosphate
  modified_base 16: mod_base = OTHER; note = 2'-fluoroadenosine-3'-phosphate
  modified_base 17: mod_base = OTHER; note = 2'-O-methylguanosine-3'-phosphate
  modified_base 18: mod_base = OTHER; note = 2'-O-methyluridine-3'-phosphate
  modified_base 19: mod_base = OTHER; note = 2'-O-methyluridine-3'-phosphate
  modified_base 20: mod_base = OTHER; note = 2'-O-methylguanosine-3'-phosphate
  modified_base 21: mod_base = OTHER; note = 2'-O-methyluridine-3'-phosphorothioate
  modified_base 22: mod_base = OTHER; note = 2'-O-methylguanosine-3'- phosphorothioate
  modified_base 23: mod_base = OTHER; note = 2'-O-methylguanosine-3'-phosphate
aaatttttcatcctgagttgtgg

SEQ ID NO: 2812 - RNA, 21 nt, synthetic construct
  misc_feature 1..21: note = Description of Artificial Sequence: Synthetic oligonucleotide
  source 1..21: mol_type = other RNA
  modified_base 1: mod_base = OTHER; note = 2'-O-methylcytidine-3'- phosphorothioate
  modified_base 2: mod_base = OTHER; note = 2'-O-methyladenosine-3'- phosphorothioate
  modified_base 3: mod_base = OTHER; note = 2'-O-methyladenosine-3'-phosphate
  modified_base 4: mod_base = OTHER; note = 2'-O-methylcytidine-3'-phosphate
  modified_base 5: mod_base = OTHER; note = 2'-O-methyluridine-3'-phosphate
  modified_base 6: mod_base = OTHER; note = 2'-O-methylcytidine-3'-phosphate
  modified_base 7: mod_base = OTHER; note = 2'-fluoroadenosine-3'-phosphate
  modified_base 8: mod_base = OTHER; note = 2'-O-methylguanosine-3'-phosphate
  modified_base 9: mod_base = OTHER; note = 2'-fluoroguanosine-3'-phosphate
  modified_base 10: mod_base = OTHER; note = 2'-fluoroadenosine-3'-phosphate
  modified_base 11: mod_base = OTHER; note = 2'-fluorouridine-3'-phosphate
  modified_base 12: mod_base = OTHER; note = 2'-O-methylguanosine-3'-phosphate
  modified_base 13: mod_base = OTHER; note = 2'-O-methyladenosine-3'-phosphate
  modified_base 14: mod_base = OTHER; note = 2'-O-methyladenosine-3'-phosphate
  modified_base 15: mod_base = OTHER; note = 2'-O-methyladenosine-3'-phosphate
  modified_base 16: mod_base = OTHER; note = 2'-O-methyladenosine-3'-phosphate
  modified_base 17: mod_base = OTHER; note = 2'-O-methyladenosine-3'-phosphate
  modified_base 18: mod_base = OTHER; note = 2'-O-methyluridine-3'-phosphate
  modified_base 19: mod_base = OTHER; note = 2'-O-methyluridine-3'-phosphate
  modified_base 20: mod_base = OTHER; note = 2'-O-methyluridine-3'-phosphate
  modified_base 21: mod_base = OTHER; note = 2'-O-methyluridine-3'-phosphate attached to N-[tris(N-acetylgalactosamine-alkyl)-amidodecanoyl)]-4-hydr oxyprolinol Hyp-(N-acetylgalactosamine-alkyl)3
caactcaggatgaaaaatttt

SEQ ID NO: 2813 - RNA, 23 nt, synthetic construct
  misc_feature 1..23: note = Description of Artificial Sequence: Synthetic oligonucleotide
  source 1..23: mol_type = other RNA
  modified_base 1: mod_base = OTHER; note = 2'-O-methyladenosine-3'- phosphorothioate
  modified_base 2: mod_base = OTHER; note = 2'-fluoroadenosine-3'-phosphorothioate
  modified_base 3: mod_base = OTHER; note = 2'-O-methyladenosine-3'-phosphate
  modified_base 4: mod_base = OTHER; note = 2'-O-methyladenosine-3'-phosphate
  modified_base 5: mod_base = OTHER; note = 2'-O-methyluridine-3'-phosphate
  modified_base 6: mod_base = OTHER; note = 2'-fluorouridine-3'-phosphate
  modified_base 7: mod_base = OTHER; note = 2'-O-methyluridine-3'-phosphate
  modified_base 8: mod_base = OTHER; note = 2'-fluorouridine-3'-phosphate
  modified_base 9: mod_base = OTHER; note = 2'-fluorouridine-3'-phosphate
  modified_base 10: mod_base = OTHER; note = 2'-O-methylcytidine-3'-phosphate
  modified_base 11: mod_base = OTHER; note = 2'-O-methyladenosine-3'-phosphate
  modified_base 12: mod_base = OTHER; note = 2'-O-methyluridine-3'-phosphate
  modified_base 13: mod_base = OTHER; note = 2'-O-methylcytidine-3'-phosphate
  modified_base 14: mod_base = OTHER; note = 2'-fluorocytidine-3'-phosphate
  modified_base 15: mod_base = OTHER; note = 2'-O-methyluridine-3'-phosphate
  modified_base 16: mod_base = OTHER; note = 2'-fluoroguanosine-3'-phosphate
  modified_base 17: mod_base = OTHER; note = 2'-O-methyladenosine-3'-phosphate
  modified_base 18: mod_base = OTHER; note = 2'-O-methylguanosine-3'-phosphate
  modified_base 19: mod_base = OTHER; note = 2'-O-methyluridine-3'-phosphate
  modified_base 20: mod_base = OTHER; note = 2'-O-methyluridine-3'-phosphate
  modified_base 21: mod_base = OTHER; note = 2'-O-methylguanosine-3'- phosphorothioate
  modified_base 22: mod_base = OTHER; note = 2'-O-methyluridine-3'-phosphorothioate
  modified_base 23: mod_base = OTHER; note = 2'-O-methylguanosine-3'-phosphate
aaaatttttcatcctgagttgtg

SEQ ID NO: 2814 - RNA, 21 nt, synthetic construct
  misc_feature 1..21: note = Description of Artificial Sequence: Synthetic oligonucleotide
  source 1..21: mol_type = other RNA
  modified_base 1: mod_base = OTHER; note = 2'-O-methylcytidine-3'- phosphorothioate
  modified_base 2: mod_base = OTHER; note = 2'-O-methylguanosine-3'- phosphorothioate
  modified_base 3: mod_base = OTHER; note = 2'-O-methylcytidine-3'-phosphate
  modified_base 4: mod_base = OTHER; note = 2'-O-methylcytidine-3'-phosphate
  modified_base 5: mod_base = OTHER; note = 2'-O-methyladenosine-3'-phosphate
  modified_base 6: mod_base = OTHER; note = 2'-O-methylcytidine-3'-phosphate
  modified_base 7: mod_base = OTHER; note = 2'-fluoroadenosine-3'-phosphate
  modified_base 8: mod_base = OTHER; note = 2'-O-methyladenosine-3'-phosphate
  modified_base 9: mod_base = OTHER; note = 2'-fluorocytidine-3'-phosphate
  modified_base 10: mod_base = OTHER; note = 2'-fluorouridine-3'-phosphate
  modified_base 11: mod_base = OTHER; note = 2'-fluorocytidine-3'-phosphate
  modified_base 12: mod_base = OTHER; note = 2'-O-methyladenosine-3'-phosphate
  modified_base 13: mod_base = OTHER; note = 2'-O-methylguanosine-3'-phosphate
  modified_base 14: mod_base = OTHER; note = 2'-O-methylguanosine-3'-phosphate
  modified_base 15: mod_base = OTHER; note = 2'-O-methyladenosine-3'-phosphate
  modified_base 16: mod_base = OTHER; note = 2'-O-methyluridine-3'-phosphate
  modified_base 17: mod_base = OTHER; note = 2'-O-methylguanosine-3'-phosphate
  modified_base 18: mod_base = OTHER; note = 2'-O-methyladenosine-3'-phosphate
  modified_base 19: mod_base = OTHER; note = 2'-O-methyladenosine-3'-phosphate
  modified_base 20: mod_base = OTHER; note = 2'-O-methyladenosine-3'-phosphate
  modified_base 21: mod_base = OTHER; note = 2'-O-methyladenosine-3'-phosphate attached to N-[tris(N-acetylgalactosamine-alkyl)-amidodecanoyl)]-4-hydr oxyprolinol Hyp-(N-acetylgalactosamine-alkyl)3
cgccacaactcaggatgaaaa

SEQ ID NO: 2815 - RNA, 23 nt, synthetic construct
  misc_feature 1..23: note = Description of Artificial Sequence: Synthetic oligonucleotide
  source 1..23: mol_type = other RNA
  modified_base 1: mod_base = OTHER; note = 2'-O-methyluridine-3'-phosphorothioate
  modified_base 2: mod_base = OTHER; note = 2'-fluorouridine -3'-phosphorothioate
  modified_base 3: mod_base = OTHER; note = 2'-O-methyluridine-3'-phosphate
  modified_base 4: mod_base = OTHER; note = 2'-O-methyluridine-3'-phosphate
  modified_base 5: mod_base = OTHER; note = 2'-O-methylcytidine-3'-phosphate
  modified_base 6: mod_base = OTHER; note = 2'-fluoroadenosine-3'-phosphate
  modified_base 7: mod_base = OTHER; note = 2'-O-methyluridine-3'-phosphate
  modified_base 8: mod_base = OTHER; note = 2'-fluorocytidine-3'-phosphate
  modified_base 9: mod_base = OTHER; note = 2'-fluorocytidine-3'-phosphate
  modified_base 10: mod_base = OTHER; note = 2'-O-methyluridine-3'-phosphate
  modified_base 11: mod_base = OTHER; note = 2'-O-methylguanosine-3'-phosphate
  modified_base 12: mod_base = OTHER; note = 2'-O-methyladenosine-3'-phosphate
  modified_base 13: mod_base = OTHER; note = 2'-O-methylguanosine-3'-phosphate
  modified_base 14: mod_base = OTHER; note = 2'-fluorouridine-3'-phosphate
  modified_base 15: mod_base = OTHER; note = 2'-O-methyluridine-3'-phosphate
  modified_base 16: mod_base = OTHER; note = 2'-fluoroguanosine-3'-phosphate
  modified_base 17: mod_base = OTHER; note = 2'-O-methyluridine-3'-phosphate
  modified_base 18: mod_base = OTHER; note = 2'-O-methylguanosine-3'-phosphate
  modified_base 19: mod_base = OTHER; note = 2'-O-methylguanosine-3'-phosphate
  modified_base 20: mod_base = OTHER; note = 2'-O-methylcytidine-3'-phosphate
  modified_base 21: mod_base = OTHER; note = 2'-O-methylguanosine-3'- phosphorothioate
  modified_base 22: mod_base = OTHER; note = 2'-O-methylguanosine-3'- phosphorothioate
  modified_base 23: mod_base = OTHER; note = 2'-O-methylcytidine-3'-phosphate
ttttcatcctgagttgtggcggc

SEQ ID NO: 2816 - RNA, 21 nt, synthetic construct
  misc_feature 1..21: note = Description of Artificial Sequence: Synthetic oligonucleotide
  source 1..21: mol_type = other RNA
  modified_base 1: mod_base = OTHER; note = 2'-O-methylcytidine-3'- phosphorothioate
  modified_base 2: mod_base = OTHER; note = 2'-O-methylcytidine-3'- phosphorothioate
  modified_base 3: mod_base = OTHER; note = 2'-O-methylguanosine-3'-phosphate
  modified_base 4: mod_base = OTHER; note = 2'-O-methylcytidine-3'-phosphate
  modified_base 5: mod_base = OTHER; note = 2'-O-methylcytidine-3'-phosphate
  modified_base 6: mod_base = OTHER; note = 2'-O-methyladenosine-3'-phosphate
  modified_base 7: mod_base = OTHER; note = 2'-fluorocytidine-3'-phosphate
  modified_base 8: mod_base = OTHER; note = 2'-O-methyladenosine-3'-phosphate
  modified_base 9: mod_base = OTHER; note = 2'-fluoroadenosine-3'-phosphate
  modified_base 10: mod_base = OTHER; note = 2'-fluorocytidine-3'-phosphate
  modified_base 11: mod_base = OTHER; note = 2'-fluorouridine-3'-phosphate
  modified_base 12: mod_base = OTHER; note = 2'-O-methylcytidine-3'-phosphate
  modified_base 13: mod_base = OTHER; note = 2'-O-methyladenosine-3'-phosphate
  modified_base 14: mod_base = OTHER; note = 2'-O-methylguanosine-3'-phosphate
  modified_base 15: mod_base = OTHER; note = 2'-O-methylguanosine-3'-phosphate
  modified_base 16: mod_base = OTHER; note = 2'-O-methyladenosine-3'-phosphate
  modified_base 17: mod_base = OTHER; note = 2'-O-methyluridine-3'-phosphate
  modified_base 18: mod_base = OTHER; note = 2'-O-methylguanosine-3'-phosphate
  modified_base 19: mod_base = OTHER; note = 2'-O-methyladenosine-3'-phosphate
  modified_base 20: mod_base = OTHER; note = 2'-O-methyladenosine-3'-phosphate
  modified_base 21: mod_base = OTHER; note = 2'-O-methyladenosine-3'-phosphate attached to N-[tris(N-acetylgalactosamine-alkyl)-amidodecanoyl)]-4-hydr oxyprolinol Hyp-(N-acetylgalactosamine-alkyl)3
ccgccacaactcaggatgaaa

SEQ ID NO: 2817 - RNA, 23 nt, synthetic construct
  misc_feature 1..23: note = Description of Artificial Sequence: Synthetic oligonucleotide
  source 1..23: mol_type = other RNA
  modified_base 1: mod_base = OTHER; note = 2'-O-methyluridine-3'-phosphorothioate
  modified_base 2: mod_base = OTHER; note = 2'-fluorouridine -3'-phosphorothioate
  modified_base 3: mod_base = OTHER; note = 2'-O-methyluridine-3'-phosphate
  modified_base 4: mod_base = OTHER; note = 2'-O-methylcytidine-3'-phosphate
  modified_base 5: mod_base = OTHER; note = 2'-O-methyladenosine-3'-phosphate
  modified_base 6: mod_base = OTHER; note = 2'-fluorouridine-3'-phosphate
  modified_base 7: mod_base = OTHER; note = 2'-O-methylcytidine-3'-phosphate
  modified_base 8: mod_base = OTHER; note = 2'-fluorocytidine-3'-phosphate
  modified_base 9: mod_base = OTHER; note = 2'-fluorouridine-3'-phosphate
  modified_base 10: mod_base = OTHER; note = 2'-O-methylguanosine-3'-phosphate
  modified_base 11: mod_base = OTHER; note = 2'-O-methyladenosine-3'-phosphate
  modified_base 12: mod_base = OTHER; note = 2'-O-methylguanosine-3'-phosphate
  modified_base 13: mod_base = OTHER; note = 2'-O-methyluridine-3'-phosphate
  modified_base 14: mod_base = OTHER; note = 2'-fluorouridine-3'-phosphate
  modified_base 15: mod_base = OTHER; note = 2'-O-methylguanosine-3'-phosphate
  modified_base 16: mod_base = OTHER; note = 2'-fluorouridine-3'-phosphate
  modified_base 17: mod_base = OTHER; note = 2'-O-methylguanosine-3'-phosphate
  modified_base 18: mod_base = OTHER; note = 2'-O-methylguanosine-3'-phosphate
  modified_base 19: mod_base = OTHER; note = 2'-O-methylcytidine-3'-phosphate
  modified_base 20: mod_base = OTHER; note = 2'-O-methylguanosine-3'-phosphate
  modified_base 21: mod_base = OTHER; note = 2'-O-methylguanosine-3'- phosphorothioate
  modified_base 22: mod_base = OTHER; note = 2'-O-methylcytidine-3'- phosphorothioate
  modified_base 23: mod_base = OTHER; note = 2'-O-methyladenosine-3'-phosphate
tttcatcctgagttgtggcggca

SEQ ID NO: 2818 - RNA, 21 nt, synthetic construct
  misc_feature 1..21: note = Description of Artificial Sequence: Synthetic oligonucleotide
  source 1..21: mol_type = other RNA
  modified_base 1: mod_base = OTHER; note = 2'-O-methyladenosine-3'- phosphorothioate
  modified_base 2: mod_base = OTHER; note = 2'-O-methylguanosine-3'- phosphorothioate
  modified_base 3: mod_base = OTHER; note = 2'-O-methylguanosine-3'-phosphate
  modified_base 4: mod_base = OTHER; note = 2'-O-methylguanosine-3'-phosphate
  modified_base 5: mod_base = OTHER; note = 2'-O-methyladenosine-3'-phosphate
  modified_base 6: mod_base = OTHER; note = 2'-O-methyladenosine-3'-phosphate
  modified_base 7: mod_base = OTHER; note = 2'-fluoroguanosine-3'-phosphate
  modified_base 8: mod_base = OTHER; note = 2'-O-methylguanosine-3'-phosphate
  modified_base 9: mod_base = OTHER; note = 2'-fluorouridine-3'-phosphate
  modified_base 10: mod_base = OTHER; note = 2'-fluoroguanosine-3'-phosphate
  modified_base 11: mod_base = OTHER; note = 2'-fluoroguanosine-3'-phosphate
  modified_base 12: mod_base = OTHER; note = 2'-O-methyladenosine-3'-phosphate
  modified_base 13: mod_base = OTHER; note = 2'-O-methyladenosine-3'-phosphate
  modified_base 14: mod_base = OTHER; note = 2'-O-methylguanosine-3'-phosphate
  modified_base 15: mod_base = OTHER; note = 2'-O-methyluridine-3'-phosphate
  modified_base 16: mod_base = OTHER; note = 2'-O-methylcytidine-3'-phosphate
  modified_base 17: mod_base = OTHER; note = 2'-O-methyluridine-3'-phosphate
  modified_base 18: mod_base = OTHER; note = 2'-O-methyluridine-3'-phosphate
  modified_base 19: mod_base = OTHER; note = 2'-O-methylcytidine-3'-phosphate
  modified_base 20: mod_base = OTHER; note = 2'-O-methylcytidine-3'-phosphate
  modified_base 21: mod_base = OTHER; note = 2'-O-methyluridine-3'-phosphate attached to N-[tris(N-acetylgalactosamine-alkyl)-amidodecanoyl)]-4-hydr oxyprolinol Hyp-(N-acetylgalactosamine-alkyl)3
agggaaggtggaagtcttcct

SEQ ID NO: 2819 - RNA, 23 nt, synthetic construct
  misc_feature 1..23: note = Description of Artificial Sequence: Synthetic oligonucleotide
  source 1..23: mol_type = other RNA
  modified_base 1: mod_base = OTHER; note = 2'-O-methyladenosine-3'- phosphorothioate
  modified_base 2: mod_base = OTHER; note = 2'-fluoroguanosine-3'-phosphorothioate
  modified_base 3: mod_base = OTHER; note = 2'-O-methylguanosine-3'-phosphate
  modified_base 4: mod_base = OTHER; note = 2'-O-methyladenosine-3'-phosphate
  modified_base 5: mod_base = OTHER; note = 2'-O-methyladenosine-3'-phosphate
  modified_base 6: mod_base = OTHER; note = 2'-fluoroguanosine-3'-phosphate
  modified_base 7: mod_base = OTHER; note = 2'-O-methyladenosine-3'-phosphate
  modified_base 8: mod_base = OTHER; note = 2'-fluorocytidine-3'-phosphate
  modified_base 9: mod_base = OTHER; note = 2'-fluorouridine-3'-phosphate
  modified_base 10: mod_base = OTHER; note = 2'-O-methyluridine-3'-phosphate
  modified_base 11: mod_base = OTHER; note = 2'-O-methylcytidine-3'-phosphate
  modified_base 12: mod_base = OTHER; note = 2'-O-methylcytidine-3'-phosphate
  modified_base 13: mod_base = OTHER; note = 2'-O-methyladenosine-3'-phosphate
  modified_base 14: mod_base = OTHER; note = 2'-fluorocytidine-3'-phosphate
  modified_base 15: mod_base = OTHER; note = 2'-O-methylcytidine-3'-phosphate
  modified_base 16: mod_base = OTHER; note = 2'-fluorouridine-3'-phosphate
  modified_base 17: mod_base = OTHER; note = 2'-O-methyluridine-3'-phosphate
  modified_base 18: mod_base = OTHER; note = 2'-O-methylcytidine-3'-phosphate
  modified_base 19: mod_base = OTHER; note = 2'-O-methylcytidine-3'-phosphate
  modified_base 20: mod_base = OTHER; note = 2'-O-methylcytidine-3'-phosphate
  modified_base 21: mod_base = OTHER; note = 2'-O-methyluridine-3'-phosphorothioate
  modified_base 22: mod_base = OTHER; note = 2'-O-methyluridine-3'-phosphorothioate
  modified_base 23: mod_base = OTHER; note = 2'-O-methylcytidine-3'-phosphate
aggaagacttccaccttcccttc

SEQ ID NO: 2820 - RNA, 21 nt, synthetic construct
  misc_feature 1..21: note = Description of Artificial Sequence: Synthetic oligonucleotide
  source 1..21: mol_type = other RNA
  modified_base 1: mod_base = OTHER; note = 2'-O-methylguanosine-3'- phosphorothioate
  modified_base 2: mod_base = OTHER; note = 2'-O-methylguanosine-3'- phosphorothioate
  modified_base 3: mod_base = OTHER; note = 2'-O-methylguanosine-3'-phosphate
  modified_base 4: mod_base = OTHER; note = 2'-O-methyladenosine-3'-phosphate
  modified_base 5: mod_base = OTHER; note = 2'-O-methyladenosine-3'-phosphate
  modified_base 6: mod_base = OTHER; note = 2'-O-methylguanosine-3'-phosphate
  modified_base 7: mod_base = OTHER; note = 2'-fluoroguanosine-3'-phosphate
  modified_base 8: mod_base = OTHER; note = 2'-O-methyluridine-3'-phosphate
  modified_base 9: mod_base = OTHER; note = 2'-fluoroguanosine-3'-phosphate
  modified_base 10: mod_base = OTHER; note = 2'-fluoroguanosine-3'-phosphate
  modified_base 11: mod_base = OTHER; note = 2'-fluoroadenosine-3'-phosphate
  modified_base 12: mod_base = OTHER; note = 2'-O-methyladenosine-3'-phosphate
  modified_base 13: mod_base = OTHER; note = 2'-O-methylguanosine-3'-phosphate
  modified_base 14: mod_base = OTHER; note = 2'-O-methyluridine-3'-phosphate
  modified_base 15: mod_base = OTHER; note = 2'-O-methylcytidine-3'-phosphate
  modified_base 16: mod_base = OTHER; note = 2'-O-methyluridine-3'-phosphate
  modified_base 17: mod_base = OTHER; note = 2'-O-methyluridine-3'-phosphate
  modified_base 18: mod_base = OTHER; note = 2'-O-methylcytidine-3'-phosphate
  modified_base 19: mod_base = OTHER; note = 2'-O-methylcytidine-3'-phosphate
  modified_base 20: mod_base = OTHER; note = 2'-O-methyluridine-3'-phosphate
  modified_base 21: mod_base = OTHER; note = 2'-O-methylguanosine-3'-phosphate attached to N-[tris(N-acetylgalactosamine-alkyl)-amidodecanoyl)]-4-hydr oxyprolinol Hyp-(N-acetylgalactosamine-alkyl)3
gggaaggtggaagtcttcctg

SEQ ID NO: 2821 - RNA, 23 nt, synthetic construct
  misc_feature 1..23: note = Description of Artificial Sequence: Synthetic oligonucleotide
  source 1..23: mol_type = other RNA
  modified_base 1: mod_base = OTHER; note = 2'-O-methylcytidine-3'- phosphorothioate
  modified_base 2: mod_base = OTHER; note = 2'-fluoroadenosine-3'-phosphorothioate
  modified_base 3: mod_base = OTHER; note = 2'-O-methylguanosine-3'-phosphate
  modified_base 4: mod_base = OTHER; note = 2'-O-methylguanosine-3'-phosphate
  modified_base 5: mod_base = OTHER; note = 2'-O-methyladenosine-3'-phosphate
  modified_base 6: mod_base = OTHER; note = 2'-fluoroadenosine-3'-phosphate
  modified_base 7: mod_base = OTHER; note = 2'-O-methylguanosine-3'-phosphate
  modified_base 8: mod_base = OTHER; note = 2'-fluoroadenosine-3'-phosphate
  modified_base 9: mod_base = OTHER; note = 2'-fluorocytidine-3'-phosphate
  modified_base 10: mod_base = OTHER; note = 2'-O-methyluridine-3'-phosphate
  modified_base 11: mod_base = OTHER; note = 2'-O-methyluridine-3'-phosphate
  modified_base 12: mod_base = OTHER; note = 2'-O-methylcytidine-3'-phosphate
  modified_base 13: mod_base = OTHER; note = 2'-O-methylcytidine-3'-phosphate
  modified_base 14: mod_base = OTHER; note = 2'-fluoroadenosine-3'-phosphate
  modified_base 15: mod_base = OTHER; note = 2'-O-methylcytidine-3'-phosphate
  modified_base 16: mod_base = OTHER; note = 2'-fluorocytidine-3'-phosphate
  modified_base 17: mod_base = OTHER; note = 2'-O-methyluridine-3'-phosphate
  modified_base 18: mod_base = OTHER; note = 2'-O-methyluridine-3'-phosphate
  modified_base 19: mod_base = OTHER; note = 2'-O-methylcytidine-3'-phosphate
  modified_base 20: mod_base = OTHER; note = 2'-O-methylcytidine-3'-phosphate
  modified_base 21: mod_base = OTHER; note = 2'-O-methylcytidine-3'- phosphorothioate
  modified_base 22: mod_base = OTHER; note = 2'-O-methyluridine-3'-phosphorothioate
  modified_base 23: mod_base = OTHER; note = 2'-O-methyluridine-3'-phosphate
caggaagacttccaccttccctt

SEQ ID NO: 2822 - RNA, 21 nt, synthetic construct
  misc_feature 1..21: note = Description of Artificial Sequence: Synthetic oligonucleotide
  source 1..21: mol_type = other RNA
  modified_base 1: mod_base = OTHER; note = 2'-O-methyluridine-3'-phosphorothioate
  modified_base 2: mod_base = OTHER; note = 2'-O-methylguanosine-3'- phosphorothioate
  modified_base 3: mod_base = OTHER; note = 2'-O-methylguanosine-3'-phosphate
  modified_base 4: mod_base = OTHER; note = 2'-O-methyladenosine-3'-phosphate
  modified_base 5: mod_base = OTHER; note = 2'-O-methyladenosine-3'-phosphate
  modified_base 6: mod_base = OTHER; note = 2'-O-methylguanosine-3'-phosphate
  modified_base 7: mod_base = OTHER; note = 2'-fluoroguanosine-3'-phosphate
  modified_base 8: mod_base = OTHER; note = 2'-O-methylguanosine-3'-phosphate
  modified_base 9: mod_base = OTHER; note = 2'-fluoroadenosine-3'-phosphate
  modified_base 10: mod_base = OTHER; note = 2'-fluoroadenosine-3'-phosphate
  modified_base 11: mod_base = OTHER; note = 2'-fluoroguanosine-3'-phosphate
  modified_base 12: mod_base = OTHER; note = 2'-O-methylguanosine-3'-phosphate
  modified_base 13: mod_base = OTHER; note = 2'-O-methyluridine-3'-phosphate
  modified_base 14: mod_base = OTHER; note = 2'-O-methylguanosine-3'-phosphate
  modified_base 15: mod_base = OTHER; note = 2'-O-methylguanosine-3'-phosphate
  modified_base 16: mod_base = OTHER; note = 2'-O-methyladenosine-3'-phosphate
  modified_base 17: mod_base = OTHER; note = 2'-O-methyladenosine-3'-phosphate
  modified_base 18: mod_base = OTHER; note = 2'-O-methylguanosine-3'-phosphate
  modified_base 19: mod_base = OTHER; note = 2'-O-methyluridine-3'-phosphate
  modified_base 20: mod_base = OTHER; note = 2'-O-methylcytidine-3'-phosphate
  modified_base 21: mod_base = OTHER; note = 2'-O-methyluridine-3'-phosphate attached to N-[tris(N-acetylgalactosamine-alkyl)-amidodecanoyl)]-4-hydr oxyprolinol Hyp-(N-acetylgalactosamine-alkyl)3
tggaagggaaggtggaagtct

SEQ ID NO: 2823 - RNA, 23 nt, synthetic construct
  misc_feature 1..23: note = Description of Artificial Sequence: Synthetic oligonucleotide
  source 1..23: mol_type = other RNA
  modified_base 1: mod_base = OTHER; note = 2'-O-methyladenosine-3'- phosphorothioate
  modified_base 2: mod_base = OTHER; note = 2'-fluoroguanosine-3'-phosphorothioate
  modified_base 3: mod_base = OTHER; note = 2'-O-methyladenosine-3'-phosphate
  modified_base 4: mod_base = OTHER; note = 2'-O-methylcytidine-3'-phosphate
  modified_base 5: mod_base = OTHER; note = 2'-O-methyluridine-3'-phosphate
  modified_base 6: mod_base = OTHER; note = 2'-fluorouridine-3'-phosphate
  modified_base 7: mod_base = OTHER; note = 2'-O-methylcytidine-3'-phosphate
  modified_base 8: mod_base = OTHER; note = 2'-fluorocytidine-3'-phosphate
  modified_base 9: mod_base = OTHER; note = 2'-fluoroadenosine-3'-phosphate
  modified_base 10: mod_base = OTHER; note = 2'-O-methylcytidine-3'-phosphate
  modified_base 11: mod_base = OTHER; note = 2'-O-methylcytidine-3'-phosphate
  modified_base 12: mod_base = OTHER; note = 2'-O-methyluridine-3'-phosphate
  modified_base 13: mod_base = OTHER; note = 2'-O-methyluridine-3'-phosphate
  modified_base 14: mod_base = OTHER; note = 2'-fluorocytidine-3'-phosphate
  modified_base 15: mod_base = OTHER; note = 2'-O-methylcytidine-3'-phosphate
  modified_base 16: mod_base = OTHER; note = 2'-fluorocytidine-3'-phosphate
  modified_base 17: mod_base = OTHER; note = 2'-O-methyluridine-3'-phosphate
  modified_base 18: mod_base = OTHER; note = 2'-O-methyluridine-3'-phosphate
  modified_base 19: mod_base = OTHER; note = 2'-O-methylcytidine-3'-phosphate
  modified_base 20: mod_base = OTHER; note = 2'-O-methylcytidine-3'-phosphate
  modified_base 21: mod_base = OTHER; note = 2'-O-methyladenosine-3'- phosphorothioate
  modified_base 22: mod_base = OTHER; note = 2'-O-methylcytidine-3'- phosphorothioate
  modified_base 23: mod_base = OTHER; note = 2'-O-methyladenosine-3'-phosphate
agacttccaccttcccttccaca

SEQ ID NO: 2824 - RNA, 21 nt, synthetic construct
  misc_feature 1..21: note = Description of Artificial Sequence: Synthetic oligonucleotide
  source 1..21: mol_type = other RNA
  modified_base 1: mod_base = OTHER; note = 2'-O-methylguanosine-3'- phosphorothioate
  modified_base 2: mod_base = OTHER; note = 2'-O-methyluridine-3'-phosphorothioate
  modified_base 3: mod_base = OTHER; note = 2'-O-methylguanosine-3'-phosphate
  modified_base 4: mod_base = OTHER; note = 2'-O-methylguanosine-3'-phosphate
  modified_base 5: mod_base = OTHER; note = 2'-O-methyladenosine-3'-phosphate
  modified_base 6: mod_base = OTHER; note = 2'-O-methyladenosine-3'-phosphate
  modified_base 7: mod_base = OTHER; note = 2'-fluoroguanosine-3'-phosphate
  modified_base 8: mod_base = OTHER; note = 2'-O-methylguanosine-3'-phosphate
  modified_base 9: mod_base = OTHER; note = 2'-fluoroguanosine-3'-phosphate
  modified_base 10: mod_base = OTHER; note = 2'-fluoroadenosine-3'-phosphate
  modified_base 11: mod_base = OTHER; note = 2'-fluoroadenosine-3'-phosphate
  modified_base 12: mod_base = OTHER; note = 2'-O-methylguanosine-3'-phosphate
  modified_base 13: mod_base = OTHER; note = 2'-O-methylguanosine-3'-phosphate
  modified_base 14: mod_base = OTHER; note = 2'-O-methyluridine-3'-phosphate
  modified_base 15: mod_base = OTHER; note = 2'-O-methylguanosine-3'-phosphate
  modified_base 16: mod_base = OTHER; note = 2'-O-methylguanosine-3'-phosphate
  modified_base 17: mod_base = OTHER; note = 2'-O-methyladenosine-3'-phosphate
  modified_base 18: mod_base = OTHER; note = 2'-O-methyladenosine-3'-phosphate
  modified_base 19: mod_base = OTHER; note = 2'-O-methylguanosine-3'-phosphate
  modified_base 20: mod_base = OTHER; note = 2'-O-methyluridine-3'-phosphate
  modified_base 21: mod_base = OTHER; note = 2'-O-methylcytidine-3'-phosphate attached to N-[tris(N-acetylgalactosamine-alkyl)-amidodecanoyl)]-4-hydr oxyprolinol Hyp-(N-acetylgalactosamine-alkyl)3
gtggaagggaaggtggaagtc

SEQ ID NO: 2825 - RNA, 23 nt, synthetic construct
  misc_feature 1..23: note = Description of Artificial Sequence: Synthetic oligonucleotide
  source 1..23: mol_type = other RNA
  modified_base 1: mod_base = OTHER; note = 2'-O-methylguanosine-3'- phosphorothioate
  modified_base 2: mod_base = OTHER; note = 2'-fluoroadenosine-3'-phosphorothioate
  modified_base 3: mod_base = OTHER; note = 2'-O-methylcytidine-3'-phosphate
  modified_base 4: mod_base = OTHER; note = 2'-O-methyluridine-3'-phosphate
  modified_base 5: mod_base = OTHER; note = 2'-O-methyluridine-3'-phosphate
  modified_base 6: mod_base = OTHER; note = 2'-fluorocytidine-3'-phosphate
  modified_base 7: mod_base = OTHER; note = 2'-O-methylcytidine-3'-phosphate
  modified_base 8: mod_base = OTHER; note = 2'-fluoroadenosine-3'-phosphate
  modified_base 9: mod_base = OTHER; note = 2'-fluorocytidine-3'-phosphate
  modified_base 10: mod_base = OTHER; note = 2'-O-methylcytidine-3'-phosphate
  modified_base 11: mod_base = OTHER; note = 2'-O-methyluridine-3'-phosphate
  modified_base 12: mod_base = OTHER; note = 2'-O-methyluridine-3'-phosphate
  modified_base 13: mod_base = OTHER; note = 2'-O-methylcytidine-3'-phosphate
  modified_base 14: mod_base = OTHER; note = 2'-fluorocytidine-3'-phosphate
  modified_base 15: mod_base = OTHER; note = 2'-O-methylcytidine-3'-phosphate
  modified_base 16: mod_base = OTHER; note = 2'-fluorouridine-3'-phosphate
  modified_base 17: mod_base = OTHER; note = 2'-O-methyluridine-3'-phosphate
  modified_base 18: mod_base = OTHER; note = 2'-O-methylcytidine-3'-phosphate
  modified_base 19: mod_base = OTHER; note = 2'-O-methylcytidine-3'-phosphate
  modified_base 20: mod_base = OTHER; note = 2'-O-methyladenosine-3'-phosphate
  modified_base 21: mod_base = OTHER; note = 2'-O-methylcytidine-3'- phosphorothioate
  modified_base 22: mod_base = OTHER; note = 2'-O-methyladenosine-3'- phosphorothioate
  modified_base 23: mod_base = OTHER; note = 2'-O-methylguanosine-3'-phosphate
gacttccaccttcccttccacag

SEQ ID NO: 2826 - RNA, 21 nt, synthetic construct
  misc_feature 1..21: note = Description of Artificial Sequence: Synthetic oligonucleotide
  source 1..21: mol_type = other RNA
  modified_base 1: mod_base = OTHER; note = 2'-O-methylguanosine-3'- phosphorothioate
  modified_base 2: mod_base = OTHER; note = 2'-O-methylguanosine-3'- phosphorothioate
  modified_base 3: mod_base = OTHER; note = 2'-O-methylcytidine-3'-phosphate
  modified_base 4: mod_base = OTHER; note = 2'-O-methylguanosine-3'-phosphate
  modified_base 5: mod_base = OTHER; note = 2'-O-methyladenosine-3'-phosphate
  modified_base 6: mod_base = OTHER; note = 2'-O-methylguanosine-3'-phosphate
  modified_base 7: mod_base = OTHER; note = 2'-fluorocytidine-3'-phosphate
  modified_base 8: mod_base = OTHER; note = 2'-O-methyluridine-3'-phosphate
  modified_base 9: mod_base = OTHER; note = 2'-fluorouridine-3'-phosphate
  modified_base 10: mod_base = OTHER; note = 2'-fluoroguanosine-3'-phosphate
  modified_base 11: mod_base = OTHER; note = 2'-fluorocytidine-3'-phosphate
  modified_base 12: mod_base = OTHER; note = 2'-O-methylcytidine-3'-phosphate
  modified_base 13: mod_base = OTHER; note = 2'-O-methyladenosine-3'-phosphate
  modified_base 14: mod_base = OTHER; note = 2'-O-methylcytidine-3'-phosphate
  modified_base 15: mod_base = OTHER; note = 2'-O-methyluridine-3'-phosphate
  modified_base 16: mod_base = OTHER; note = 2'-O-methylguanosine-3'-phosphate
  modified_base 17: mod_base = OTHER; note = 2'-O-methyluridine-3'-phosphate
  modified_base 18: mod_base = OTHER; note = 2'-O-methylguanosine-3'-phosphate
  modified_base 19: mod_base = OTHER; note = 2'-O-methyladenosine-3'-phosphate
  modified_base 20: mod_base = OTHER; note = 2'-O-methylguanosine-3'-phosphate
  modified_base 21: mod_base = OTHER; note = 2'-O-methyladenosine-3'-phosphate attached to N-[tris(N-acetylgalactosamine-alkyl)-amidodecanoyl)]-4-hydr oxyprolinol Hyp-(N-acetylgalactosamine-alkyl)3
ggcgagcttgccactgtgaga

SEQ ID NO: 2827 - RNA, 23 nt, synthetic construct
  misc_feature 1..23: note = Description of Artificial Sequence: Synthetic oligonucleotide
  source 1..23: mol_type = other RNA
  modified_base 1: mod_base = OTHER; note = 2'-O-methyluridine-3'-phosphorothioate
  modified_base 2: mod_base = OTHER; note = 2'-fluorocytidine-3'-phosphorothioate
  modified_base 3: mod_base = OTHER; note = 2'-O-methyluridine-3'-phosphate
  modified_base 4: mod_base = OTHER; note = 2'-O-methylcytidine-3'-phosphate
  modified_base 5: mod_base = OTHER; note = 2'-O-methyladenosine-3'-phosphate
  modified_base 6: mod_base = OTHER; note = 2'-fluorocytidine-3'-phosphate
  modified_base 7: mod_base = OTHER; note = 2'-O-methyladenosine-3'-phosphate
  modified_base 8: mod_base = OTHER; note = 2'-fluoroguanosine-3'-phosphate
  modified_base 9: mod_base = OTHER; note = 2'-fluorouridine-3'-phosphate
  modified_base 10: mod_base = OTHER; note = 2'-O-methylguanosine-3'-phosphate
  modified_base 11: mod_base = OTHER; note = 2'-O-methylguanosine-3'-phosphate
  modified_base 12: mod_base = OTHER; note = 2'-O-methylcytidine-3'-phosphate
  modified_base 13: mod_base = OTHER; note = 2'-O-methyladenosine-3'-phosphate
  modified_base 14: mod_base = OTHER; note = 2'-fluoroadenosine-3'-phosphate
  modified_base 15: mod_base = OTHER; note = 2'-O-methylguanosine-3'-phosphate
  modified_base 16: mod_base = OTHER; note = 2'-fluorocytidine-3'-phosphate
  modified_base 17: mod_base = OTHER; note = 2'-O-methyluridine-3'-phosphate
  modified_base 18: mod_base = OTHER; note = 2'-O-methylcytidine-3'-phosphate
  modified_base 19: mod_base = OTHER; note = 2'-O-methylguanosine-3'-phosphate
  modified_base 20: mod_base = OTHER; note = 2'-O-methylcytidine-3'-phosphate
  modified_base 21: mod_base = OTHER; note = 2'-O-methylcytidine-3'- phosphorothioate
  modified_base 22: mod_base = OTHER; note = 2'-O-methylguanosine-3'- phosphorothioate
  modified_base 23: mod_base = OTHER; note = 2'-O-methyluridine-3'-phosphate
tctcacagtggcaagctcgccgt

SEQ ID NO: 2828 - RNA, 21 nt, synthetic construct
  misc_feature 1..21: note = Description of Artificial Sequence: Synthetic oligonucleotide
  source 1..21: mol_type = other RNA
  modified_base 1: mod_base = OTHER; note = 2'-O-methylguanosine-3'- phosphorothioate
  modified_base 2: mod_base = OTHER; note = 2'-O-methylcytidine-3'- phosphorothioate
  modified_base 3: mod_base = OTHER; note = 2'-O-methylguanosine-3'-phosphate
  modified_base 4: mod_base = OTHER; note = 2'-O-methyladenosine-3'-phosphate
  modified_base 5: mod_base = OTHER; note = 2'-O-methylguanosine-3'-phosphate
  modified_base 6: mod_base = OTHER; note = 2'-O-methylcytidine-3'-phosphate
  modified_base 7: mod_base = OTHER; note = 2'-fluorouridine-3'-phosphate
  modified_base 8: mod_base = OTHER; note = 2'-O-methyluridine-3'-phosphate
  modified_base 9: mod_base = OTHER; note = 2'-fluoroguanosine-3'-phosphate
  modified_base 10: mod_base = OTHER; note = 2'-fluorocytidine-3'-phosphate
  modified_base 11: mod_base = OTHER; note = 2'-fluorocytidine-3'-phosphate
  modified_base 12: mod_base = OTHER; note = 2'-O-methyladenosine-3'-phosphate
  modified_base 13: mod_base = OTHER; note = 2'-O-methylcytidine-3'-phosphate
  modified_base 14: mod_base = OTHER; note = 2'-O-methyluridine-3'-phosphate
  modified_base 15: mod_base = OTHER; note = 2'-O-methylguanosine-3'-phosphate
  modified_base 16: mod_base = OTHER; note = 2'-O-methyluridine-3'-phosphate
  modified_base 17: mod_base = OTHER; note = 2'-O-methylguanosine-3'-phosphate
  modified_base 18: mod_base = OTHER; note = 2'-O-methyladenosine-3'-phosphate
  modified_base 19: mod_base = OTHER; note = 2'-O-methylguanosine-3'-phosphate
  modified_base 20: mod_base = OTHER; note = 2'-O-methyladenosine-3'-phosphate
  modified_base 21: mod_base = OTHER; note = 2'-O-methylguanosine-3'-phosphate attached to N-[tris(N-acetylgalactosamine-alkyl)-amidodecanoyl)]-4-hydr oxyprolinol Hyp-(N-acetylgalactosamine-alkyl)3
gcgagcttgccactgtgagag

SEQ ID NO: 2829 - RNA, 23 nt, synthetic construct
  misc_feature 1..23: note = Description of Artificial Sequence: Synthetic oligonucleotide
  source 1..23: mol_type = other RNA
  modified_base 1: mod_base = OTHER; note = 2'-O-methylcytidine-3'- phosphorothioate
  modified_base 2: mod_base = OTHER; note = 2'-fluorouridine -3'-phosphorothioate
  modified_base 3: mod_base = OTHER; note = 2'-O-methylcytidine-3'-phosphate
  modified_base 4: mod_base = OTHER; note = 2'-O-methyluridine-3'-phosphate
  modified_base 5: mod_base = OTHER; note = 2'-O-methylcytidine-3'-phosphate
  modified_base 6: mod_base = OTHER; note = 2'-fluoroadenosine-3'-phosphate
  modified_base 7: mod_base = OTHER; note = 2'-O-methylcytidine-3'-phosphate
  modified_base 8: mod_base = OTHER; note = 2'-fluoroadenosine-3'-phosphate
  modified_base 9: mod_base = OTHER; note = 2'-fluoroguanosine-3'-phosphate
  modified_base 10: mod_base = OTHER; note = 2'-O-methyluridine-3'-phosphate
  modified_base 11: mod_base = OTHER; note = 2'-O-methylguanosine-3'-phosphate
  modified_base 12: mod_base = OTHER; note = 2'-O-methylguanosine-3'-phosphate
  modified_base 13: mod_base = OTHER; note = 2'-O-methylcytidine-3'-phosphate
  modified_base 14: mod_base = OTHER; note = 2'-fluoroadenosine-3'-phosphate
  modified_base 15: mod_base = OTHER; note = 2'-O-methyladenosine-3'-phosphate
  modified_base 16: mod_base = OTHER; note = 2'-fluoroguanosine-3'-phosphate
  modified_base 17: mod_base = OTHER; note = 2'-O-methylcytidine-3'-phosphate
  modified_base 18: mod_base = OTHER; note = 2'-O-methyluridine-3'-phosphate
  modified_base 19: mod_base = OTHER; note = 2'-O-methylcytidine-3'-phosphate
  modified_base 20: mod_base = OTHER; note = 2'-O-methylguanosine-3'-phosphate
  modified_base 21: mod_base = OTHER; note = 2'-O-methylcytidine-3'- phosphorothioate
  modified_base 22: mod_base = OTHER; note = 2'-O-methylcytidine-3'- phosphorothioate
  modified_base 23: mod_base = OTHER; note = 2'-O-methylguanosine-3'-phosphate
ctctcacagtggcaagctcgccg

SEQ ID NO: 2830 - RNA, 21 nt, synthetic construct
  misc_feature 1..21: note = Description of Artificial Sequence: Synthetic oligonucleotide
  source 1..21: mol_type = other RNA
  modified_base 1: mod_base = OTHER; note = 2'-O-methylguanosine-3'- phosphorothioate
  modified_base 2: mod_base = OTHER; note = 2'-O-methylguanosine-3'- phosphorothioate
  modified_base 3: mod_base = OTHER; note = 2'-O-methyladenosine-3'-phosphate
  modified_base 4: mod_base = OTHER; note = 2'-O-methylcytidine-3'-phosphate
  modified_base 5: mod_base = OTHER; note = 2'-O-methylguanosine-3'-phosphate
  modified_base 6: mod_base = OTHER; note = 2'-O-methylguanosine-3'-phosphate
  modified_base 7: mod_base = OTHER; note = 2'-fluorocytidine-3'-phosphate
  modified_base 8: mod_base = OTHER; note = 2'-O-methylguanosine-3'-phosphate
  modified_base 9: mod_base = OTHER; note = 2'-fluoroadenosine-3'-phosphate
  modified_base 10: mod_base = OTHER; note = 2'-fluoroguanosine-3'-phosphate
  modified_base 11: mod_base = OTHER; note = 2'-fluorocytidine-3'-phosphate
  modified_base 12: mod_base = OTHER; note = 2'-O-methyluridine-3'-phosphate
  modified_base 13: mod_base = OTHER; note = 2'-O-methyluridine-3'-phosphate
  modified_base 14: mod_base = OTHER; note = 2'-O-methylguanosine-3'-phosphate
  modified_base 15: mod_base = OTHER; note = 2'-O-methylcytidine-3'-phosphate
  modified_base 16: mod_base = OTHER; note = 2'-O-methylcytidine-3'-phosphate
  modified_base 17: mod_base = OTHER; note = 2'-O-methyladenosine-3'-phosphate
  modified_base 18: mod_base = OTHER; note = 2'-O-methylcytidine-3'-phosphate
  modified_base 19: mod_base = OTHER; note = 2'-O-methyluridine-3'-phosphate
  modified_base 20: mod_base = OTHER; note = 2'-O-methylguanosine-3'-phosphate
  modified_base 21: mod_base = OTHER; note = 2'-O-methyluridine-3'-phosphate attached to N-[tris(N-acetylgalactosamine-alkyl)-amidodecanoyl)]-4-hydr oxyprolinol Hyp-(N-acetylgalactosamine-alkyl)3
ggacggcgagcttgccactgt

SEQ ID NO: 2831 - RNA, 23 nt, synthetic construct
  misc_feature 1..23: note = Description of Artificial Sequence: Synthetic oligonucleotide
  source 1..23: mol_type = other RNA
  modified_base 1: mod_base = OTHER; note = 2'-O-methyladenosine-3'- phosphorothioate
  modified_base 2: mod_base = OTHER; note = 2'-fluorocytidine-3'-phosphorothioate
  modified_base 3: mod_base = OTHER; note = 2'-O-methyladenosine-3'-phosphate
  modified_base 4: mod_base = OTHER; note = 2'-O-methylguanosine-3'-phosphate
  modified_base 5: mod_base = OTHER; note = 2'-O-methyluridine-3'-phosphate
  modified_base 6: mod_base = OTHER; note = 2'-fluoroguanosine-3'-phosphate
  modified_base 7: mod_base = OTHER; note = 2'-O-methylguanosine-3'-phosphate
  modified_base 8: mod_base = OTHER; note = 2'-fluorocytidine-3'-phosphate
  modified_base 9: mod_base = OTHER; note = 2'-fluoroadenosine-3'-phosphate
  modified_base 10: mod_base = OTHER; note = 2'-O-methyladenosine-3'-phosphate
  modified_base 11: mod_base = OTHER; note = 2'-O-methylguanosine-3'-phosphate
  modified_base 12: mod_base = OTHER; note = 2'-O-methylcytidine-3'-phosphate
  modified_base 13: mod_base = OTHER; note = 2'-O-methyluridine-3'-phosphate
  modified_base 14: mod_base = OTHER; note = 2'-fluorocytidine-3'-phosphate
  modified_base 15: mod_base = OTHER; note = 2'-O-methylguanosine-3'-phosphate
  modified_base 16: mod_base = OTHER; note = 2'-fluorocytidine-3'-phosphate
  modified_base 17: mod_base = OTHER; note = 2'-O-methylcytidine-3'-phosphate
  modified_base 18: mod_base = OTHER; note = 2'-O-methylguanosine-3'-phosphate
  modified_base 19: mod_base = OTHER; note = 2'-O-methyluridine-3'-phosphate
  modified_base 20: mod_base = OTHER; note = 2'-O-methylcytidine-3'-phosphate
  modified_base 21: mod_base = OTHER; note = 2'-O-methylcytidine-3'- phosphorothioate
  modified_base 22: mod_base = OTHER; note = 2'-O-methyladenosine-3'- phosphorothioate
  modified_base 23: mod_base = OTHER; note = 2'-O-methylcytidine-3'-phosphate
acagtggcaagctcgccgtccac

(The sequence listing continues in the following parts.)
